United States Patent Application Publication US 2013/0309769 A1 - sequence listing, part 4

SEQ ID NO: 3192 - DNA, 66763 bp, Homo sapiens
  misc_feature (38756)..(38756): n is a, c, g, or t
  misc_feature (38774)..(38774): n is a, c, g, or t
  misc_feature (38777)..(38777): n is a, c, g, or t
  misc_feature (38834)..(38834): n is a, c, g, or t
  misc_feature (38837)..(38837): n is a, c, g, or t
  misc_feature (38858)..(38858): n is a, c, g, or t
  misc_feature (38867)..(38867): n is a, c, g, or t
  misc_feature (38882)..(38882): n is a, c, g, or t
  misc_feature (38891)..(38891): n is a, c, g, or t
  misc_feature (41832)..(41832): n is a, c, g, or t
  misc_feature (41837)..(41837): n is a, c, g, or t
  misc_feature (41842)..(41842): n is a, c, g, or t
  misc_feature (41846)..(41846): n is a, c, g, or t
  misc_feature (41858)..(41858): n is a, c, g, or t
  misc_feature (41864)..(41864): n is a, c, g, or t
  misc_feature (41873)..(41875): n is a, c, g, or t
  misc_feature (41880)..(41882): n is a, c, g, or t
  misc_feature (41891)..(41891): n is a, c, g, or t
  misc_feature (41910)..(41910): n is a, c, g, or t
  misc_feature (41941)..(41941): n is a, c, g, or t
  misc_feature (41944)..(41944): n is a, c, g, or t
  misc_feature (41950)..(41950): n is a, c, g, or t
  misc_feature (41985)..(41985): n is a, c, g, or t
  misc_feature (41988)..(41988): n is a, c, g, or t
  misc_feature (41990)..(41990): n is a, c, g, or t
  misc_feature (41993)..(41993): n is a, c, g, or t
  misc_feature (41999)..(41999): n is a, c, g, or t
  misc_feature (42015)..(42015): n is a, c, g, or t
  misc_feature (42021)..(42021): n is a, c, g, or t
  misc_feature (42025)..(42025): n is a, c, g, or t
  misc_feature (43908)..(43908): n is a, c, g, or t
  misc_feature (43910)..(43911): n is a, c, g, or t
  misc_feature (43915)..(43915): n is a, c, g, or t
  misc_feature (43926)..(43926): n is a, c, g, or t
  misc_feature (43928)..(43928): n is a, c, g, or t
  misc_feature (43931)..(43931): n is a, c, g, or t
  misc_feature (43938)..(43938): n is a, c, g, or t
  misc_feature (43946)..(43946): n is a, c, g, or t
  misc_feature (43964)..(43964): n is a, c, g, or t
  misc_feature (43967)..(43967): n is a, c, g, or t
  misc_feature (43969)..(43969): n is a, c, g, or t
  misc_feature (43973)..(43974): n is a, c, g, or t
  misc_feature (43981)..(43982): n is a, c, g, or t
  misc_feature (43984)..(43984): n is a, c, g, or t
  misc_feature (43988)..(43988): n is a, c, g, or t
  misc_feature (43991)..(43991): n is a, c, g, or t
  misc_feature (44012)..(44012): n is a, c, g, or t
  misc_feature (44376)..(44376): n is a, c, g, or t
  misc_feature (44378)..(44379): n is a, c, g, or t
  misc_feature (44383)..(44383): n is a, c, g, or t
  misc_feature (44394)..(44394): n is a, c, g, or t
  misc_feature (44396)..(44396): n is a, c, g, or t
  misc_feature (44399)..(44399): n is a, c, g, or t
  misc_feature (44406)..(44406): n is a, c, g, or t
  misc_feature (44414)..(44414): n is a, c, g, or t
  misc_feature (44432)..(44432): n is a, c, g, or t
  misc_feature (44435)..(44435): n is a, c, g, or t
  misc_feature (44437)..(44437): n is a, c, g, or t
  misc_feature (44441)..(44442): n is a, c, g, or t
  misc_feature (44449)..(44450): n is a, c, g, or t
  misc_feature (44452)..(44452): n is a, c, g, or t
  misc_feature (44456)..(44456): n is a, c, g, or t
  misc_feature (44459)..(44459): n is a, c, g, or t
  misc_feature (44480)..(44480): n is a, c, g, or t
  misc_feature (47184)..(47184): n is a, c, g, or t
  misc_feature (47186)..(47187): n is a, c, g, or t
  misc_feature (47191)..(47191): n is a, c, g, or t
  misc_feature (47202)..(47202): n is a, c, g, or t
  misc_feature (47204)..(47204): n is a, c, g, or t
  misc_feature (47207)..(47207): n is a, c, g, or t
  misc_feature (47214)..(47214): n is a, c, g, or t
  misc_feature (47222)..(47222): n is a, c, g, or t
  misc_feature (47240)..(47240): n is a, c, g, or t
  misc_feature (47243)..(47243): n is a, c, g, or t
  misc_feature (47245)..(47245): n is a, c, g, or t
  misc_feature (47249)..(47250): n is a, c, g, or t
  misc_feature (47257)..(47258): n is a, c, g, or t
  misc_feature (47260)..(47260): n is a, c, g, or t
  misc_feature (47264)..(47264): n is a, c, g, or t
  misc_feature (47267)..(47267): n is a, c, g, or t
  misc_feature (47288)..(47288): n is a, c, g, or t
  misc_feature (48117)..(48117): n is a, c, g, or t
  misc_feature (48119)..(48120): n is a, c, g, or t
  misc_feature (48124)..(48124): n is a, c, g, or t
  misc_feature (48135)..(48135): n is a, c, g, or t
  misc_feature (48137)..(48137): n is a, c, g, or t
  misc_feature (48140)..(48140): n is a, c, g, or t
  misc_feature (48147)..(48147): n is a, c, g, or t
  misc_feature (48155)..(48155): n is a, c, g, or t
  misc_feature (48173)..(48173): n is a, c, g, or t
  misc_feature (48176)..(48176): n is a, c, g, or t
  misc_feature (48178)..(48178): n is a, c, g, or t
  misc_feature (48182)..(48183): n is a, c, g, or t
  misc_feature (48190)..(48191): n is a, c, g, or t
  misc_feature (48193)..(48193): n is a, c, g, or t
  misc_feature (48197)..(48197): n is a, c, g, or t
  misc_feature (48200)..(48200): n is a, c, g, or t
  misc_feature (48221)..(48221): n is a, c, g, or t
  misc_feature (48225)..(48225): n is a, c, g, or t
  misc_feature (48227)..(48227): n is a, c, g, or t
  misc_feature (48230)..(48230): n is a, c, g, or t
  misc_feature (48245)..(48248): n is a, c, g, or t
  misc_feature (48252)..(48252): n is a, c, g, or t
  misc_feature (48254)..(48254): n is a, c, g, or t
  misc_feature (48264)..(48264): n is a, c, g, or t
  misc_feature (48272)..(48272): n is a, c, g, or t
  misc_feature (48277)..(48277): n is a, c, g, or t
  misc_feature (48304)..(48305): n is a, c, g, or t
  misc_feature (48312)..(48312): n is a, c, g, or t
  misc_feature (48314)..(48314): n is a, c, g, or t
  misc_feature (48321)..(48321): n is a, c, g, or t
  misc_feature (48326)..(48326): n is a, c, g, or t
  misc_feature (48339)..(48339): n is a, c, g, or t
  misc_feature (48355)..(48355): n is a, c, g, or t
  misc_feature (48361)..(48362): n is a, c, g, or t
  misc_feature (48364)..(48364): n is a, c, g, or t
  misc_feature (48366)..(48366): n is a, c, g, or t
  misc_feature (48368)..(48368): n is a, c, g, or t
  misc_feature (48377)..(48377): n is a, c, g, or t
  misc_feature (48387)..(48387): n is a, c, g, or t
  misc_feature (48392)..(48392): n is a, c, g, or t
  misc_feature (48397)..(48397): n is a, c, g, or t
  misc_feature (48401)..(48401): n is a, c, g, or t
  misc_feature (48413)..(48413): n is a, c, g, or t
  misc_feature (48419)..(48419): n is a, c, g, or t
  misc_feature (48428)..(48430): n is a, c, g, or t
  misc_feature (48435)..(48437): n is a, c, g, or t
  misc_feature (48446)..(48446): n is a, c, g, or t
  misc_feature (48465)..(48465): n is a, c, g, or t
  misc_feature (49005)..(49005): n is a, c, g, or t
  misc_feature (49008)..(49008): n is a, c, g, or t
  misc_feature (49010)..(49010): n is a, c, g, or t
  misc_feature (49013)..(49013): n is a, c, g, or t
  misc_feature (49019)..(49019): n is a, c, g, or t
  misc_feature (49035)..(49035): n is a, c, g, or t
  misc_feature (49041)..(49041): n is a, c, g, or t
  misc_feature (49045)..(49045): n is a, c, g, or t
  misc_feature (49320)..(49320): n is a, c, g, or t
  misc_feature (49325)..(49325): n is a, c, g, or t
  misc_feature (49330)..(49330): n is a, c, g, or t
  misc_feature (49334)..(49334): n is a, c, g, or t
  misc_feature (49346)..(49346): n is a, c, g, or t
  misc_feature (49352)..(49352): n is a, c, g, or t
  misc_feature (49361)..(49363): n is a, c, g, or t
  misc_feature (49368)..(49370): n is a, c, g, or t
  misc_feature (49379)..(49379): n is a, c, g, or t
  misc_feature (49398)..(49398): n is a, c, g, or t
  misc_feature (49429)..(49429): n is a, c, g, or t
  misc_feature (49432)..(49432): n is a, c, g, or t
  misc_feature (49438)..(49438): n is a, c, g, or t
  misc_feature (49473)..(49473): n is a, c, g, or t
  misc_feature (49476)..(49476): n is a, c, g, or t
  misc_feature (49478)..(49478): n is a, c, g, or t
  misc_feature (49481)..(49481): n is a, c, g, or t
  misc_feature (49487)..(49487): n is a, c, g, or t
  misc_feature (49503)..(49503): n is a, c, g, or t
  misc_feature (49509)..(49509): n is a, c, g, or t
  misc_feature (49513)..(49513): n is a, c, g, or t
  misc_feature (49518)..(49518): n is a, c, g, or t
  misc_feature (49520)..(49521): n is a, c, g, or t
  misc_feature (49525)..(49525): n is a, c, g, or t
  misc_feature (49536)..(49536): n is a, c, g, or t
  misc_feature (49538)..(49538): n is a, c, g, or t
  misc_feature (49541)..(49541): n is a, c, g, or t
  misc_feature (49548)..(49548): n is a, c, g, or t
  misc_feature (49556)..(49556): n is a, c, g, or t
  misc_feature (49574)..(49574): n is a, c, g, or t
  misc_feature (49577)..(49577): n is a, c, g, or t
  misc_feature (49579)..(49579): n is a, c, g, or t
  misc_feature (49583)..(49584): n is a, c, g, or t
  misc_feature (49591)..(49592): n is a, c, g, or t
  misc_feature (49594)..(49594): n is a, c, g, or t
  misc_feature (49598)..(49598): n is a, c, g, or t
  misc_feature (49601)..(49601): n is a, c, g, or t
  misc_feature (49622)..(49622): n is a, c, g, or t
  misc_feature (50724)..(50724): n is a, c, g, or t
  misc_feature (50729)..(50729): n is a, c, g, or t
  misc_feature (50734)..(50734): n is a, c, g, or t
  misc_feature (50738)..(50738): n is a, c, g, or t
  misc_feature (50750)..(50750): n is a, c, g, or t
  misc_feature (50756)..(50756): n is a, c, g, or t
  misc_feature (50765)..(50767): n is a, c, g, or t
  misc_feature (50772)..(50774): n is a, c, g, or t
  misc_feature (50783)..(50783): n is a, c, g, or t
  misc_feature (50802)..(50802): n is a, c, g, or t
  misc_feature (50833)..(50833): n is a, c, g, or t
  misc_feature (50836)..(50836): n is a, c, g, or t
  misc_feature (50842)..(50842): n is a, c, g, or t
  misc_feature (50877)..(50877): n is a, c, g, or t
  misc_feature (50880)..(50880): n is a, c, g, or t
  misc_feature (50882)..(50882): n is a, c, g, or t
  misc_feature (50885)..(50885): n is a, c, g, or t
  misc_feature (50891)..(50891): n is a, c, g, or t
  misc_feature (50907)..(50907): n is a, c, g, or t
  misc_feature (50913)..(50913): n is a, c, g, or t
  misc_feature (50917)..(50917): n is a, c, g, or t
  misc_feature (50922)..(50922): n is a, c, g, or t
  misc_feature (50924)..(50925): n is a, c, g, or t
  misc_feature (50929)..(50929): n is a, c, g, or t
  misc_feature (50940)..(50940): n is a, c, g, or t
  misc_feature (50942)..(50942): n is a, c, g, or t
  misc_feature (50945)..(50945): n is a, c, g, or t
  misc_feature (50952)..(50952): n is a, c, g, or t
  misc_feature (50960)..(50960): n is a, c, g, or t
  misc_feature (50978)..(50978): n is a, c, g, or t
  misc_feature (50981)..(50981): n is a, c, g, or t
  misc_feature (50983)..(50983): n is a, c, g, or t
  misc_feature (50987)..(50988): n is a, c, g, or t
  misc_feature (50995)..(50996): n is a, c, g, or t
  misc_feature (50998)..(50998): n is a, c, g, or t
  misc_feature (51002)..(51002): n is a, c, g, or t
  misc_feature (51005)..(51005): n is a, c, g, or t
  misc_feature (51026)..(51026): n is a, c, g, or t
  misc_feature (52596)..(52596): n is a, c, g, or t
  misc_feature (52601)..(52601): n is a, c, g, or t
  misc_feature (52606)..(52606): n is a, c, g, or t
  misc_feature (52610)..(52610): n is a, c, g, or t
  misc_feature (52622)..(52622): n is a, c, g, or t
  misc_feature (52628)..(52628): n is a, c, g, or t
  misc_feature (52637)..(52639): n is a, c, g, or t
  misc_feature (52644)..(52646): n is a, c, g, or t
  misc_feature (52655)..(52655): n is a, c, g, or t
  misc_feature (52674)..(52674): n is a, c, g, or t
  misc_feature (52705)..(52705): n is a, c, g, or t
  misc_feature (52708)..(52708): n is a, c, g, or t
  misc_feature (52714)..(52714): n is a, c, g, or t
  misc_feature (52749)..(52749): n is a, c, g, or t
  misc_feature (52752)..(52752): n is a, c, g, or t
  misc_feature (52754)..(52754): n is a, c, g, or t
  misc_feature (52757)..(52757): n is a, c, g, or t
  misc_feature (52763)..(52763): n is a, c, g, or t
  misc_feature (52779)..(52779): n is a, c, g, or t
  misc_feature (52785)..(52785): n is a, c, g, or t
  misc_feature (52789)..(52789): n is a, c, g, or t
  misc_feature (52794)..(52794): n is a, c, g, or t
  misc_feature (52796)..(52797): n is a, c, g, or t
  misc_feature (52801)..(52801): n is a, c, g, or t
  misc_feature (52812)..(52812): n is a, c, g, or t
  misc_feature (52814)..(52814): n is a, c, g, or t
  misc_feature (52817)..(52817): n is a, c, g, or t
  misc_feature (52824)..(52824): n is a, c, g, or t
  misc_feature (52832)..(52832): n is a, c, g, or t
  misc_feature (52850)..(52850): n is a, c, g, or t
  misc_feature (52853)..(52853): n is a, c, g, or t
  misc_feature (52855)..(52855): n is a, c, g, or t
  misc_feature (52859)..(52860): n is a, c, g, or t
  misc_feature (52867)..(52868): n is a, c, g, or t
  misc_feature (52870)..(52870): n is a, c, g, or t
  misc_feature (52874)..(52874): n is a, c, g, or t
  misc_feature (52877)..(52877): n is a, c, g, or t
  misc_feature (52898)..(52898): n is a, c, g, or t
  misc_feature (52902)..(52902): n is a, c, g, or t
  misc_feature (52904)..(52904): n is a, c, g, or t
  misc_feature (52907)..(52907): n is a, c, g, or t
  misc_feature (52922)..(52925): n is a, c, g, or t
  misc_feature (52929)..(52929): n is a, c, g, or t
  misc_feature (52931)..(52931): n is a, c, g, or t
  misc_feature (52941)..(52941): n is a, c, g, or t
  misc_feature (52949)..(52949): n is a, c, g, or t
  misc_feature (52954)..(52954): n is a, c, g, or t
  misc_feature (52981)..(52982): n is a, c, g, or t
  misc_feature (52989)..(52989): n is a, c, g, or t
  misc_feature (52991)..(52991): n is a, c, g, or t
  misc_feature (52998)..(52998): n is a, c, g, or t
  misc_feature (53003)..(53003): n is a, c, g, or t
  misc_feature (53016)..(53016): n is a, c, g, or t
  misc_feature (53032)..(53032): n is a, c, g, or t
  misc_feature (53038)..(53039): n is a, c, g, or t
  misc_feature (53041)..(53041): n is a, c, g, or t
  misc_feature (53043)..(53043): n is a, c, g, or t
  misc_feature (53045)..(53045): n is a, c, g, or t
  misc_feature (53054)..(53054): n is a, c, g, or t
  misc_feature (53064)..(53064): n is a, c, g, or t
  misc_feature (53069)..(53069): n is a, c, g, or t
  misc_feature (53074)..(53074): n is a, c, g, or t
  misc_feature (53078)..(53078): n is a, c, g, or t
  misc_feature (53090)..(53090): n is a, c, g, or t
  misc_feature (53096)..(53096): n is a, c, g, or t
  misc_feature (53532)..(53532): n is a, c, g, or t
  misc_feature (53537)..(53537): n is a, c, g, or t
  misc_feature (53542)..(53542): n is a, c, g, or t
  misc_feature (53546)..(53546): n is a, c, g, or t
  misc_feature (53558)..(53558): n is a, c, g, or t
  misc_feature (53564)..(53564): n is a, c, g, or t
  misc_feature (53573)..(53575): n is a, c, g, or t
  misc_feature (53580)..(53582): n is a, c, g, or t
  misc_feature (53591)..(53591): n is a, c, g, or t
  misc_feature (53610)..(53610): n is a, c, g, or t
  misc_feature (53641)..(53641): n is a, c, g, or t
  misc_feature (53644)..(53644): n is a, c, g, or t
  misc_feature (53650)..(53650): n is a, c, g, or t
  misc_feature (53685)..(53685): n is a, c, g, or t
  misc_feature (53688)..(53688): n is a, c, g, or t
  misc_feature (53690)..(53690): n is a, c, g, or t
  misc_feature (53693)..(53693): n is a, c, g, or t
  misc_feature (53699)..(53699): n is a, c, g, or t
  misc_feature (53715)..(53715): n is a, c, g, or t
  misc_feature (53721)..(53721): n is a, c, g, or t
  misc_feature (53725)..(53725): n is a, c, g, or t
  misc_feature (53730)..(53730): n is a, c, g, or t
  misc_feature (53732)..(53733): n is a, c, g, or t
  misc_feature (53737)..(53737): n is a, c, g, or t
  misc_feature (53748)..(53748): n is a, c, g, or t
  misc_feature (53750)..(53750): n is a, c, g, or t
  misc_feature (53753)..(53753): n is a, c, g, or t
  misc_feature (53760)..(53760): n is a, c, g, or t
  misc_feature (53768)..(53768): n is a, c, g, or t
  misc_feature (53786)..(53786): n is a, c, g, or t
  misc_feature (53789)..(53789): n is a, c, g, or t
  misc_feature (53791)..(53791): n is a, c, g, or t
  misc_feature (53795)..(53796): n is a, c, g, or t
  misc_feature (53803)..(53804): n is a, c, g, or t
  misc_feature (53806)..(53806): n is a, c, g, or t
  misc_feature (53810)..(53810): n is a, c, g, or t
  misc_feature (53813)..(53813): n is a, c, g, or t
  misc_feature (53834)..(53834): n is a, c, g, or t
  misc_feature (53838)..(53838): n is a, c, g, or t
  misc_feature (53840)..(53840): n is a, c, g, or t
  misc_feature (53843)..(53843): n is a, c, g, or t
  misc_feature (53858)..(53861): n is a, c, g, or t
  misc_feature (53865)..(53865): n is a, c, g, or t
  misc_feature (53867)..(53867): n is a, c, g, or t
  misc_feature (53877)..(53877): n is a, c, g, or t
  misc_feature (53885)..(53885): n is a, c, g, or t
  misc_feature (53890)..(53890): n is a, c, g, or t
  misc_feature (53917)..(53918): n is a, c, g, or t
  misc_feature (53925)..(53925): n is a, c, g, or t
  misc_feature (53927)..(53927): n is a, c, g, or t
  misc_feature (53934)..(53934): n is a, c, g, or t
  misc_feature (53939)..(53939): n is a, c, g, or t
  misc_feature (53952)..(53952): n is a, c, g, or t
  misc_feature (53968)..(53968): n is a, c, g, or t
  misc_feature (53974)..(53975): n is a, c, g, or t
  misc_feature (53977)..(53977): n is a, c, g, or t
  misc_feature (53979)..(53979): n is a, c, g, or t
  misc_feature (53981)..(53981): n is a, c, g, or t
  misc_feature (53990)..(53990): n is a, c, g, or t
  misc_feature (54000)..(54000): n is a, c, g, or t
  misc_feature (54005)..(54005): n is a, c, g, or t
  misc_feature (54010)..(54010): n is a, c, g, or t
  misc_feature (54014)..(54014): n is a, c, g, or t
  misc_feature (54026)..(54026): n is a, c, g, or t
  misc_feature (54032)..(54032): n is a, c, g, or t
  misc_feature (54041)..(54043): n is a, c, g, or t
  misc_feature (54048)..(54050): n is a, c, g, or t
  misc_feature (54059)..(54059): n is a, c, g, or t
  misc_feature (54078)..(54078): n is a, c, g, or t
  misc_feature (54468)..(54468): n is a, c, g, or t
  misc_feature (54473)..(54473): n is a, c, g, or t
  misc_feature (54478)..(54478): n is a, c, g, or t
  misc_feature (54482)..(54482): n is a, c, g, or t
  misc_feature (54494)..(54494): n is a, c, g, or t
  misc_feature (54500)..(54500): n is a, c, g, or t
  misc_feature (54509)..(54511): n is a, c, g, or t
  misc_feature (54516)..(54518): n is a, c, g, or t
  misc_feature (54527)..(54527): n is a, c, g, or t
  misc_feature (54546)..(54546): n is a, c, g, or t
  misc_feature (54577)..(54577): n is a, c, g, or t
  misc_feature (54580)..(54580): n is a, c, g, or t
  misc_feature (54586)..(54586): n is a, c, g, or t
  misc_feature (54621)..(54621): n is a, c, g, or t
  misc_feature (54624)..(54624): n is a, c, g, or t
  misc_feature (54626)..(54626): n is a, c, g, or t
  misc_feature (54629)..(54629): n is a, c, g, or t
  misc_feature (54635)..(54635): n is a, c, g, or t
  misc_feature (54651)..(54651): n is a, c, g, or t
  misc_feature (54657)..(54657): n is a, c, g, or t
  misc_feature (54661)..(54661): n is a, c, g, or t
  misc_feature (54666)..(54666): n is a, c, g, or t
  misc_feature (54668)..(54669): n is a, c, g, or t
  misc_feature (54673)..(54673): n is a, c, g, or t
  misc_feature (54684)..(54684): n is a, c, g, or t
  misc_feature (54686)..(54686): n is a, c, g, or t
  misc_feature (54689)..(54689): n is a, c, g, or t
  misc_feature (54696)..(54696): n is a, c, g, or t
  misc_feature (54704)..(54704): n is a, c, g, or t
  misc_feature (54722)..(54722): n is a, c, g, or t
  misc_feature (54725)..(54725): n is a, c, g, or t
  misc_feature (54727)..(54727): n is a, c, g, or t
  misc_feature (54731)..(54732): n is a, c, g, or t
  misc_feature (54739)..(54740): n is a, c, g, or t
  misc_feature (54742)..(54742): n is a, c, g, or t
  misc_feature (54746)..(54746): n is a, c, g, or t
  misc_feature (54749)..(54749): n is a, c, g, or t
  misc_feature (54770)..(54770): n is a, c, g, or t
  misc_feature (54774)..(54774): n is a, c, g, or t
  misc_feature (54776)..(54776): n is a, c, g, or t
  misc_feature (54779)..(54779): n is a, c, g, or t
  misc_feature (54794)..(54797): n is a, c, g, or t
  misc_feature (54801)..(54801): n is a, c, g, or t
  misc_feature (54803)..(54803): n is a, c, g, or t
  misc_feature (54813)..(54813): n is a, c, g, or t
  misc_feature (54821)..(54821): n is a, c, g, or t
  misc_feature (54826)..(54826): n is a, c, g, or t
  misc_feature (54853)..(54854): n is a, c, g, or t
  misc_feature (54861)..(54861): n is a, c, g, or t
  misc_feature (54863)..(54863): n is a, c, g, or t
  misc_feature (54870)..(54870): n is a, c, g, or t
  misc_feature (54875)..(54875): n is a, c, g, or t
  misc_feature (54888)..(54888): n is a, c, g, or t
  misc_feature (54904)..(54904): n is a, c, g, or t
  misc_feature (54910)..(54911): n is a, c, g, or t
  misc_feature (54913)..(54913): n is a, c, g, or t
  misc_feature (54915)..(54915): n is a, c, g, or t
  misc_feature (54917)..(54917): n is a, c, g, or t
  misc_feature (54926)..(54926): n is a, c, g, or t
  misc_feature (54936)..(54936): n is a, c, g, or t
  misc_feature (54941)..(54941): n is a, c, g, or t
  misc_feature (54946)..(54946): n is a, c, g, or t
  misc_feature (54950)..(54950): n is a, c, g, or t
  misc_feature (54962)..(54962): n is a, c, g, or t
  misc_feature (54968)..(54968): n is a, c, g, or t
  misc_feature (54977)..(54979): n is a, c, g, or t
  misc_feature (54984)..(54986): n is a, c, g, or t
  misc_feature (54995)..(54995): n is a, c, g, or t
  misc_feature (55014)..(55014): n is a, c, g, or t
  misc_feature (55404)..(55404): n is a, c, g, or t
  misc_feature (55409)..(55409): n is a, c, g, or t
  misc_feature (55414)..(55414): n is a, c, g, or t
  misc_feature (55418)..(55418): n is a, c, g, or t
  misc_feature (55430)..(55430): n is a, c, g, or t
  misc_feature (55436)..(55436): n is a, c, g, or t
  misc_feature (55445)..(55447): n is a, c, g, or t
  misc_feature (55452)..(55454): n is a, c, g, or t
  misc_feature (55463)..(55463): n is a, c, g, or t
  misc_feature (55482)..(55482): n is a, c, g, or t
  misc_feature (55513)..(55513): n is a, c, g, or t
  misc_feature (55516)..(55516): n is a, c, g, or t
  misc_feature (55522)..(55522): n is a, c, g, or t
  misc_feature (55557)..(55557): n is a, c, g, or t
  misc_feature (55560)..(55560): n is a, c, g, or t
  misc_feature (55562)..(55562): n is a, c, g, or t
  misc_feature (55565)..(55565): n is a, c, g, or t
  misc_feature (55571)..(55571): n is a, c, g, or t
  misc_feature (55587)..(55587): n is a, c, g, or t
  misc_feature (55593)..(55593): n is a, c, g, or t
  misc_feature (55597)..(55597): n is a, c, g, or t
  misc_feature (55602)..(55602): n is a, c, g, or t
  misc_feature (55604)..(55605): n is a, c, g, or t
  misc_feature (55609)..(55609): n is a, c, g, or t
  misc_feature (55620)..(55620): n is a, c, g, or t
  misc_feature (55622)..(55622): n is a, c, g, or t
  misc_feature (55625)..(55625): n is a, c, g, or t
  misc_feature (55632)..(55632): n is a, c, g, or t
  misc_feature (55640)..(55640): n is a, c, g, or t
  misc_feature (55658)..(55658): n is a, c, g, or t
  misc_feature (55661)..(55661): n is a, c, g, or t
  misc_feature (55663)..(55663): n is a, c, g, or t
  misc_feature (55667)..(55668): n is a, c, g, or t
  misc_feature (55675)..(55676): n is a, c, g, or t
  misc_feature (55678)..(55678): n is a, c, g, or t
  misc_feature (55682)..(55682): n is a, c, g, or t
  misc_feature (55685)..(55685): n is a, c, g, or t
  misc_feature (55706)..(55706): n is a, c, g, or t
  misc_feature (55710)..(55710): n is a, c, g, or t
  misc_feature (55712)..(55712): n is a, c, g, or t
  misc_feature (55715)..(55715): n is a, c, g, or t
  misc_feature (55730)..(55733): n is a, c, g, or t
  misc_feature (55737)..(55737): n is a, c, g, or t
  misc_feature (55739)..(55739): n is a, c, g, or t
  misc_feature (55749)..(55749): n is a, c, g, or t
  misc_feature (55757)..(55757): n is a, c, g, or t
  misc_feature (55762)..(55762): n is a, c, g, or t
  misc_feature (55789)..(55790): n is a, c, g, or t
  misc_feature (55797)..(55797): n is a, c, g, or t
  misc_feature (55799)..(55799): n is a, c, g, or t
  misc_feature (55806)..(55806): n is a, c, g, or t
  misc_feature (55811)..(55811): n is a, c, g, or t
  misc_feature (55824)..(55824): n is a, c, g, or t
  misc_feature (55840)..(55840): n is a, c, g, or t
  misc_feature (55846)..(55847): n is a, c, g, or t
  misc_feature (55849)..(55849): n is a, c, g, or t
  misc_feature (55851)..(55851): n is a, c, g, or t
  misc_feature (55853)..(55853): n is a, c, g, or t
  misc_feature (55862)..(55862): n is a, c, g, or t
  misc_feature (55872)..(55872): n is a, c, g, or t
  misc_feature (55877)..(55877): n is a, c, g, or t
  misc_feature (55882)..(55882): n is a, c, g, or t
  misc_feature (55886)..(55886): n is a, c, g, or t
  misc_feature (55898)..(55898): n is a, c, g, or t
  misc_feature (55904)..(55904): n is a, c, g, or t
  misc_feature (55913)..(55915): n is a, c, g, or t
  misc_feature (55920)..(55922): n is a, c, g, or t
  misc_feature (55931)..(55931): n is a, c, g, or t
  misc_feature (55950)..(55950): n is a, c, g, or t
  misc_feature (56340)..(56340): n is a, c, g, or t
  misc_feature (56345)..(56345): n is a, c, g, or t
  misc_feature (56350)..(56350): n is a, c, g, or t
  misc_feature (56354)..(56354): n is a, c, g, or t
  misc_feature (56366)..(56366): n is a, c, g, or t
  misc_feature (56372)..(56372): n is a, c, g, or t
  misc_feature (56381)..(56383): n is a, c, g, or t
  misc_feature (56388)..(56390): n is a, c, g, or t
  misc_feature (56399)..(56399): n is a, c, g, or t
  misc_feature (56418)..(56418): n is a, c, g, or t
  misc_feature (56449)..(56449): n is a, c, g, or t
  misc_feature (56452)..(56452): n is a, c, g, or t
  misc_feature (56458)..(56458): n is a, c, g, or t
  misc_feature (56493)..(56493): n is a, c, g, or t
  misc_feature (56496)..(56496): n is a, c, g, or t
  misc_feature (56498)..(56498): n is a, c, g, or t
  misc_feature (56501)..(56501): n is a, c, g, or t
  misc_feature (56507)..(56507): n is a, c, g, or t
  misc_feature (56523)..(56523): n is a, c, g, or t
  misc_feature (56529)..(56529): n is a, c, g, or t
  misc_feature (56533)..(56533): n is a, c, g, or t
  misc_feature (56538)..(56538): n is a, c, g, or t
  misc_feature (56540)..(56541): n is a, c, g, or t
  misc_feature (56545)..(56545): n is a, c, g, or t
  misc_feature (56556)..(56556): n is a, c, g, or t
  misc_feature (56558)..(56558): n is a, c, g, or t
  misc_feature (56561)..(56561): n is a, c, g, or t
  misc_feature (56568)..(56568): n is a, c, g, or t
  misc_feature (56576)..(56576): n is a, c, g, or t
  misc_feature (56594)..(56594): n is a, c, g, or t
  misc_feature (56597)..(56597): n is a, c, g, or t
  misc_feature (56599)..(56599): n is a, c, g, or t
  misc_feature (56603)..(56604): n is a, c, g, or t
  misc_feature (56611)..(56612): n is a, c, g, or t
  misc_feature (56614)..(56614): n is a, c, g, or t
  misc_feature (56618)..(56618): n is a, c, g, or t
  misc_feature (56621)..(56621): n is a, c, g, or t
  misc_feature (56642)..(56642): n is a, c, g, or t
  misc_feature (56646)..(56646): n is a, c, g, or t
  misc_feature (56648)..(56648): n is a, c, g, or t
  misc_feature (56651)..(56651): n is a, c, g, or t
  misc_feature (56666)..(56669): n is a, c, g, or t
  misc_feature (56673)..(56673): n is a, c, g, or t
  misc_feature (56675)..(56675): n is a, c, g, or t
  misc_feature (56685)..(56685): n is a, c, g, or t
  misc_feature (56693)..(56693): n is a, c, g, or t
  misc_feature (56698)..(56698): n is a, c, g, or t
  misc_feature (56725)..(56726): n is a, c, g, or t
  misc_feature (56733)..(56733): n is a, c, g, or t
  misc_feature (56735)..(56735): n is a, c, g, or t
  misc_feature (56742)..(56742): n is a, c, g, or t
  misc_feature (56747)..(56747): n is a, c, g, or t
  misc_feature (56760)..(56760): n is a, c, g, or t
  misc_feature (56776)..(56776): n is a, c, g, or t
  misc_feature (56782)..(56783): n is a, c, g, or t
  misc_feature (56785)..(56785): n is a, c, g, or t
  misc_feature (56787)..(56787): n is a, c, g, or t
  misc_feature (56789)..(56789): n is a, c, g, or t
  misc_feature (56798)..(56798): n is a, c, g, or t
  misc_feature (56808)..(56808): n is a, c, g, or t
  misc_feature (56813)..(56813): n is a, c, g, or t
  misc_feature (56818)..(56818): n is a, c, g, or t
  misc_feature (56822)..(56822): n is a, c, g, or t
  misc_feature (56834)..(56834): n is a, c, g, or t
  misc_feature (56840)..(56840): n is a, c, g, or t
  misc_feature (56849)..(56851): n is a, c, g, or t
  misc_feature (56856)..(56858): n is a, c, g, or t
  misc_feature (56867)..(56867): n is a, c, g, or t
  misc_feature (56886)..(56886): n is a, c, g, or t
  misc_feature (57474)..(57474): n is a, c, g, or t
  misc_feature (57476)..(57477): n is a, c, g, or t
  misc_feature (57481)..(57481): n is a, c, g, or t
  misc_feature (57492)..(57492): n is a, c, g, or t
  misc_feature (57494)..(57494): n is a, c, g, or t
  misc_feature (57497)..(57497): n is a, c, g, or t
  misc_feature (57504)..(57504): n is a, c, g, or t
  misc_feature (57512)..(57512): n is a, c, g, or t
  misc_feature (57530)..(57530): n is a, c, g, or t
  misc_feature (57533)..(57533): n is a, c, g, or t
  misc_feature (57535)..(57535): n is a, c, g, or t
  misc_feature (57539)..(57540): n is a, c, g, or t
  misc_feature (57547)..(57548): n is a, c, g, or t
  misc_feature (57550)..(57550): n is a, c, g, or t
  misc_feature (57554)..(57554): n is a, c, g, or t
  misc_feature (57557)..(57557): n is a, c, g, or t
  misc_feature (57578)..(57578): n is a, c, g, or t
  misc_feature (57582)..(57582): n is a, c, g, or t
  misc_feature (57584)..(57584): n is a, c, g, or t
  misc_feature (57587)..(57587): n is a, c, g, or t
  misc_feature (57602)..(57605): n is a, c, g, or t
  misc_feature (57609)..(57609): n is a, c, g, or t
  misc_feature (57611)..(57611): n is a, c, g, or t
  misc_feature (57621)..(57621): n is a, c, g, or t
  misc_feature (57629)..(57629): n is a, c, g, or t
  misc_feature (57634)..(57634): n is a, c, g, or t
  misc_feature (57661)..(57662): n is a, c, g, or t
  misc_feature (57669)..(57669): n is a, c, g, or t
  misc_feature (57671)..(57671): n is a, c, g, or t
  misc_feature (57678)..(57678): n is a, c, g, or t
  misc_feature (57683)..(57683): n is a, c, g, or t
  misc_feature (57696)..(57696): n is a, c, g, or t
  misc_feature (57712)..(57712): n is a, c, g, or t
  misc_feature (57718)..(57719): n is a, c, g, or t
  misc_feature (57721)..(57721): n is a, c, g, or t
  misc_feature (57723)..(57723): n is a, c, g, or t
  misc_feature (57725)..(57725): n is a, c, g, or t
  misc_feature (57734)..(57734): n is a, c, g, or t
  misc_feature (57744)..(57744): n is a, c, g, or t
  misc_feature (57749)..(57749): n is a, c, g, or t
  misc_feature (57754)..(57754): n is a, c, g, or t
  misc_feature (57758)..(57758): n is a, c, g, or t
  misc_feature (57770)..(57770): n is a, c, g, or t
  misc_feature (57776)..(57776): n is a, c, g, or t
  misc_feature (57785)..(57787): n is a, c, g, or t
  misc_feature (57792)..(57794): n is a, c, g, or t
  misc_feature (57803)..(57803): n is a, c, g, or t
  misc_feature (57822)..(57822): n is a, c, g, or t
  misc_feature (58212)..(58212): n is a, c, g, or t
  misc_feature (58217)..(58217): n is a, c, g, or t
  misc_feature (58222)..(58222): n is a, c, g, or t
  misc_feature (58226)..(58226): n is a, c, g, or t
  misc_feature (58238)..(58238): n is a, c, g, or t
  misc_feature (58244)..(58244): n is a, c, g, or t
  misc_feature (58253)..(58255): n is a, c, g, or t
  misc_feature (58260)..(58262): n is a, c, g, or t
  misc_feature (58271)..(58271): n is a, c, g, or t
  misc_feature (58290)..(58290): n is a, c, g, or t
  misc_feature (58321)..(58321): n is a, c, g, or t
  misc_feature (58324)..(58324): n is a, c, g, or t
  misc_feature (58330)..(58330): n is a, c, g, or t
  misc_feature (58365)..(58365): n is a, c, g, or t
  misc_feature (58368)..(58368): n is a, c, g, or t
  misc_feature (58370)..(58370): n is a, c, g, or t
  misc_feature (58373)..(58373): n is a, c, g, or t
  misc_feature (58379)..(58379): n is a, c, g, or t
  misc_feature (58395)..(58395): n is a, c, g, or t
  misc_feature (58401)..(58401): n is a, c, g, or t
  misc_feature (58405)..(58405): n is a, c, g, or t
  misc_feature (58410)..(58410): n is a, c, g, or t
  misc_feature (58412)..(58413): n is a, c, g, or t
  misc_feature (58417)..(58417): n is a, c, g, or t
  misc_feature (58428)..(58428): n is a, c, g, or t
  misc_feature (58430)..(58430): n is a, c, g, or t
  misc_feature (58433)..(58433): n is a, c, g, or t
  misc_feature (58440)..(58440): n is a, c, g, or t
  misc_feature (58448)..(58448): n is a, c, g, or t
  misc_feature (58466)..(58466): n is a, c, g, or t
  misc_feature (58469)..(58469): n is a, c, g, or t
  misc_feature (58471)..(58471): n is a, c, g, or t
  misc_feature (58475)..(58476): n is a, c, g, or t
  misc_feature (58483)..(58484): n is a, c, g, or t
  misc_feature (58486)..(58486): n is a, c, g, or t
  misc_feature (58490)..(58490): n is a, c, g, or t
  misc_feature (58493)..(58493): n is a, c, g, or t
  misc_feature (58514)..(58514): n is a, c, g, or t
  misc_feature (58518)..(58518): n is a, c, g, or t
  misc_feature (58520)..(58520): n is a, c, g, or t
  misc_feature (58523)..(58523): n is a, c, g, or t
  misc_feature (58538)..(58541): n is a, c, g, or t
  misc_feature (58545)..(58545): n is a, c, g, or t
  misc_feature (58547)..(58547): n is a, c, g, or t
  misc_feature (58557)..(58557): n is a, c, g, or t
  misc_feature (58565)..(58565): n is a, c, g, or t
  misc_feature (58570)..(58570): n is a, c, g, or t
  misc_feature (58597)..(58598): n is a, c, g, or t
  misc_feature (58605)..(58605): n is a, c, g, or t
  misc_feature (58607)..(58607): n is a, c, g, or t
  misc_feature (58614)..(58614): n is a, c, g, or t
  misc_feature (58619)..(58619): n is a, c, g, or t
  misc_feature (58632)..(58632): n is a, c, g, or t
  misc_feature (58648)..(58648): n is a, c, g, or t
  misc_feature (58654)..(58655): n is a, c, g, or t
  misc_feature (58657)..(58657): n is a, c, g, or t
  misc_feature (58659)..(58659): n is a, c, g, or t
  misc_feature (58661)..(58661): n is a, c, g, or t
  misc_feature (58670)..(58670): n is a, c, g, or t
  misc_feature (58680)..(58680): n is a, c, g, or t
  misc_feature (58685)..(58685): n is a, c, g, or t
  misc_feature (58690)..(58690): n is a, c, g, or t
  misc_feature (58694)..(58694): n is a, c, g, or t
  misc_feature (58706)..(58706): n is a, c, g, or t
  misc_feature (58712)..(58712): n is a, c, g, or t
  misc_feature (58721)..(58723): n is a, c, g, or t
  misc_feature (58728)..(58730): n is a, c, g, or t
  misc_feature (58739)..(58739): n is a, c, g, or t
  misc_feature (58758)..(58758): n is a, c, g, or t
  misc_feature (59148)..(59148): n is a, c, g, or t
  misc_feature (59153)..(59153): n is a, c, g, or t
  misc_feature (59158)..(59158): n is a, c, g, or t
  misc_feature (59162)..(59162): n is a, c, g, or t
  misc_feature (59174)..(59174): n is a, c, g, or t
  misc_feature (59180)..(59180): n is a, c, g, or t
  misc_feature (59189)..(59191): n is a, c, g, or t
  misc_feature (59196)..(59198): n is a, c, g, or t
  misc_feature (59207)..(59207): n is a, c, g, or t
  misc_feature (59226)..(59226): n is a, c, g, or t
  misc_feature (59257)..(59257): n is a, c, g, or t
  misc_feature (59260)..(59260): n is a, c, g, or t
  misc_feature (59266)..(59266): n is a, c, g, or t
  misc_feature (59301)..(59301): n is a, c, g, or t
  misc_feature (59304)..(59304): n is a, c, g, or t
  misc_feature (59306)..(59306): n is a, c, g, or t
  misc_feature (59309)..(59309): n is a, c, g, or t
  misc_feature (59315)..(59315): n is a, c, g, or t
  misc_feature (59331)..(59331): n is a, c, g, or t
  misc_feature (59337)..(59337): n is a, c, g, or t
  misc_feature (59341)..(59341): n is a, c, g, or t
  misc_feature (59346)..(59346): n is a, c, g, or t
  misc_feature (59348)..(59349): n is a, c, g, or t
  misc_feature (59353)..(59353): n is a, c, g, or t
  misc_feature (59364)..(59364): n is a, c, g, or t
  misc_feature (59366)..(59366): n is a, c, g, or t
  misc_feature (59369)..(59369): n is a, c, g, or t
  misc_feature (59376)..(59376): n is a, c, g, or t
  misc_feature (59384)..(59384): n is a, c, g, or t
  misc_feature (59402)..(59402): n is a, c, g, or t
  misc_feature (59405)..(59405): n is a, c, g, or t
  misc_feature (59407)..(59407): n is a, c, g, or t
  misc_feature (59411)..(59412): n is a, c, g, or t
  misc_feature (59419)..(59420): n is a, c, g, or t
  misc_feature (59422)..(59422): n is a, c, g, or t
  misc_feature (59426)..(59426): n is a, c, g, or t
  misc_feature (59429)..(59429): n is a, c, g, or t
  misc_feature (59450)..(59450): n is a, c, g, or t
  misc_feature (59454)..(59454): n is a, c, g, or t
  misc_feature (59456)..(59456): n is a, c, g, or t
  misc_feature (59459)..(59459): n is a, c, g, or t
  misc_feature (59474)..(59477): n is a, c, g, or t
  misc_feature (59481)..(59481): n is a, c, g, or t
  misc_feature (59483)..(59483): n is a, c, g, or t
  misc_feature (59493)..(59493): n is a, c, g, or t
  misc_feature (59501)..(59501): n is a, c, g, or t
  misc_feature (59506)..(59506): n is a, c, g, or t
  misc_feature (59533)..(59534): n is a, c, g, or t
  misc_feature (59541)..(59541): n is a, c, g, or t
  misc_feature (59543)..(59543): n is a, c, g, or t
  misc_feature (59550)..(59550): n is a, c, g, or t
  misc_feature (59555)..(59555): n is a, c, g, or t
  misc_feature (59568)..(59568): n is a, c, g, or t
  misc_feature (59584)..(59584): n is a, c, g, or t
  misc_feature (59590)..(59591): n is a, c, g, or t
  misc_feature (59593)..(59593): n is a, c, g, or t
  misc_feature (59595)..(59595): n is a, c, g, or t
  misc_feature (59597)..(59597): n is a, c, g, or t
  misc_feature (59606)..(59606): n is a, c, g, or t
  misc_feature (59616)..(59616): n is a, c, g, or t
  misc_feature (59621)..(59621): n is a, c, g, or t
  misc_feature (59626)..(59626): n is a, c, g, or t
  misc_feature (59630)..(59630): n is a, c, g, or t
  misc_feature (59642)..(59642): n is a, c, g, or t
  misc_feature (59648)..(59648): n is a, c, g, or t
  misc_feature (59657)..(59659): n is a, c, g, or t
  misc_feature (59664)..(59666): n is a, c, g, or t
  misc_feature (59675)..(59675): n is a, c, g, or t
  misc_feature (59694)..(59694): n is a, c, g, or t
  misc_feature (60081)..(60081): n is a, c, g, or t
  misc_feature (60086)..(60086): n is a, c, g, or t
  misc_feature (60091)..(60091): n is a, c, g, or t
  misc_feature (60095)..(60095): n is a, c, g, or t
  misc_feature (60107)..(60107): n is a, c, g, or t
  misc_feature (60113)..(60113): n is a, c, g, or t
  misc_feature (60122)..(60124): n is a, c, g, or t
  misc_feature (60129)..(60131): n is a, c, g, or t
  misc_feature (60140)..(60140): n is a, c, g, or t
  misc_feature (60159)..(60159): n is a, c, g, or t
  misc_feature (60190)..(60190): n is a, c, g, or t
  misc_feature (60193)..(60193): n is a, c, g, or t
  misc_feature (60199)..(60199): n is a, c, g, or t
  misc_feature (60234)..(60234): n is a, c, g, or t
  misc_feature (60237)..(60237): n is a, c, g, or t
  misc_feature (60239)..(60239): n is a, c, g, or t
  misc_feature (60242)..(60242): n is a, c, g, or t
  misc_feature (60248)..(60248): n is a, c, g, or t
  misc_feature (60264)..(60264): n is a, c, g, or t
  misc_feature (60270)..(60270): n is a, c, g, or t
  misc_feature (60274)..(60274): n is a, c, g, or t
  misc_feature (60279)..(60279): n is a, c, g, or t
  misc_feature (60281)..(60282): n is a, c, g, or t
  misc_feature (60286)..(60286): n is a, c, g, or t
  misc_feature (60297)..(60297): n is a, c, g, or t
  misc_feature (60299)..(60299): n is a, c, g, or t
  misc_feature (60302)..(60302): n is a, c, g, or t
  misc_feature (60309)..(60309): n is a, c, g, or t
  misc_feature (60317)..(60317): n is a, c, g, or t
  misc_feature (60335)..(60335): n is a, c, g, or t
  misc_feature (60338)..(60338): n is a, c, g, or t
  misc_feature (60340)..(60340): n is a, c, g, or t
  misc_feature (60344)..(60345): n is a, c, g, or t
  misc_feature (60352)..(60353): n is a, c, g, or t
  misc_feature (60355)..(60355): n is a, c, g, or t
  misc_feature (60359)..(60359): n is a, c, g, or t
  misc_feature (60362)..(60362): n is a, c, g, or t
  misc_feature (60383)..(60383): n is a, c, g, or t
  misc_feature (60387)..(60387): n is a, c, g, or t
  misc_feature (60389)..(60389): n is a, c, g, or t
  misc_feature (60392)..(60392): n is a, c, g, or t
  misc_feature (60407)..(60410): n is a, c, g, or t
  misc_feature (60414)..(60414): n is a, c, g, or t
  misc_feature (60416)..(60416): n is a, c, g, or t
  misc_feature (60426)..(60426): n is a, c, g, or t
  misc_feature (60434)..(60434): n is a, c, g, or t
  misc_feature (60439)..(60439): n is a, c, g, or t
  misc_feature (60466)..(60467): n is a, c, g, or t
  misc_feature (60474)..(60474): n is a, c, g, or t
  misc_feature (60476)..(60476): n is a, c, g, or t
  misc_feature (60483)..(60483): n is a, c, g, or t
  misc_feature (60488)..(60488): n is a, c, g, or t
  misc_feature (60501)..(60501): n is a, c, g, or t
  misc_feature (60517)..(60517): n is a, c, g, or t
  misc_feature (60523)..(60524): n is a, c, g, or t
  misc_feature (60526)..(60526): n is a, c, g, or t
  misc_feature (60528)..(60528): n is a, c, g, or t
  misc_feature (60530)..(60530): n is a, c, g, or t
  misc_feature (60539)..(60539): n is a, c, g, or t
  misc_feature (60549)..(60549): n is a, c, g, or t
  misc_feature (60554)..(60554): n is a, c, g, or t
  misc_feature (60559)..(60559): n is a, c, g, or t
  misc_feature (60563)..(60563): n is a, c, g, or t
  misc_feature (60575)..(60575): n is a, c, g, or t
  misc_feature (60581)..(60581): n is a, c, g, or t
  misc_feature (60590)..(60592): n is a, c, g, or t
  misc_feature (60597)..(60599): n is a, c, g, or t
  misc_feature (60608)..(60608): n is a, c, g, or t
  misc_feature (60627)..(60627): n is a, c, g, or t
  misc_feature (61017)..(61017): n is a, c, g, or t
  misc_feature (61022)..(61022): n is a, c, g, or t
  misc_feature (61027)..(61027): n is a, c, g, or t
  misc_feature (61031)..(61031): n is a, c, g, or t
  misc_feature (61043)..(61043): n is a, c, g, or t
  misc_feature (61049)..(61049): n is a, c, g, or t
  misc_feature (61058)..(61060): n is a, c, g, or t
  misc_feature (61065)..(61067): n is a, c, g, or t
  misc_feature (61076)..(61076): n is a, c, g, or t
  misc_feature (61095)..(61095): n is a, c, g, or t
  misc_feature (61126)..(61126): n is a, c, g, or t
  misc_feature (61129)..(61129): n is a, c, g, or t
  misc_feature (61135)..(61135): n is a, c, g, or t
  misc_feature (61170)..(61170): n is a, c, g, or t
  misc_feature (61173)..(61173): n is a, c, g, or t
  misc_feature (61175)..(61175): n is a, c, g, or t
  misc_feature (61178)..(61178): n is a, c, g, or t
  misc_feature (61184)..(61184): n is a, c, g, or t
  misc_feature (61200)..(61200): n is a, c, g, or t
  misc_feature (61206)..(61206): n is a, c, g, or t
  misc_feature (61210)..(61210): n is a, c, g, or t
  misc_feature (62619)..(62619): n is a, c, g, or t
  misc_feature (62621)..(62622): n is a, c, g, or t
  misc_feature (62626)..(62626): n is a, c, g, or t
  misc_feature (62637)..(62637): n is a, c, g, or t
  misc_feature (62639)..(62639): n is a, c, g, or t
  misc_feature (62642)..(62642): n is a, c, g, or t
  misc_feature (62649)..(62649): n is a, c, g, or t
  misc_feature (62657)..(62657): n is a, c, g, or t
  misc_feature (62675)..(62675): n is a, c, g, or t
  misc_feature (62678)..(62678): n is a, c, g, or t
  misc_feature (62680)..(62680): n is a, c, g, or t
  misc_feature (62684)..(62685): n is a, c, g, or t
  misc_feature (62692)..(62693): n is a, c, g, or t
  misc_feature (62695)..(62695): n is a, c, g, or t
  misc_feature (62699)..(62699): n is a, c, g, or t
  misc_feature (62702)..(62702): n is a, c, g, or t
  misc_feature (62723)..(62723): n is a, c, g, or t
aagcgttgcacaattcccccaacctccatacatacggcagctcttctagacacaggttttcccaggtcaaatgcggggaccccagccatatctcccaccctgagaaattttggagtttcagggagctcagaagctctgcagaggccaccctctctgaggggattcttcttagacctccatccagaggcaaatgttgacctgtccatgctgaaaccctcaggccttcctgggtcatcttctcccacccgctccttgatgacagggagcaggagcactaaagccacaccagaaatggattcaggactgacaggagccaccttgtcacctaagacatctacaggtgcaatcgtggtgacagaacatactctgccctttacttccccagataagaccttggccagtcctacatcttcggttgtgggaagaaccacccagtctttgggggtgatgtcctctgctctccctgagtcaacctctagaggaatgacacactccgagcaaagaaccagcccatcgctgagtccccaggtcaatggaactccctctaggaactaccctgctacaagcatggtttcaggattgagttccccaaggaccaggaccagttccacagaaggaaattttaccaaagaagcatctacatacacactcactgtagagaccacaagtggcccagtcactgagaagtacacagtccccactgagacctcaacaactgaaggtgacagcacagagaccccctgggacacaagatatattcctgtaaaaatcacatctccaatgaaaacatttgcagattcaactgcatccaaggaaaatgccccagtgtctatgactccagctgagaccacagttactgactcacatactccaggaaggacaaacccatcatttgggacactttattcttccttccttgacctatcacctaaagggaccccaaattccagaggtgaaacaagcctggaactgattctatcaaccactggatatcccttctcctctcctgaacctggctctgcaggacacagcagaataagtaccagtgcgcctttgtcatcatctgcttcagttctcgataataaaatatcagagaccagcatattctcaggccagagtctcacctcccctctgtctcctggggtgcccgaggccagagccagcacaatgcccaactcagctatccctttttccatgacactaagcaatgcagaaacaagtgccgaaagggtcagaagcacaatttcctctctggggactccatcaatatccacaaagcagacagcagagactatccttaccttccatgccttcgctgagaccatggatatacccagcacccacatagccaagactttggcttcagaatggttgggaagtccaggtacccttggtggcaccagcacttcagcgctgacaaccacatctccatctaccactttagtctcagaggagaccaacacccatcactccacgagtggaaaggaaacagaaggaactttgaatacatctatgactccacttgagacctctgctcctggagaagagtccgaaatgactgccaccttggtccccactctaggttttacaactcttgacagcaagatcagaagtccatctcaggtctcttcatcccacccaacaagagagctcagaaccacaggcagcacctctgggaggcagagttccagcacagctgcccacgggagctctgacatcctgagggcaaccacttccagcacctcaaaagcatcatcatggaccagtgaaagcacagctcagcaatttagtgaaccccagcacacacagtgggtggagacaagtcctagcatgaaaacagagagacccccagcatcaaccagtgtggcagcccctatcaccacttctgttccctcagtggtctctggcttcaccaccctgaagaccagctccacaaaagggatttggcttgaagaaacatctgcagacacactcatcggagaatccacagctggcccaaccacccatcagtttgctgttcccactgggatttcaatgacaggaggcagcagcaccaggggaagccagggcacaacccacctactcaccagagccacagcatcatctgagacatccgcagatttgactctggccacgaacggtgtcccagtctccgtgtctccagcagtgagcaagacggctgctggctcaagtcctccaggagggacaaagccatcatatacaatggtttcttctgtcatccctgagacatcatctctacagtcctcagctttcagggaaggaaccagcctgggactgactccattaaacactagacatcccttctcttcccctgaaccagactctgcaggacacaccaagataagcaccagcattcctctgttgtcatctgcttcagttcttgaggataaagtgtcagcgaccagcacattctcacaccacaaagccacctcatctattaccacagggactcctgaaatctcaacaaagacaaagcccagctcagccgttctttcctccatgaccctaagcaatgcagcaacaagtcctgaaagagtcagaaatgcaacttcccctctgactcatccatctccatcaggggaagagacagcagggagtgtcctcactctcagcacctctgctgagactacagactcacctaacatccacccaactgggacactgacttcagaatcgtcagagagtcctagcactctcagcctcccaagtgtctctggagtcaaaaccacattttcttcatctactccttccactcatctatttactagtggagaagaaacagaggaaacttcgaatccatctgtgtctcaacctgagacttctgtttccagagtaaggaccaccttggccagcacctctgtccctaccccagtattccccaccatggacacctggcctacacgttcagctcagttctcttcatcccacctagtgagtgagctcagagctacgagcagtacctcagttacaaactcaactggttcagctcttcctaaaatatctcacctcactgggacggcaacaatgtcacagaccaatagagacacgtttaatgactctgctgcaccccaaagcacaacttggccagagactagtcccagattcaagacagggttaccttcagcaacaaccactgtttcaacctctgccacttctctctctgctactgtaatggtctctaaattcacttctccagcaactagttccatggaagcaacttctatcagggaaccatcaacaaccatcctcacaacagagaccacgaatggcccaggctctatggctgtggcttctaccaacatcccaattggaaagggctacattactgaaggaagattggacacaagccatctgcccattggaaccacagcttcctctgagacatctatggattttaccatggccaaagaaagtgtctcaatgtcagtatctccatctcagtccatggatgctgctggctcaagcactccaggaaggacaagccaattcgttgacacattttctgatgatgtctatcatttaacatccagagaaattacaatacctagagatggaacaagctcagctctgactccacaaatgactgcaactcaccctccatctcctgatcctggctctgctagaagcacctggcttggcatcttgtcctcatctccttcttctcctactcccaaagtcacaatgagctccacattttcaactcagagagtcaccacaagcatgataatggacacagttgaaactagtcggtggaacatgcccaacttaccttccacgacttccctgacaccaagtaatattccaacaagtggtgccataggaaaaagcaccctggttcccttggacactccatctccagccacatcattggaggcatcagaagggggacttccaaccctcagcacctaccctgaatcaacaaacacacccagcatccacctcggagcacacgctagttcagaaagtccaagcaccatcaaacttaccatggcttcagtagtaaaacctggctcttacacacctctcaccttcccctcaatagagacccacattcatgtatcaacagccagaatggcttactcttctgggtcttcacctgagatgacagctcctggagagactaacactggtagtacctgggaccccaccacctacatcaccactacggatcctaaggatacaagttcagctcaggtctctacaccccactcagtgaggacactcagaaccacagaaaaccatccaaagacagagtccgccaccccagctgcttactctggaagtcctaaaatctcaagttcacccaatctcaccagtccggccacaaaagcatggaccatcacagacacaactgaacactccactcaattacattacacaaaattggcagaaaaatcatctggatttgagacacagtcagctccaggacctgtctctgtagtaatccctacctcccctaccattggaagcagcacattggaactaacttctgatgtcccaggggaacccctggtccttgctcccagtgagcagaccacaatcactctccccatggcaacatggctgagtaccagtttgacagaggaaatggcttcaacagaccttgatatttcaagtccaagttcacccatgagtacatttgctatttttccacctatgtccacaccttctcatgaactttcaaagtcagaggcagataccagtgccattagaaatacagattcaacaacgttggatcagcacctaggaatcaggagtttgggcagaactggggacttaacaactgttcctatcaccccactgacaaccacgtggaccagtgtgattgaacactcaacacaagcacaggacaccctttctgcaacgatgagtcctactcacgtgacacagtcactcaaagatcaaacatctataccagcctcagcatccccttcccatcttactgaagtctaccctgagctcgggacacaagggagaagctcctctgaggcaaccactttttggaaaccatctacagacacactgtccagagagattgagactggcccaacaaacattcaatccactccacccatggacaacacaacaacagggagcagtagtagtggagtcaccctgggcatagcccaccttcccataggaacatcctccccagctgagacatccacaaacatggcactggaaagaagaagttctacagccactgtctctatggctgggacaatgggactccttgttactagtgctccaggaagaagcatcagccagtcattaggaagagtttcctctgtcctttctgagtcaactactgaaggagtcacagattctagtaagggaagcagcccaaggctgaacacacagggaaatacagctctctcctcctctcttgaacccagctatgctgaaggaagccagatgagcacaagcatccctctaacctcatctcctacaactcctgatgtggaattcatagggggcagcacattttggaccaaggaggtcaccacagttatgacctcagacatctccaagtcttcagcaaggacagagtccagctcagctacccttatgtccacagctttgggaagcactgaaaatacaggaaaagaaaaactcagaactgcctctatggatcttccatctccaactccatcaatggaggtgacaccatggatttctctcactctcagtaatgcccccaataccacagattcacttgacctcagccatggggtgcacaccagctctgcagggactttggccactgacaggtcattgaatactggtgtcactagagcctccagattggaaaacggctctgatacctcttctaagtccctgtctatgggaaacagcactcacacttccatgactgacacagagaagagtgaagtgtcttcttcaatccatccccgacctgagacctcagctcctggagcagagaccactttgacttccactcctggaaacagggccataagcttaacattgcctttttcatccattccagtggaagaagtcatttctacaggcataacctcaggaccagacatcaactcagcacccatgacacattctcccatcaccccaccaacaattgtatggaccagtacaggcacaattgaacagtccactcaaccactacatgcagtttcttcagaaaaagtttctgtgcagacacagtcaactccatatgtcaactctgtggcagtgtctgcttcccctacccatgagaattcagtctcttctggaagcagcacatcctctccatattcctcagcctcacttgaatccttggattccacaatcagtaggaggaatgcaatcacttcctggctatgggacctcactacatctctccccactacaacttggccaagtactagtttatctgaggcactgtcctcaggccattctggggtttcaaacccaagttcaactacgactgaatttccactcttttcagctgcatccacatctgctgctaagcaaagaaatccagaaacagagacccatggtccccagaatacagccgcgagtactttgaacactgatgcatcctcggtcacaggtctttctgagactcctgtgggggcaagtatcagctctgaagtccctcttccaatggccataacttctagatcagatgtttctggccttacatctgagagtactgctaacccgagtttaggcacagcctcttcagcagggaccaaattaactaggacaatatccctgcccacttcagagtctttggtttcctttagaatgaacaaggatccatggacagtgtcaatccctttggggtcccatccaactactaatacagaaacaagcatcccagtaaacagcgcaggtccacctggcttgtccacagtagcatcagatgtaattgacacaccttcagatggggctgagagtattcccactgtctccttttccccctcccctgatactgaagtgacaactatctcacatttcccagaaaagacaactcattcatttagaaccatttcatctctcactcatgagttgacttcaagagtgacacctattcctggggattggatgagttcagctatgtctacaaagcccacaggagccagtccctccattacactgggagagagaaggacaatcacctctgctgctccaaccacttcccccatagttctcactgctagtttcacagagaccagcacagtttcactggataatgaaactacagtaaaaacctcagatatccttgacgcacggaaaacaaatgagctcccctcagatagcagttcttcttctgatctgatcaacacctccatagcttcttcaactatggatgtcactaaaacagcctccatcagtcccactagcatctcaggaatgacagcaagttcctccccatctctcttctcttcagatagaccccaggttcccacatctacaacagagacaaatacagccacctctccatctgtttccagtaacacctattctcttgatgggggctccaatgtgggtggcactccatccactttaccaccctttacaatcacccaccctgtcgagacaagctcggccctattagcctggtctagaccagtaagaactttcagcaccatggtcagcactgacactgcctccggagaaaatcctacctctagcaattctgtggtgacttctgttccagcaccaggtacatgggccagtgtaggcagtactactgacttacctgccatgggctttctcaagacaagtcctgcaggagaggcacactcacttctagcatcaactattgaaccagccactgccttcactccccatctctcagcagcagtggtcactggatccagtgctacatcagaagccagtcttctcactacgagtgaaagcaaagccattcattcttcaccacagaccccaactacacccacctctggagcaaactgggaaacttcagctactcctgagagccttttggtagtcactgagacttcagacacaacacttacctcaaagattttggtcacagataccatcttgttttcaactgtgtccacgccaccttctaaatttccaagtacggggactctgtctggagcttccttccctactttactcccggacactccagccatccctctcactgccactgagccaacaagttcattagctacatcctttgattccaccccactggtgactatagcttcggatagtcttggcacagtcccagagactaccctgaccatgtcagagacctcaaatggtgatgcactggttcttaagacagtaagtaacccagataggagcatccctggaatcactatccaaggagtaacagaaagtccactccatccttcttccacttccccctctaagattgttgctccacggaatacaacctatgaaggttcgatcacagtggcactttctactttgcctgcgggaactactggttcccttgtattcagtcagagttctgaaaactcagagacaacggctttggtagactcatcagctgggcttgagagggcatctgtgatgccactaaccacaggaagccagggtatggctagctctggaggaatcagaagtgggtccactcactcaactggaaccaaaacattttcttctctccctctgaccatgaacccaggtgaggttacagccatgtctgaaatcaccacgaacagactgacagctactcaatcaacagcacccaaagggatacctgtgaagcccaccagtgctgagtcaggcctcctaacacctgtctctgcctcctcaagcccatcaaaggcctttgcctcactgactacagctcccccatcaacttgggggatcccacagtctaccttgacatttgagttttctgaggtcccaagtttggatactaagtccgcttctttaccaactcctggacagtccctgaacaccattccagactcagatgcaagcacagcatcttcctcactgtccaagtctccagaaaaaaacccaagggcaaggatgatgacttccacaaaggccataagtgcaagctcatttcaatcaacaggttttactgaaacccctgagggatctgcctccccttctatggcagggcatgaacccagagtccccacttcaggaacaggggaccctagatatgcctcagagagcatgtcttatccagacccaagcaaggcatcatcagctatgacatcgacctctcttgcatcaaaactcacaactctcttcagcacaggtcaagcagcaaggtctggttctagttcctctcccataagcctatccactgagaaagaaacaagcttcctttcccccactgcatccacctccagaaagacttcactatttcttgggccttccatggcaaggcagcccaacatattggtgcatcttcagacttcagctctgacactttctccaacatccactctaaatatgtcccaggaggagcctcctgagttaacctcaagccagaccattgcagaagaagagggaacaacagctgaaacacagacgttaaccttcacaccatctgagaccccaacatccttgttacctgtctcttctcccacagaacccacagccagaagaaagagttctccagaaacatgggcaagctctatttcagttcctgccaagacctccttggttgaaacaactgatggaacgctagtgaccaccataaagatgtcaagccaggcagcacaaggaaattccacgtggcctgccccagcagaggagacggggaccagtccagcaggcacatccccaggaagcccagaagtgtctaccactctcaaaatcatgagctccaaggaacccagcatcagcccagagatcaggtccactgtgcgaaattctccttggaagactccagaaacaactgttcccatggagaccacagtggaaccagtcacccttcagtccacagccctaggaagtggcagcaccagcatctctcacctgcccacaggaaccacatcaccaaccaagtcaccaacagaaaatatgttggctacagaaagggtctccctctccccatccccacctgaggcttggaccaacctttattctggaactccaggagggaccaggcagtcactggccacaatgtcctctgtctccctagagtcaccaactgctagaagcatcacagggactggtcagcaaagcagtccagaactggtttcaaagacaactggaatggaattctctatgtggcatggctctactggagggaccacaggggacacacatgtctctctgagcacatcttccaatatccttgaagaccctgtaaccagcccaaactctgtgagctcattgacagataaatccaaacataaaaccgagacatgggtaagcaccacagccattccctccactgtcctgaataataagataatggcagctgaacaacagacaagtcgatctgtggatgaggcttattcatcaactagttcttggtcagatcagacatctgggagtgacatcacccttggtgcatctcctgatgtcacaaacacattatacatcacctccacagcacaaaccacctcactagtgtctctgccctctggagaccaaggcattacaagcctcaccaatccctcaggaggaaaaacaagctctgcgtcatctgtcacatctccttcaatagggcttgagactctgagggccaatgtaagtgcagtgaaaagtgacattgcccctactgctgggcatctatctcagacttcatctcctgcggaagtgagcatcctggacgtaaccacagctcctactccaggtatctccaccaccatcaccaccatgggaaccaactcaatctcaactaccacacccaacccagaagtgggtatgagtaccatggacagcaccccggccacagagaggcgcacaacttctacagaacacccttccacctggtcttccacagctgcatcagattcctggactgtcacagacatgacttcaaacttgaaagttgcaagatctcctggaacaatttccacaatgcatacaacttcattcttagcctcaagcactgaattagactccatgtctactccccatggccgtataactgtcattggaaccagcctggtcactccatcctctgatgcttcagctgtaaagacagagaccagtacaagtgaaagaacattgagtccttcagacacaactgcatctactcccatctcaactttttctcgtgtccagaggatgagcatctcagttcctgacattttaagtacaagttggactcccagtagtacagaagcagaagatgtgcctgtttcaatggtttctacagatcatgctagtacaaagactgacccaaatacgcccctgtccacttttctgtttgattctctgtccactcttgactgggacactgggagatctctgtcatcagccacagccactacctcagctcctcagggggccacaactccccaggaactcactttggaaaccatgatcagcccagctacctcacagttgcccttctctatagggcacattacaagtgcagtcacaccagctgcaatggcaaggagctctggagttactttttcaagaccagatcccacaagcaaaaaggcagagcagacttccactcagcttcccaccaccacttctgcacatccagggcaggtgcccagatcagcagcaacaactctggatgtgatcccacacacagcaaaaactccagatgcaacttttcagagacaagggcagacagctcttacaacagaggcaagagctacatctgactcctggaatgagaaagaaaaatcaaccccaagtgcaccttggatcactgagatgatgaattctgtctcagaagataccatcaaggaggttaccagctcctccagtgtattaaaggaccctgaatacgctggacataaacttggaatctgggacgacttcatccccaagtttggaaaagcagcccatatgagagagttgccccttctgagtccaccacaggacaaagaggcaattcacccttctacaaacacagtagagaccacaggctgggtcacaagttccgaacatgcttctcattccactatcccagcccactcagcgtcatccaaactcacatctccagtggttacaacctccaccagggaacaagcaatagtttctatgtcaacaaccacatggccagagtctacaagggctagaacagagcctaattccttcttgactattgaactgagggacgtcagcccttacatggacaccagctcaaccacacaaacaagtattatctcttccccaggttccactgcgatcaccaaggggcctagaacagaaattacctcctctaagagaatatccagctcattccttgcccagtctatgaggtcgtcagacagcccctcagaagccatcaccaggctgtctaactttcctgccatgacagaatctggaggaatgatccttgctatgcaaacaagtccacctggcgctacatcactaagtgcacctactttggatacatcagccacagcctcctggacagggactccactggctacgactcagagatttacatactcagagaagaccactctctttagcaaaggtcctgaggatacatcacagccaagccctccctctgtggaagaaaccagctcttcctcttccctggtacctatccatgctacaacctcgccttccaatattttgttgacatcacaagggcacagtccctcctctactccacctgtgacctcagttttcttgtctgagacctctggcctggggaagaccacagacatgtcgaggataagcttggaacctggcacaagtttacctcccaatttgagcagtacagcaggtgaggcgttatccacttatgaagcctccagagatacaaaggcaattcatcattctgcagacacagcagtgacgaatatggaggcaaccagttctgaatattctcctatcccaggccatacaaagccatccaaagccacatctccattggttacctcccacatcatgggggacatcacttcttccacatcagtatttggctcctccgagaccacagagattgagacagtgtcctctgtgaaccagggacttcaggagagaagcacatcccaggtggccagctctgctacagagacaagcactgtcattacccatgtgtctagtggtgatgctactactcatgtcaccaagacacaagccactttctctagcggaacatccatctcaagccctcatcagtttataacttctaccaacacatttacagatgtgagcaccaacccctccacctctctgataatgacagaatcttcaggagtgaccatcaccacccaaacaggtcctactggagctgcaacacagggtccatatctcttggacacatcaaccatgccttacttgacagagactccattagctgtgactccagattttatgcaatcagagaagaccactctcataagcaaaggtcccaaggatgtgacctggacaagccctccctctgtggcagaaaccagctatccctcttccctgacacctttcttggtcacaaccatacctcctgccacttccacgttacaagggcaacatacatcctctcctgtttctgcgacttcagttcttacctctggactggtgaagaccacagatatgttgaacacaagcatggaacctgtgaccaattcacctcaaaatttgaacaatccatcaaatgagatactggccactttggcagccaccacagatatagagactattcatccttccataaacaaagcagtgaccaatatggggactgccagttcagcacatgtactgcattccactctcccagtcagctcagaaccatctacagccacatctccaatggttcctgcctccagcatgggggacgctcttgcttctatatcaatacctggttctgagaccacagacattgagggagagccaacatcctccctgactgctggacgaaaagagaacagcaccctccaggagatgaactcaactacagagtcaaacatcatcctctccaatgtgtctgtgggggctattactgaagccacaaaaatggaagtcccctcttttgatgcaacattcataccaactcctgctcagtcaacaaagttcccagatattttctcagtagccagcagtagactttcaaactctcctcccatgacaatatctacccacatgaccaccacccagacagggtcttctggagctacatcaaagattccacttgccttagacacatcaaccttggaaacctcagcagggactccatcagtggtgactgaggggtttgcccactcaaaaataaccactgcaatgaacaatgatgtcaaggacgtgtcacagacaaaccctccctttcaggatgaagccagctctccctcttctcaagcacctgtccttgtcacaaccttaccttcttctgttgctttcacaccgcaatggcacagtacctcctctcctgtttctatgtcctcagttcttacttcttcactggtaaagaccgcaggcaaggtggatacaagcttagaaacagtgaccagttcacctcaaagtatgagcaacactttggatgacatatcggtcacttcagcagccaccacagatatagagacaacgcatccttccataaacacagtagttaccaatgtggggaccaccggttcagcatttgaatcacattctactgtctcagcttacccagagccatctaaagtcacatctccaaatgttaccacctccaccatggaagacaccacaatttcccgatcaatacctaaatcctctaagactacaagaactgagactgagacaacttcctccctgactcctaaactgagggagaccagcatctcccaggagatcacctcgtccacagagacaagcactgttccttacaaagagctcactggtgccactaccgaggtatccaggacagatgtcacttcctctagcagtacatccttccctggccctgatcagtccacagtgtcactagacatctccacagaaaccaacaccaggctgtctacctccccaataatgacagaatctgcagaaataaccatcaccacccaaacaggtcctcatggggctacatcacaggatacttttaccatggacccatcaaatacaaccccccaggcagggatccactcagctatgactcatggattttcacaattggatgtgaccactcttatgagcagaattccacaggatgtatcatggacaagtcctccctctgtggataaaaccagctccccctcttcctttctgtcctcacctgcaatgaccacaccttccctgatttcttctaccttaccagaggataagctctcctctcctatgacttcacttctcacctctggcctagtgaagattacagacatattacgtacacgcttggaacctgtgaccagctcacttccaaatttcagcagcacctcagataagatactggccacttctaaagacagtaaagacacaaaggaaatttttccttctataaacacagaagagaccaatgtgaaagccaacaactctggacatgaatcccattcccctgcactggctgactcagagacacccaaagccacaactcaaatggttatcaccaccactgtgggagatccagctccttccacatcaatgccagtgcatggttcctctgagactacaaacattaagagagagccaacatatttcttgactcctagactgagagagaccagtacctctcaggagtccagctttcccacggacacaagttttctactttccaaagtccccactggtactattactgaggtctccagtacaggggtcaactcttctagcaaaatttccaccccagaccatgataagtccacagtgccacctgacaccttcacaggagagatccccagggtcttcacctcctctattaagacaaaatctgcagaaatgacgatcaccacccaagcaagtcctcctgagtctgcatcgcacagtacccttcccttggacacatcaaccacactttcccagggagggactcattcaactgtgactcagggattcccatactcagaggtgaccactctcatgggcatgggtcctgggaatgtgtcatggatgacaactccccctgtggaagaaaccagctctgtgtcttccctgatgtcttcacctgccatgacatccccttctcctgtttcctccacatcaccacagagcatcccctcctctcctcttcctgtgactgcacttcctacttctgttctggtgacaaccacagatgtgttgggcacaacaagcccagagtctgtaaccagttcacctccaaatttgagcagcatcactcatgagagaccggccacttacaaagacactgcacacacagaagccgccatgcatcattccacaaacaccgcagtgaccaatgtagggacttccgggtctggacataaatcacaatcctctgtcctagctgactcagagacatcgaaagccacacctctgatgagtaccacctccaccctgggggacacaagtgtttccacatcaactcctaatatctctcagactaaccaaattcaaacagagccaacagcatccctgagccctagactgagggagagcagcacgtctgagaagaccagctcaacaacagagacaaatactgccttttcttatgtgcccacaggtgctattactcaggcctccagaacagaaatctcctctagcagaacatccatctcagaccttgatcggcccacaatagcacccgacatctccacaggaatgatcaccaggctcttcacctcccccatcatgacaaaatctgcagaaatgaccgtcaccactcaaacaactactcctggggctacatcacagggtatccttccttgggacacatcaaccacacttttccagggagggactcattcaaccgtgtctcagggattcccacactcagagataaccactcttcggagcagaacccctggagatgtgtcatggatgacaactccccctgtggaagaaaccagctctgggttttccctgatgtcaccttccatgacatccccttctcctgtttcctccacatcaccagagagcatcccctcctctcctctccctgtgactgcacttcttacttctgttctggtgacaaccaccaatgtattgggcacaacaagcccagagaccgtaacgagttcacctccaaatttaagcagccccacacaggagagactgaccacttacaaagacactgcgcacacagaagccatgcatgcttccatgcatacaaacactgcagtggccaacgtcgggacctccatttctggacatgaatcacaatcttctgtcccagctgattcacacacatccaaagccacatctccaatgggtatcaccttcgccatgggggatacaagtgtttctacatcaactcctgccttctttgagactagaattcagactgaatcaacatcctctttgattcctggattaagggacaccaggacgtctgaggagatcaacactgtgacagagaccagcactgtcctttcagaagtgcccactactactactactgaggtctccaggacagaagttatcacttccagcagaacaaccatctcagggcctgatcattccaaaatgtcaccctacatctccacagaaaccatcaccaggctctccacttttccttttgtaacaggatccacagaaatggccatcaccaaccaaacaggtcctatagggactatctcacaggctacccttaccctggacacatcaagcacagcttcctgggaagggactcactcacctgtgactcagagatttccacactcagaggagaccactactatgagcagaagtactaagggcgtgtcatggcaaagccctccctctgtggaagaaaccagttctccttcttccccagtgcctttacctgcaataacctcacattcatctctttattccgcagtatcaggaagtagccccacttctgctctccctgtgacttcccttctcacctctggcaggaggaagaccatagacatgttggacacacactcagaacttgtgaccagctccttaccaagtgcaagtagcttctcaggtgagatactcacttctgaagcctccacaaatacagagacaattcacttttcagagaacacagcagaaaccaatatggggaccaccaattctatgcataaactacattcctctgtctcaatccactcccagccatccggacacacacctccaaaggttactggatctatgatggaggacgctattgtttccacatcaacacctggttctcctgagactaaaaatgttgacagagactcaacatcccctctgactcctgaactgaaagaggacagcaccgccctggtgatgaactcaactacagagtcaaacactgttttctccagtgtgtccctggatgctgctactgaggtctccagggcagaagtcacctactatgatcctacattcatgccagcttctgctcagtcaacaaagtccccagacatttcacctgaagccagcagcagtcattctaactctcctcccttgacaatatctacacacaagaccatcgccacacaaacaggtccttctggggtgacatctcttggccaactgaccctggacacatcaaccatagccacctcagcaggaactccatcagccagaactcaggattttgtagattcagaaacaaccagtgtcatgaacaatgatctcaatgatgtgttgaagacaagccctttctctgcagaagaagccaactctctctcttctcaggcacctctccttgtgacaacctcaccttctcctgtaacttccacattgcaagagcacagtacctcctctcttgtttctgtgacctcagtacccacccctacactggcgaagatcacagacatggacacaaacttagaacctgtgactcgttcacctcaaaatttaaggaacaccttggccacttcagaagccaccacagatacacacacaatgcatccttctataaacacagcaatggccaatgtggggaccaccagttcaccaaatgaattctattttactgtctcacctgactcagacccatataaagccacatccgcagtagttatcacttccacctcgggggactcaatagtttccacatcaatgcctagatcctctgcgatgaaaaagattgagtctgagacaactttctccctgatatttagactgagggagactagcacctcccagaaaattggctcatcctcagacacaagcacggtctttgacaaagcattcactgctgctactactgaggtctccagaacagaactcacctcctctagcagaacatccatccaaggcactgaaaagcccacaatgtcaccggacacctccacaagatctgtcaccatgctttctacttttgctggcctgacaaaatccgaagaaaggaccattgccacccaaacaggtcctcatagggcgacatcacagggtacccttacctgggacacatcaatcacaacctcacaggcagggacccactcagctatgactcatggattttcacaattagatttgtccactcttacgagtagagttcctgagtacatatcagggacaagcccaccctctgtggaaaaaaccagctcttcctcttcccttctgtctttaccagcaataacctcaccgtcccctgtacctactacattaccagaaagtaggccgtcttctcctgttcatctgacttcactccccacctctggcctagtgaagaccacagatatgctggcatctgtggccagtttacctccaaacttgggcagcacctcacataagataccgactacttcagaagacattaaagatacagagaaaatgtatccttccacaaacatagcagtaaccaatgtggggaccaccacttctgaaaaggaatcttattcgtctgtcccagcctactcagaaccacccaaagtcacctctccaatggttacctctttcaacataagggacaccattgtttccacatccatgcctggctcctctgagattacaaggattgagatggagtcaacattctccgtggctcatgggctgaagggaaccagcacctcccaggaccccatcgtatccacagagaaaagtgctgtccttcacaagttgaccactggtgctactgagacctctaggacagaagttgcctcttctagaagaacatccattccaggccctgatcattccacagagtcaccagacatctccactgaagtgatccccagcctgcctatctcccttggcattacagaatcttcaaatatgaccatcatcactcgaacaggtcctcctcttggctctacatcacagggcacatttaccttggacacaccaactacatcctccagggcaggaacacactcgatggcgactcaggaatttccacactcagaaatgaccactgtcatgaacaaggaccctgagattctatcatggacaatccctccttctatagagaaaaccagcttctcctcttccctgatgccttcaccagccatgacttcacctcctgtttcctcaacattaccaaagaccattcacaccactccttctcctatgacctcactgctcacccctagcctagtgatgaccacagacacattgggcacaagcccagaacctacaaccagttcacctccaaatttgagcagtacctcacatgtgatactgacaacagatgaagacaccacagctatagaagccatgcatccttccacaagcacagcagcgactaatgtggaaaccacctgttctggacatgggtcacaatcctctgtcctaactgactcagaaaaaaccaaggccacagctccaatggataccacctccaccatggggcatacaactgtttccacatcaatgtctgtttcctctgagactacaaaaattaagagagagtcaacatattccttgactcctggactgagagagaccagcatttcccaaaatgccagcttttccactgacacaagtattgttctttcagaagtccccactggtactactgctgaggtctccaggacagaagtcacctcctctggtagaacatccatccctggcccttctcagtccacagttttgccagaaatatccacaagaacaatgacaaggctctttgcctcgcccaccatgacagaatcagcagaaatgaccatccccactcaaacaggtccttctgggtctacctcacaggatacccttaccttggacacatccaccacaaagtcccaggcaaagactcattcaactttgactcagagatttccacactcagagatgaccactctcatgagcagaggtcctggagatatgtcatggcaaagctctccctctctggaaaatcccagctctctcccttccctgctgtctttacctgccacaacctcacctcctcccatttcctccacattaccagtgactatctcctcctctcctcttcctgtgacttcacttctcacctctagcccggtaacgaccacagacatgttacacacaagcccagaacttgtaaccagttcacctccaaagctgagccacacttcagatgagagactgaccactggcaaggacaccacaaatacagaagctgtgcatccttccacaaacacagcagcgtccaatgtggagattcccagctttggacatgaatccccttcctctgccttagctgactcagagacatccaaagccacatcaccaatgtttattacctccacccaggaggatacaactgttgccatatcaacccctcacttcttggagactagcagaattcagaaagagtcaatttcctccctgagccctaaattgagggagacaggcagttctgtggagacaagctcagccatagagacaagtgctgtcctttctgaagtgtccattggtgctactactgagatctccaggacagaagtcacctcctctagcagaacatccatctctggttctgctgagtccacaatgttgccagaaatatccaccacaagaaaaatcattaagttccctacttcccccatcctggcagaatcatcagaaatgaccatcaagacccaaacaagtcctcctgggtctacatcagagagtacctttacattagacacatcaaccactccctccttggtaataacccattcgactatgactcagagattgccacactcagagataaccactcttgtgagtagaggtgctggggatgtgccacggcccagctctctccctgtggaagaaacaagccctccatcttcccagctgtctttatctgccatgatctcaccttctcctgtttcttccacattaccagcaagtagccactcctcttctgcttctgtgacttcacctctcacaccaggccaagtgaagactactgaggtgttggacgcaagtgcagaacctgaaaccagttcacctccaagtttgagcagcacctcagttgaaatactggccacctctgaagtcaccacagatacggagaaaattcatcctttcccaaacacggcagtaaccaaagttggaacttccagttctggacatgaatccccttcctctgtcctacctgactcagagacaaccaaagccacatcggcaatgggtaccatctccattatgggggatacaagtgtttctacattaactcctgccttatctaacactaggaaaattcagtcagagccagcttcctcactgaccaccagattgagggagaccagcacctctgaagagaccagcttagccacagaagcaaacactgttctttctaaagtgtccactggtgctactactgaggtctccaggacagaagccatctcctttagcagaacatccatgtcaggccctgagcagtccacaatgtcacaagacatctccataggaaccatccccaggatttctgcctcctctgtcctgacagaatctgcaaaaatgaccatcacaacccaaacaggtccttcggagtctacactagaaagtacccttaatttgaacacagcaaccacaccctcttgggtggaaacccactctatagtaattcagggatttccacacccagagatgaccacttccatgggcagaggtcctggaggtgtgtcatggcctagccctccctttgtgaaagaaaccagccctccatcctccccgctgtctttacctgccgtgacctcacctcatcctgtttccaccacattcctagcacatatccccccctctccccttcctgtgacttcacttctcacctctggcccggcgacaaccacagatatcttgggtacaagcacagaacctggaaccagttcatcttcaagtttgagcaccacctcccatgagagactgaccacttacaaagacactgcacatacagaagccgtgcatccttccacaaacacaggagggaccaatgtggcaaccaccagctctggatataaatcacagtcctctgtcctagctgactcatctccaatgtgtaccacctccaccatgggggatacaagtgttctcacatcaactcctgccttccttgagactaggaggattcagacagagctagcttcctccctgacccctggattgagggagtccagtggctctgaagggaccagctcaggcaccaagatgagcactgtcctctctaaagtgcccactggtgctactactgagatctccaaggaagacgtcacctccatcccaggtcccgctcaatccacaatatcaccagacatctccacaagaaccgtcagctggttctctacatcccctgtcatgacagaatcagcagaaataaccatgaacacccatacaagtcctttaggggccacaacacaaggcaccagtactttggccacgtcaagcacaacctctttgacaatgacacactcaactatatctcaaggattttcacactcacagatgagcactcttatgaggaggggtcctgaggatgtatcatggatgagccctccccttctggaaaaaactagaccttccttttctctgatgtcttcaccagccacaacttcaccttctcctgtttcctccacattaccagagagcatctcttcctctcctcttcctgtgacttcactcctcacgtctggcttggcaaaaactacagatatgttgcacaaaagctcagaacctgtaaccaactcacctgcaaatttgagcagcacctcagttgaaatactggccacctctgaagtcaccacagatacagagaaaactcatccttcttcaaacagaacagtgaccgatgtggggacctccagttctggacatgaatccacttcctttgtcctagctgactcacagacatccaaagtcacatctccaatggttattacctccaccatggaggatacgagtgtctccacatcaactcctggcttttttgagactagcagaattcagacagaaccaacatcctccctgacccttggactgagaaagaccagcagctctgaggggaccagcttagccacagagatgagcactgtcctttctggagtgcccactggtgccactgctgaagtctccaggacagaagtcacctcctctagcagaacatccatctcaggctttgctcagctcacagtgtcaccagagacttccacagaaaccatcaccagactccctacctccagcataatgacagaatcagcagaaatgatgatcaagacacaaacagatcctcctgggtctacaccagagagtactcatactgtggacatatcaacaacacccaactgggtagaaacccactcgactgtgactcagagattttcacactcagagatgaccactcttgtgagcagaagccctggtgatatgttatggcctagtcaatcctctgtggaagaaaccagctctgcctcttccctgctgtctctgcctgccacgacctcaccttctcctgtttcctctacattagtagaggatttcccttccgcttctcttcctgtgacttctcttctcacccctggcctggtgataaccacagacaggatgggcataagcagagaacctggaaccagttccacttcaaatttgagcagcacctcccatgagagactgaccactttggaagacactgtagatacagaagacatgcagccttccacacacacagcagtgaccaacgtgaggacctccatttctggacatgaatcacaatcttctgtcctatctgactcagagacacccaaagccacatctccaatgggtaccacctacaccatgggggaaacgagtgtttccatatccacttctgacttctttgagaccagcagaattcagatagaaccaacatcctccctgacttctggattgagggagaccagcagctctgagaggatcagctcagccacagagggaagcactgtcctttctgaagtgcccagtggtgctaccactgaggtctccaggacagaagtgatatcctctaggggaacatccatgtcagggcctgatcagttcaccatatcaccagacatctctactgaagcgatcaccaggctttctacttcccccattatgacagaatcagcagaaagtgccatcactattgagacaggttctcctggggctacatcagagggtaccctcaccttggacacctcaacaacaaccttttggtcagggacccactcaactgcatctccaggattttcacactcagagatgaccactcttatgagtagaactcctggagatgtgccatggccgagccttccctctgtggaagaagccagctctgtctcttcctcactgtcttcacctgccatgacctcaacttcttttttctccgcattaccagagagcatctcctcctctcctcatcctgtgactgcacttctcacccttggcccagtgaagaccacagacatgttgcgcacaagctcagaacctgaaaccagttcacctccaaatttgagcagcacctcagctgaaatattagccacgtctgaagtcaccaaagatagagagaaaattcatccctcctcaaacacacctgtagtcaatgtagggactgtgatttataaacatctatccccttcctctgttttggctgacttagtgacaacaaaacccacatctccaatggctaccacctccactctggggaatacaagtgtttccacatcaactcctgccttcccagaaactatgatgacacagccaacttcctccctgacttctggattaagggagatcagtacctctcaagagaccagctcagcaacagagagaagtgcttctctttctggaatgcccactggtgctactactaaggtctccagaacagaagccctctccttaggcagaacatccaccccaggtcctgctcaatccacaatatcaccagaaatctccacggaaaccatcactagaatttctactcccctcaccacgacaggatcagcagaaatgaccatcacccccaaaacaggtcattctggggcatcctcacaaggtacctttaccttggacacatcaagcagagcctcctggccaggaactcactcagctgcaactcacagatctccacactcagggatgaccactcctatgagcagaggtcctgaggatgtgtcatggccaagccgcccatcagtggaaaaaactagccctccatcttccctggtgtctttatctgcagtaacctcaccttcgccactttattccacaccatctgagagtagccactcatctcctctccgggtgacttctcttttcacccctgtcatgatgaagaccacagacatgttggacacaagcttggaacctgtgaccacttcacctcccagtatgaatatcacctcagatgagagtctggccacttctaaagccaccatggagacagaggcaattcagctttcagaaaacacagctgtgactcagatgggcaccatcagcgctagacaagaattctattcctcttatccaggcctcccagagccatccaaagtgacatctccagtggtcacctcttccaccataaaagacattgtttctacaaccatacctgcttcctctgagataacaagaattgagatggagtcaacatccaccctgacccccacaccaagggagaccagcacctcccaggagatccactcagccacaaagccaagcactgttccttacaaggcactcactagtgccacgattgaggactccatgacacaagtcatgtcctctagcagaggacctagccctgatcagtccacaatgtcacaagacatatccagtgaagtgatcaccaggctctctacctcccccatcaaggcagaatctacagaaatgaccattaccacccaaacaggttctcctggggctacatcaaggggtacccttaccttggacacttcaacaacttttatgtcagggacccactcaactgcatctcaaggattttcacactcacagatgaccgctcttatgagtagaactcctggagatgtgccatggctaagccatccctctgtggaagaagccagctctgcctctttctcactgtcttcacctgtcatgacctcatcttctcccgtttcttccacattaccagacagcatccactcttcttcgcttcctgtgacatcacttctcacctcagggctggtgaagaccacagagctgttgggcacaagctcagaacctgaaaccagttcacccccaaatttgagcagcacctcagctgaaatactggccaccactgaagtcactacagatacagagaaactggagatgaccaatgtggtaacctcaggttatacacatgaatctccttcctctgtcctagctgactcagtgacaacaaaggccacatcttcaatgggtatcacctaccccacaggagatacaaatgttctcacatcaacccctgccttctctgacaccagtaggattcaaacaaagtcaaagctctcactgactcctgggttgatggagaccagcatctctgaagagaccagctctgccacagaaaaaagcactgtcctttctagtgtgcccactggtgctactactgaggtctccaggacagaagccatctcttctagcagaacatccatcccaggccctgctcaatccacaatgtcatcagacacctccatggaaaccatcactagaatttctacccccctcacaaggaaagaatcaacagacatggccatcacccccaaaacaggtccttctggggctacctcgcagggtacctttaccttggactcatcaagcacagcctcctggccaggaactcactcagctacaactcagagatttccacagtcagtggtgacaactcctatgagcagaggtcctgaggatgtgtcatggccaagcccgctgtctgtggaaaaaaacagccctccatcttccctggtatcttcatcttcagtaacctcaccttcgccactttattccacaccatctgggagtagccactcctctcctgtccctgtcacttctcttttcacctctatcatgatgaaggccacagacatgttggatgcaagtttggaacctgagaccacttcagctcccaatatgaatatcacctcagatgagagtctggccacttctaaagccaccacggagacagaggcaattcacgtttttgaaaatacagcagcgtcccatgtggaaaccaccagtgctacagaggaactctattcctcttccccaggcttctcagagccaacaaaagtgatatctccagtggtcacctcttcctctataagagacaacatggtttccacaacaatgcctggctcctctggcattacaaggattgagatagagtcaatgtcatctctgacccctggactgagggagaccagaacctcccaggacatcacctcatccacagagacaagcactgtcctttacaagatgtcctctggtgccactcctgaggtctccaggacagaagttatgccctctagcagaacatccattcctggccctgctcagtccacaatgtcactagacatctccgatgaagttgtcaccaggctgtctacctctcccatcatgacagaatctgcagaaataaccatcaccacccaaacaggttattctctggctacatcccaggttacccttcccttgggcacctcaatgacctttttgtcagggacccactcaactatgtctcaaggactttcacactcagagatgaccaatcttatgagcaggggtcctgaaagtctgtcatggacgagccctcgctttgtggaaacaactagatcttcctcttctctgacatcattacctctcacgacctcactttctcctgtgtcctccacattactagacagtagcccctcctctcctcttcctgtgacttcacttatcctcccaggcctggtgaagactacagaagtgttggatacaagctcagagcctaaaaccagttcatctccaaatttgagcagcacctcagttgaaataccggccacctctgaaatcatgacagatacagagaaaattcatccttcctcaaacacagcggtggccaaagtgaggacctccagttctgttcatgaatctcattcctctgtcctagctgactcagaaacaaccataaccataccttcaatgggtatcacctccgctgtggacgataccactgttttcacatcaaatcctgccttctctgagactaggaggattccgacagagccaacattctcattgactcctggattcagggagactagcacctctgaagagaccacctcaatcacagaaacaagtgcagtcctttatggagtgcccactagtgctactactgaagtctccatgacagaaatcatgtcctctaatagaacacacatccctgactctgatcagtccacgatgtctccagacatcatcactgaagtgatcaccaggctctcttcctcatccatgatgtcagaatcaacacaaatgaccatcaccacccaaaaaagttctcctggggctacagcacagagtactcttaccttggccacaacaacagcccccttggcaaggacccactcaactgttcctcctagatttttacactcagagatgacaactcttatgagtaggagtcctgaaaatccatcatggaagagctctccctttgtggaaaaaactagctcttcatcttctctgttgtccttacctgtcacgacctcaccttctgtttcttccacattaccgcagagtatcccttcctcctctttttctgtgacttcactcctcaccccaggcatggtgaagactacagacacaagcacagaacctggaaccagtttatctccaaatctgagtggcacctcagttgaaatactggctgcctctgaagtcaccacagatacagagaaaattcatccttcttcaagcatggcagtgaccaatgtgggaaccaccagttctggacatgaactatattcctctgtttcaatccactcggagccatccaaggctacatacccagtgggtactccctcttccatggctgaaacctctatttccacatcaatgcctgctaattttgagaccacaggatttgaggctgagccattttctcatttgacttctggatttaggaagacaaacatgtccctggacaccagctcagtcacaccaacaaatacaccttcttctcctgggtccactcaccttttacagagttccaagactgatttcacctcttctgcaaaaacatcatccccagactggcctccagcctcacagtatactgaaattccagtggacataatcaccccctttaatgcttctccatctattacggagtccactgggataacctccttcccagaatccaggtttactatgtctgtaacagaaagtactcatcatctgagtacagatttgctgccttcagctgagactatttccactggcacagtgatgccttctctatcagaggccatgacttcatttgccaccactggagttccacgagccatctcaggttcaggtagtccattctctaggacagagtcaggccctggggatgctactctgtccaccattgcagagagcctgccttcatccactcctgtgccattctcctcttcaaccttcactaccactgattcttcaaccatcccagccctccatgagataacttcctcttcagctaccccatatagagtggacaccagtcttgggacagagagcagcactactgaaggacgcttggttatggtcagtactttggacacttcaagccaaccaggcaggacatcttcaacacccattttggataccagaatgacagagagcgttgagctgggaacagtgacaagtgcttatcaagttccttcactctcaacacggttgacaagaactgatggcattatggaacacatcacaaaaatacccaatgaagcagcacacagaggtaccataagaccagtcaaaggccctcagacatccacttcgcctgccagtcctaaaggactacacacaggagggacaaaaagaatggagaccaccaccacagctttgaagaccaccaccacagctttgaagaccacttccagagccaccttgaccaccagtgtctatactcccactttgggaacactgactcccctcaatgcatcaaggcaaatggccagcacaatcctcacagaaatgatgatcacaaccccatatgttttccctgatgttccagaaacgacatcctcattggctaccagcctgggagcagaaaccagcacagctcttcccaggacaaccccatctgttctcaatagagaatcagagaccacagcctcactggtctctcgttctggggcagagagaagtccggttattcaaactctagatgtttcttctagtgagccagatacaacagcttcatgggttatccatcctgcagagaccatcccaactgtttccaagacaacccccaattttttccacagtgaattagacactgtatcttccacagccaccagtcatggggcagacgtcagctcagccattccaacaaatatctcacctagtgaactagatgcactgaccccactggtcactatttcggggacagatactagtacaacattcccaacactgactaagtccccacatgaaacagagacaagaaccacatggctcactcatcctgcagagaccagctcaactattcccagaacaatccccaatttttctcatcatgaatcagatgccacaccttcaatagccaccagtcctggggcagaaaccagttcagctattccaattatgactgtctcacctggtgcagaagatctggtgacctcacaggtcactagttctgggacagacagaaatatgactattccaactttgactctttctcctggtgaaccaaagacgatagcctcattagtcacccatcctgaagcacagacaagttcggccattccaacttcaactatctcgcctgctgtatcacggttggtgacctcaatggtcaccagtttggcggcaaagacaagtacaactaatcgagctctgacaaactcccctggtgaaccagctacaacagtttcattggtcacgcatcctgcacagaccagcccaacagttccctggacaacttccatttttttccatagtaaatcagacaccacccttcaatgaccaccagtcatggggcagaatccagttcagctgttccaactccaactgtttcaactgaggtaccaggagtagtgacccctttggtcaccagttctagggcagtgatcagtacaactattccaattctgactctttctcctggtgaaccagagaccacaccttcaatggccaccagtcatggggaagaagccagttctgctattccaactccaactgtttcacctggggtaccaggagtggtgacctctctggtcactagttctagggcagtgactagtacaactattccaattctgactttttctcttggtgaaccagagaccacaccttcaatggccaccagtcatgggacagaagctggctcagctgttccaactgttttacctgaggtaccaggaatggtgacctctctggttgctagttctagggcagtaaccagtacaactcttccaactctgactctttctcctggtgaaccagagaccacaccttcaatggccaccagtcatggggcagaagccagctcaactgttccaactgtttcacctgaggtaccaggagtggtgacctctctggtcactagttctagtggagtaaacagtacaagtattccaactctgattctttctcctggtgaactagaaaccacaccttcaatggccaccagtcatggggcagaagccagctcagctgttccaactccaactgtttcacctggggtatcaggagtggtgacccctctggtcactagttccagggcagtgaccagtacaactattccaattctaactctttcttctagtgagccagagaccacaccttcaatggccaccagtcatggggtagaagccagctcagctgttctaactgtttcacctgaggtaccaggaatggtgacctctctggtcactagttctagagcagtaaccagtacaactattccaactctgactatttcttctgatgaaccagagaccacaacttcattggtcacccattctgaggcaaagatgatttcagccattccaactttagctgtctcccctactgtacaagggctggtgacttcactggtcactagttctgggtcagagaccagtgcgttttcaaatctaactgttgcctcaagtcaaccagagaccatagactcatgggtcgctcatcctgggacagaagcaagttctgttgttccaactttgactgtctccactggtgagccgtttacaaatatctcattggtcacccatcctgcagagagtagctcaactcttcccaggacaacctcaaggttttcccacagtgaattagacactatgccttctacagtcaccagtcctgaggcagaatccagctcagccatttcaactactatttcacctggtataccaggtgtgctgacatcactggtcactagctctgggagagacatcagtgcaacttttccaacagtgcctgagtccccacatgaatcagaggcaacagcctcatgggttactcatcctgcagtcaccagcacaacagttcccaggacaacccctaattattctcatagtgaaccagacaccacaccatcaatagccaccagtcctggggcagaagccacttcagattttccaacaataactgtctcacctgatgtaccagatatggtaacctcacaggtcactagttctgggacagacaccagtataactattccaactctgactctttcttctggtgagccagagaccacaacctcatttatcacctattctgagacacacacaagttcagccattccaactctccctgtctcccctggtgcatcaaagatgctgacctcactggtcatcagttctgggacagacagcactacaactttcccaacactgacggagaccccatatgaaccagagacaacagccatacagctcattcatcctgcagagaccaacacaatggttcccaagacaactcccaagttttcccatagtaagtcagacaccacactcccagtagccatcaccagtcctgggccagaagccagttcagctgtttcaacgacaactatctcacctgatatgtcagatctggtgacctcactggtccctagttctgggacagacaccagtacaaccttcccaacattgagtgagaccccatatgaaccagagactacagtcacgtggctcactcatcctgcagaaaccagcacaacggtttctgggacaattcccaacttttcccataggggatcagacactgcaccctcaatggtcaccagtcctggagtagacacgaggtcaggtgttccaactacaaccatcccacccagtataccaggggtagtgacctcacaggtcactagttctgcaacagacactagtacagctattccaactttgactccttctcctggtgaaccagagaccacagcctcatcagctacccatcctgggacacagactggcttcactgttccaattcggactgttccctctagtgagccagatacaatggcttcctgggtcactcatcctccacagaccagcacacctgtttccagaacaacctccagtttttcccatagtagtccagatgccacacctgtaatggccaccagtcctaggacagaagccagttcagctgtactgacaacaatctcacctggtgcaccagagatggtgacttcacagatcactagttctggggcagcaaccagtacaactgttccaactttgactcattctcctggtatgccagagaccacagccttattgagcacccatcccagaacagggacaagtaaaacatttcctgcttcaactgtgtttcctcaagtatcagagaccacagcctcactcaccattagacctggtgcagagactagcacagctctcccaactcagacaacatcctctctcttcaccctacttgtaactggaaccagcagagttgatctaagtccaactgcttcacctggtgtttctgcaaaaacagccccactttccacccatccagggacagagaccagcacaatgattccaacttcaactctttcccttggtttactagagactacaggcttactggccaccagctcttcagcagagaccagcacgagtactctaactctgactgtttcccctgctgtctctgggctttccagtgcctctataacaactgataagccccaaactgtgacctcctggaacacagaaacctcaccatctgtaacttcagttggacccccagaattttccaggactgtcacaggcaccactatgaccttgataccatcagagatgccaacaccacctaaaaccagtcatggagaaggagtgagtccaaccactatcttgagaactacaatggttgaagccactaatttagctaccacaggttccagtcccactgtggccaagacaacaaccaccttcaatacactggctggaagcctctttactcctctgaccacacctgggatgtccaccttggcctctgagagtgtgacctcaagaacaagttataaccatcggtcctggatctccaccaccagcagttataaccgtcggtactggacccctgccaccagcactccagtgacttctacattctccccagggatttccacatcctccatccccagctccacagcagccacagtcccattcatggtgccattcaccctcaacttcaccatcaccaacctgcagtacgaggaggacatgcggcaccctggttccaggaagttcaacgccacagagagagaactgcagggtctgctcaaacccttgttcaggaatagcagtctggaatacctctattcaggctgcagactagcctcactcaggccagagaaggatagctcagccatggcagtggatgccatctgcacacatcgccctgaccctgaagacctcggactggacagagagcgactgtactgggagctgagcaatctgacaaatggcatccaggagctgggcccctacaccctggaccggaacagtctctatgtcaatggtttcacccatcgaagctctatgcccaccaccagcactcctgggacctccacagtggatgtgggaacctcagggactccatcctccagccccagccccacggctgctggccctctcctgatgccgttcaccctcaacttcaccatcaccaacctgcagtacgaggaggacatgcgtcgcactggctccaggaagttcaacaccatggagagtgtcctgcagggtctgctcaagcccttgttcaagaacaccagtgttggccctctgtactctggctgcagattgaccttgctcaggcccgagaaagatggggcagccactggagtggatgccatctgcacccaccgccttgaccccaaaagccctggactcaacagggagcagctgtactgggagctaagcaaactgaccaatgacattgaagagctgggcccctacaccctggacaggaacagtctctatgtcaatggtttcacccatcagagctctgtgtccaccaccagcactcctgggacctccacagtggatctcagaacctcagggactccatcctccctctccagccccacaattatggctgctggccctctcctggtaccattcaccctcaacttcaccatcaccaacctgcagtatggggaggacatgggtcaccctggctccaggaagttcaacaccacagagagggtcctgcagggtctgcttggtcccatattcaagaacaccagtgttggccctctgtactctggctgcagactgacctctctcaggtctgagaaggatggagcagccactggagtggatgccatctgcatccatcatcttgaccccaaaagccctggactcaacagagagcggctgtactgggagctgagccaactgaccaatggcatcaaagagctgggcccctacaccctggacaggaacagtctctatgtcaatggtttcacccatcggacctctgtgcccaccaccagcactcctgggacctccacagtggaccttggaacctcagggactccattctccctcccaagccccgcaactgctggccctctcctggtgctgttcaccctcaacttcaccatcaccaacctgaagtatgaggaggacatgcatcgccctggctccaggaagttcaacaccactgagagggtcctgcagactctgcttggtcctatgttcaagaacaccagtgttggccttctgtactctggctgcagactgaccttgctcaggtccgagaaggatggagcagccactggagtggatgccatctgcacccaccgtcttgaccccaaaagccctggactggacagagagcagctatactgggagctgagccagctgaccaatggcatcaaagagctgggcccctacaccctggacaggaacagtctctatgtcaatggtttcacccattggatccctgtgcccaccagcagcactcctgggacctccacagtggaccttgggtcagggactccatcctccctccccagccccacagctgctggccctctcctggtgccattcaccctcaacttcaccatcaccaacctgcagtacgaggaggacatgcatcacccaggctccaggaagttcaacaccacggagcgggtcctgcagggtctgcttggtcccatgttcaagaacaccagtgtcggccttctgtactctggctgcagactgaccttgctcaggtccgagaaggatggagcagccactggagtggatgccatctgcacccaccgtcttgaccccaaaagccctggagtggacagggagcagctatactgggagctgagccagctgaccaatggcatcaaagagctgggtccctacaccctggacagaaacagtctctatgtcaatggtttcacccatcagacctctgcgcccaacaccagcactcctgggacctccacagtggaccttgggacctcagggactccatcctccctccccagccctacatcngctggccctctcctggtnccnttcaccctcaacttcaccatcaccaacctgcagtacgaggaggacatgcggcacccnggntccaggaagttcaacaccacngagagggtnctgcagggtctgctnaagcccctnttcaagagcaccagtgttggccctctgtactctggctgcagactgaccttgctcaggtccgagaaggatggagcagccactggagtggatgccatctgcacccaccgtcttgaccccaaaagccctggagtggacagggagcagctatactgggagctgagccagctgaccaatggcatcaaagagctgggtccctacaccctggacagaaacagtctctatgtcaatggtttcacccatcagacctctgcgcccaacaccagcactcctgggacctccacagtggaccttgggacctcagggactccatcctccctccccagccctacatctgctggccctctcctggtgccattcaccctcaacttcaccatcaccaacctgcagtacgaggaggacatgcatcacccaggctccaggaagttcaacaccacggagcgggtcctgcagggtctgcttggtcccatgttcaagaacaccagtgtcggccttctgtactctggctgcagactgaccttgctcaggcctgagaagaatggggcagccactggaatggatgccatctgcagccaccgtcttgaccccaaaagccctggactcaacagagagcagctgtactgggagctgagccagctgacccatggcatcaaagagctgggcccctacaccctggacaggaacagtctctatgtcaatggtttcacccatcggagctctgtggcccccaccagcactcctgggacctccacagtggaccttgggacctcagggactccatcctccctccccagccccacaacagctgttcctctcctggtgccgttcaccctcaactttaccatcaccaatctgcagtatggggaggacatgcgtcaccctggctccaggaagttcaacaccacagagagggtcctgcagggtctgcttggtcccttgttcaagaactccagtgtcggccctctgtactctggctgcagactgatctctctcaggtctgagaaggatggggcagccactggagtggatgccatctgcacccaccaccttaaccctcaaagccctggactggacagggagcagctgtactggcagctgagccagatgaccaatggcatcaaagagctgggcccctacaccctggaccggaacagtctctacgtcaatggtttcacccatcggagctctgggctcaccaccagcactccttggacttccacagttgaccttggaacctcagggactccatcccccgtccccagccccacaactgctggccctctcctggtgccattcaccctcaacttcaccatcaccaacctgcagtatgaggaggacatgcatcgccctggatctaggaagttcaacaccacagagagggtcctgcagggtctgcttagtcccattttcaagaactccagtgttggccctctgtactctggctgcagactgacctctctcaggcccgagaaggatggggcagcaactggaatggatgctgtctgcctctaccaccctaatcccaaaagacctggactggacagagagcagctgtactgggagctaagccagctgacccacaacatcactgagctgggcccctacagcctggacagggacagtctctatgtcaatggtttcacccatcagaactctgtgcccaccaccagtactcctgggacctccacagtgtactgggcaaccactgggactccatcctccttccccggccacacagagcctggccctctcctgataccattcactttcaactttaccatcaccaacctgcattatgaggaaaacatgcaacaccctggttccaggaagttcaacaccacggagagggttctgcagggtctgctcaagcccttgttcaagaacaccagtgttggccctctgtactctggctgcagactgacctctctcaggcccgagaaggatggggcagcaactggaatggatgctgtctgcctctaccaccctaatcccaaaagacctgggctggacagagagcagctgtactgggagctaagccagctgacccacaacatcactgagctgggcccctacagcctggacagggacagtctctatgtcaatggtttcacccatcagaactctgtgcccaccaccagtactcctgggacctccacagtgtactgggcaaccactgggactccatcctccttccccggccacacagagcctggccctctcctgataccattcactttcaactttaccatcaccaacctgcattatgaggaaaacatgcaacaccctggttccaggaagttcaacaccacggagagggttctgcagggtctgctcaagcccttgttcaagaacaccagtgttggccctctgtactctggctgcagactgaccttgctcagacctgagaagcatgaggcagccactggagtggacaccatctgtacccaccgcgttgatcccatcggacctggactggacagggagcggctatactgggagctgagccagctgaccaacagcattaccgaactgggaccctacaccctggacagggacagtctctatgtcaatggcttcaaccctcggagctctgtgccaaccaccagcactcctgggacctccacagtgcacctggcaacctctgggactccatcctccctgcctggccacacagcccctgtccctctcttgataccattcaccctcaactttaccatcaccaacctgcattatgaggaaaacatgcaacaccctggttccaggaagttcaacaccacggagagggttctgcagggtctgctcaagcccttgttcaagaacaccagtgttggccctctgtactctggctgcagactgaccttgctcagacctgagaagcatgaggcagccactggagtggacaccatctgtacccaccgcgttgatcccatcggacctggactgnacagngagcngctntactgggagctnagccanctgaccaannncatcnnngagctgggnccctacaccctggacaggnacagtctctatgtcaatggtttcacccatcnganctctgngcccaccaccagcactcctgggacctccacagtgnacntnggnacctcngggactccatcctccntccccngccncacatctgctggccctctcctggtgccattcaccctcaacttcaccatcaccaacctgcagtacgaggaggacatgcatcacccaggctccaggaagttcaacaccacggagcgggtcctgcagggtctgcttggtcccatgttcaagaacaccagtgtcggccttctgtactctggctgcagactgaccttgctcaggcctgagaagaatggggcagccactggaatggatgccatctgcagccaccgtcttgaccccaaaagccctggactcgacagagagcagctgtactgggagctgagccagctgacccatggcatcaaagagctgggcccctacaccctggacaggaacagtctctatgtcaatggtttcacccatcggagctctgtggcccccaccagcactcctgggacctccacagtggaccttgggacctcagggactccatcctccctccccagccccacaacagctgttcctctcctggtgccgttcaccctcaactttaccatcaccaatctgcagtatggggaggacatgcgtcaccctggctccaggaagttcaacaccacagagagggtcctgcagggtctgcttggtcccttgttcaagaactccagtgtcggccctctgtactctggctgcagactgatctctctcaggtctgagaaggatggggcagccactggagtggatgccatctgcacccaccaccttaaccctcaaagccctggactggacagggagcagctgtactggcagctgagccagatgaccaatggcatcaaagagctgggcccctacaccctggaccggaacagtctctacgtcaatggtttcacccatcggagctctgggctcaccaccagcactccttggacttccacagttgaccttggaacctcagggactccatcccccgtccccagccccacaactgctggccctctcctggtgccattcaccctaaacttcaccatcaccaacctgcagtatgaggaggacatgcatcgccctggatctaggaagttcaacgccacagagagggtcctgcagggtctgcttagtcccatattcaagaactccagtgttggccctctgtactctggctgcagactgacctctctcaggcccgagaaggatggggcagcaactggaatggatgctgtctgcctctaccaccctaatcccaaaagacctggactggacagagagcagctgtactgggagctaagccagctgacccacaacatcactgagctgggcccctacagcctggacagggacagtctctatgtcaatggtttcacccatcagagctctatgacgaccaccagaactcctgatacctccacaatgcacctggcaacctcgagaactccagcctccctgtctggacctacgaccgccagccctctcctggtgctattcacaatcaactgcaccatcaccaacctgcagtacgaggaggacatgcgtcgcactggctccaggaagttcaacaccatggagagtgtcctgcagggtctgctcaagcccttgttcaagaacaccagtgttggccctctgtactctggctgcagattgaccttgctcaggcccaagaaagatggggcagccactggagtggatgccatctgcacccaccgccttgaccccaaaagccctggactcaacagggagcagctgtactgggagctaagcaaactgaccaatgacattgaagagctgggcccctacaccctggacaggaacagtctctatgtcaatggtttcacccatcagagctctgtgtccaccaccagcactcctgggacctccacagtggatctcagaacctcagggactccatcctccctctccagccccacaattatgncnnctgnccctctcctgntnccnttcaccntcaacttnaccatcaccaacctgcantangnggannacatgcnncncccnggntccaggaagttcaacaccacngagagggtcctacagggtctgctcaggcccttgttcaagaacaccagtgtcagctctctgtactctggttgcagactgaccttgctcaggcctgagaaggatggggcagccaccagagtggatgctgcctgcacctaccgccctgatcccaaaagccctggactggacagagagcaactatactgggagctgagccagctaacccacagcatcactgagctgggaccctacaccctggacagggtcagtctctatgtcaatggcttcaaccctcggagctctgtgccaaccaccagcactcctgggacctccacagtgcacctggcaacctctgggactccatcctccctgcctggccacacancnnctgnccctctcctgntnccnttcaccntcaacttnaccatcaccaacctgcantangnggannacatgcnncncccnggntccaggaagttcaacaccacngagagggttctgcagggtctgctcaaacccttgttcaggaatagcagtctggaatacctctattcaggctgcagactagcctcactcaggccagagaaggatagctcagccatggcagtggatgccatctgcacacatcgccctgaccctgaagacctcggactggacagagagcgactgtactgggagctgagcaatctgacaaatggcatccaggagctgggcccctacaccctggaccggaacagtctctacgtcaatggtttcacccatcggagctctgggctcaccaccagcactccttggacttccacagttgaccttggaacctcagggactccatcccccgtccccagccccacaactgctggccctctcctggtgccattcaccctcaacttcaccatcaccaacctgcagtatgaggaggacatgcatcgccctggttccaggaggttcaacaccacggagagggttctgcagggtctgctcacgcccttgttcaagaacaccagtgttggccctctgtactctggctgcagactgaccttgctcagacctgagaagcaagaggcagccactggagtggacaccatctgtacccaccgcgttgatcccatcggacctggactggacagagagcggctatactgggagctgagccagctgaccaacagcatcacagagctgggaccctacaccctggatagggacagtctctatgtcaatggcttcaacccttggagctctgtgccaaccaccagcactcctgggacctccacagtgcacctggcaacctctgggactccatcctccctgcctggccacacagcccctgtccctctcttgataccattcaccctcaactttaccatcaccgacctgcattatgaagaaaacatgcaacaccctggttccaggaagttcaacaccacggagagggttctgcagggtctgctcaagcccttgttcaagagcaccagcgttggccctctgtactctggctgcagactgaccttgctcagacctgagaaacatggggcagccactggagtggacgccatctgcaccctccgccttgatcccactggtcctggactggacagagagcggctatactgggagctgagccagctgaccaacagcgttacagagctgggcccctacaccctggacagggacagtctctatgtcaatggcttcacccatcggagctctgtgccaaccaccagtattcctgggacctctgcagtgcacctggaaacctctgggactccagcctccctccctggccacacagcccctggccctctcctggtgccattcaccctcaacttcactatcaccaacctgcagtatgaggaggacatgcgtcaccctggttccaggaagttcagcaccacggagagagtcctgcagggtctgctcaagcccttgttcaagaacaccagtgtcagctctctgtactctggttgcagactgaccttgctcaggcctgagaaggatggggcagccaccagagtggatgctgtctgcacccatcgtcctgaccccaaaagccctggactggacagagagcggctgtactggaagctgagccagctgacccacggcatcactgagctgggcccctacaccctggacaggcacagtctctatgtcaatggtttcacccatcagagctctatgacgaccaccagaactcctgatacctccacaatgcacctggcaacctcgagaactccagcctccctgtctggacctacgaccgccagccctctcctggtgctattcacaattaacttcaccatcactaacctgcggtatgaggagaacatgcatcaccctggctctagaaagtttaacaccacggagagagtccttcagggtctgctcaggcctgtgttcaagaacaccagtgttggccctctgtactctggctgcagactgaccacgctcaggcccaagaaggatggggcagccaccaaagtggatgccatctgcacctaccgccctgatcccaaaagccctggactggacagagagcagctatactgggagctgagccagctaacccacagcatcactgagctgggcccctacacccaggacagggacagtctctatgtcaatggcttcacccatcggagctctgtgccaaccaccagtattcctgggacctctgcagtgcacctggaaacctctgggactccagcctccctccctggccacacagcccctggccctctcctggtgccattcaccctcaacttcactatcaccaacctgcagtatgaggaggacatgcgtcaccctggttccaggaagttcaacaccacggagagagtcctgcagggtctgctcaagcccttgttcaagagcaccagtgttggccctctgtactctggctgcagactgaccttgctcaggcctgaaaaacgtggggcagccaccggcgtggacaccatctgcactcaccgccttgaccctctaaacccaggactggacagagagcagctatactgggagctgagcaaactgacccgtggcatcatcgagctgggcccctacctcctggacagaggcagtctctatgtcaatggtttcacccatcggacctctgtgcccaccaccagcactcctgggacctccacagtggaccttggaacctcagggactccattctccctcccaagccccgcancnnctgnccctctcctgntnccnttcaccntcaacttnaccatcaccaacctgcantangnggannacatgcnncncccnggntccaggaagttcaacaccacngagagggtcctgcagactctgcttggtcctatgttcaagaacaccagtgttggccttctgtactctggctgcagactgaccttgctcaggtccgagaaggatggagcagccactggagtggatgccatctgcacccaccgtcttgaccccaaaagccctggagtggacagggagcaactatactgggagctgagccagctgaccaatggcattaaagaactgggcccctacaccctggacaggaacagtctctatgtcaatgggttcacccattggatccctgtgcccaccagcagcactcctgggacctccacagtggaccttgggtcagggactccatcctccctccccagccccacaactgctggccctctcctggtgccgttcaccctcaacttcaccatcaccaacctgaagtacgaggaggacatgcattgccctggctccaggaagttcaacaccacagagagagtcctgcagagtctgcttggtcccatgttcaagaacaccagtgttggccctctgtactctggctgcagactgaccttgctcaggtccgagaaggatggagcagccactggagtggatgccatctgcacccaccgtcttgaccccaaaagccctggagtggacagggagcagctatactgggagctgagccagctgaccaatggcatcaaagagctgggtccctacaccctggacagaaacagtctctatgtcaatggtttcacccatcagacctctgcgcccaacaccagcactcctgggacctccacagtggaccttgggacctcagggactccatcctccctccccagccctacancnnctgnccctctcctgntnccnttcaccntcaacttnaccatcaccaacctgcantangnggannacatgcnncncccnggntccaggaagttcaacaccacngagngngtnctgcagggtctgctnnnncccntnttcaagaacnccagtgtnggccntctgtactctggctgcagactgacctnnctcaggncngagaagnatggngcagccactggantggatgccatctgcanccaccnncntnancccaaaagncctggactgnacagngagcngctntactgggagctnagccanctgaccaannncatcnnngagctgggnccctacaccctggacaggnacagtctctatgtcaatggtttcacccattggatccctgtgcccaccagcagcactcctgggacctccacagtggaccttgggtcagggactccatcctccctccccagccccacaactgctggccctctcctggtgccgttcaccctcaacttcaccatcaccaacctgaagtacgaggaggacatgcattgccctggctccaggaagttcaacaccacagagagagtcctgcagagtctgcttggtcccatgttcaagaacaccagtgttggccctctgtactctggctgcagactgacctcgctcaggtccgagaaggatggagcagccactggagtggatgccatctgcacccaccgtgttgaccccaaaagccctggagtggacagggagcagctatactgggagctgagccagctgaccaatggcatcaaagagctgggtccctacaccctggacagaaacagtctctatgtcaatggtttcacccatcagacctctgcgcccaacaccagcactcctgggacctccacagtgnacntnggnacctcngggactccatcctccntccccngccncacatctgctggccctctcctggtgccattcaccctcaacttcaccatcaccaacctgcagtacgaggaggacatgcatcacccaggctccaggaagttcaacaccacggagcgggtcctgcagggtctgcttggtcccatgttcaagaacaccagtgtcggccttctgtactctggctgcagactgaccttgctcaggcctgagaagaatggggcaaccactggaatggatgccatctgcacccaccgtcttgaccccaaaagccctggactgnacagngagcngctntactgggagctnagccanctgaccaannncatcnnngagctgggnccctacaccctggacaggnacagtctctatgtcaatggtttcacccatcnganctctgngcccaccaccagcactcctgggacctccacagtgnacntnggnacctcngggactccatcctccntccccngccncacancnnctgnccctctcctgntnccnttcaccntcaacttnaccatcaccaacctgcantangnggannacatgcnncncccnggntccaggaagttcaacaccacngagagggttctgcagggtctgctcaaacccttgttcaggaatagcagtctggaatacctctattcaggctgcagactagcctcactcaggccagagaaggatagctcagccatggcagtggatgccatctgcacacatcgccctgaccctgaagacctcggactggacagagagcgactgtactgggagctgagcaatctgacaaatggcatccaggagctgggcccctacaccctggaccggaacagtctctatgtcaatggtttcacccatcgaagctctatgcccaccaccagcactcctgggacctccacagtggatgtgggaacctcagggactccatcctccagccccagccccacgactgctggccctctcctgataccattcaccctcaacttcaccatcaccaacctgcagtatggggaggacatgggtcaccctggctccaggaagttcaacaccacagagagggtcctgcagggtctgcttggtcccatattcaagaacaccagtgttggccctctgtactctggctgcagactgacctctctcaggtctgagaaggatggagcagccactggagtggatgccatctgcatccatcatcttgaccccaaaagccctggactcaacagagagcggctgtactgggagctgagccaactgaccaatggcatcaaagagctgggcccctacaccctggacaggaacagtctctatgtcaatggtttcacccatcggacctctgtgcccaccaccagcactcctgggacctccacagtggaccttggaacctcagggactccattctccctcccaagccccgcaactgctggccctctcctggtgctgttcaccctcaacttcaccatcaccaacctgaagtatgaggaggacatgcatcgccctggctccaggaagttcaacaccactgagagggtcctgcagactctgcttggtcctatgttcaagaacaccagtgttggccttctgtactctggctgcagactgaccttgctcaggtccgagaaggatggagcagccactggagtggatgccatctgcacccaccgtcttgaccccaaaagccctggactgnacagngagcngctntactgggagctnagccanctgaccaannncatcnnngagctgggnccctacaccctggacaggnacagtctctatgtcaatggtttcacccatcnganctctgngcccaccaccagcactcctgggacctccacagtgnacntnggnacctcngggactccatcctccntccccngccncacancnnctgnccctctcctgntnccnttcaccntcaacttnaccatcaccaacctgcantangnggannacatgcnncncccnggntccaggaagttcaacaccacngagagagtccttcagggtctgctcaggcctgtgttcaagaacaccagtgttggccctctgtactctggctgcagactgaccttgctcaggcccaagaaggatggggcagccaccaaagtggatgccatctgcacctaccgccctgatcccaaaagccctggactggacagagagcagctatactgggagctgagccagctaacccacagcatcactgagctgggcccctacacccaggacagggacagtctctatgtcaatggcttcacccatcggagctctgtgccaaccaccagtattcctgggacctctgcagtgcacctggaaaccactgggactccatcctccttccccggccacacagagcctggccctctcctgataccattcactttcaactttaccatcaccaacctgcgttatgaggaaaacatgcaacaccctggttccaggaagttcaacaccacggagagggttctgcagggtctgctcacgcccttgttcaagaacaccagtgttggccctctgtactctggctgcagactgaccttgctcagacctgagaagcaggaggcagccactggagtggacaccatctgtacccaccgcgttgatcccatcggacctggactggacagagagcggctatactgggagctgagccagctgaccaacagcatcacagagctgggaccctacaccctggatagggacagtctctatgtcgatggcttcaacccttggagctctgtgccaaccaccagcactcctgggacctccacagtgcacctggcaacctctgggactccatcccccctgcctggccacacagcccctgtccctctcttgataccattcaccctcaactttaccatcaccgacctgcattatgaagaaaacatgcaacaccctggttccaggaagttcaacaccacggagagggttctgcagggtctgctcaagcccttgttcaagagcaccagcgttggccctctgtactctggctgcagactgaccttgctcagacctgagaaacatggggcagccactggagtggacgccatctgcaccctccgccttgatcccactggtcctggactggacagagagcggctatactgggagctgagccagctgaccaacagcatcacagagctgggaccctacaccctggatagggacagtctctatgtcaatggcttcaacccttggagctctgtgccaaccaccagcactcctgggacctccacagtgcacctggcaacctctgggactccatcctccctgcctggccacacaactgctggccctctcctggtgccgttcaccctcaacttcaccatcaccaacctgaagtacgaggaggacatgcattgccctggctccaggaagttcaacaccacagagagagtcctgcagagtctgcatggtcccatgttcaagaacaccagtgttggccctctgtactctggctgcagactgaccttgctcaggtccgagaaggatggagcagccactggagtggatgccatctgcacccaccgtcttgaccccaaaagccctggactgnacagngagcngctntactgggagctnagccanctgaccaannncatcnnngagctgggnccctacaccctggacaggnacagtctctatgtcaatggtttcacccatcnganctctgngcccaccaccagcactcctgggacctccacagtgnacntnggnacctcngggactccatcctccntccccngccncacancnnctgnccctctcctgntnccnttcaccntcaacttnaccatcaccaacctgcantangnggannacatgcnncncccnggntccaggaagttcaacaccacngagngngtnctgcagggtctgctnnnncccntnttcaagaacnccagtgtnggccntctgtactctggctgcagactgacctnnctcaggncngagaagnatggngcagccactggantggatgccatctgcanccaccnncntnancccaaaagncctggactgnacagngagcngctntactgggagctnagccanctgaccaacagcatcacagagctgggaccctacaccctggatagggacagtctctatgtcaatggtttcacccatcgaagctctatgcccaccaccagtattcctgggacctctgcagtgcacctggaaacctctgggactccagcctccctccctggccacacagcccctggccctctcctggtgccattcaccctcaacttcactatcaccaacctgcagtatgaggaggacatgcgtcaccctggttccaggaagttcaacaccacggagagagtcctgcagggtctgctcaagcccttgttcaagagcaccagtgttggccctctgtactctggctgcagactgaccttgctcaggcctgaaaaacgtggggcagccaccggcgtggacaccatctgcactcaccgccttgaccctctaaaccctggactgnacagngagcngctntactgggagctnagccanctgaccaannncatcnnngagctgggnccctacaccctggacaggnacagtctctatgtcaatggtttcacccatcnganctctgngcccaccaccagcactcctgggacctccacagtgnacntnggnacctcngggactccatcctccntccccngccncacancnnctgnccctctcctgntnccnttcaccntcaacttnaccatcaccaacctgcantangnggannacatgcnncncccnggntccaggaagttcaacaccacngagngngtnctgcagggtctgctnnnncccntnttcaagaacnccagtgtnggccntctgtactctggctgcagactgacctnnctcaggncngagaagnatggngcagccactggantggatgccatctgcanccaccnncntnancccaaaagncctggactgnacagngagcngctntactgggagctnagccanctgaccaannncatcnnngagctgggnccctacaccctggacaggnacagtctctatgtcaatggttttcaccctcggagctctgtgccaaccaccagcactcctgggacctccacagtgcacctggcaacctctgggactccatcctccctgcctggccacacagcccctgtccctctcttgataccattcaccctcaactttaccatcaccaacctgcattatgaagaaaacatgcaacaccctggttccaggaagttcaacaccacggagcgggtcctgcagggtctgcttggtcccatgttcaagaacacaagtgtcggccttctgtactctggctgcagactgaccttgctcaggcctgagaagaatggggcagccactggaatggatgccatctgcagccaccgtcttgaccccaaaagccctggactgnacagngagcngctntactgggagctnagccanctgaccaannncatcnnngagctgggnccctacaccctggacaggnacagtctctatgtcaatggtttcacccatcnganctctgngcccaccaccagcactcctgggacctccacagtgnacntnggnacctcngggactccatcctccntccccngccncacancnnctgnccctctcctgntnccnttcaccntcaacttnaccatcaccaacctgcantangnggannacatgcnncncccnggntccaggaagttcaacaccacngagngngtnctgcagggtctgctnnnncccntnttcaagaacnccagtgtnggccntctgtactctggctgcagactgacctnnctcaggncngagaagnatggngcagccactggantggatgccatctgcanccaccnncntnancccaaaagncctggactgnacagngagcngctntactgggagctnagccanctgaccaannncatcnnngagctgggnccctacaccctggacaggnacagtctctatgtcaatggtttcacccatcagaactctgtgcccaccaccagtactcctgggacctccacagtgtactgggcaaccactgggactccatcctccttccccggccacacagagcctggccctctcctgataccattcactttcaactttaccatcaccaacctgcattatgaggaaaacatgcaacaccctggttccaggaagttcaacaccacggagagggttctgcagggtctgctcacgcccttgttcaagaacaccagtgttggccctctgtactctggctgcagactgaccttgctcagacctgagaagcaggaggcagccactggagtggacaccatctgtacccaccgcgttgatcccatcggacctggactgnacagngagcngctntactgggagctnagccanctgaccaannncatcnnngagctgggnccctacaccctggacaggnacagtctctatgtcaatggtttcacccatcnganctctgngcccaccaccagcactcctgggacctccacagtgnacntnggnacctcngggactccatcctccntccccngccncacancnnctgnccctctcctgntnccnttcaccntcaacttnaccatcaccaacctgcantangnggannacatgcnncncccnggntccaggaagttcaacaccacngagngngtnctgcagggtctgctnnnncccntnttcaagaacnccagtgtnggccntctgtactctggctgcagactgacctnnctcaggncngagaagnatggngcagccactggantggatgccatctgcanccaccnncntnancccaaaagncctggactgnacagngagcngctntactgggagctnagccanctgaccaannncatcnnngagctgggnccctacaccctggacaggnacagtctctatgtcaatggtttcacccatcggagctctgtgccaaccaccagcagtcctgggacctccacagtgcacctggcaacctctgggactccatcctccctgcctggccacacagcccctgtccctctcttgataccattcaccctcaactttaccatcaccaacctgcattatgaagaaaacatgcaacaccctggttccaggaagttcaacaccacggagagggttctgcagggtctgctcaagcccttgttcaagagcaccagtgttggccctctgtactctggctgcagactgaccttgctcagacctgagaaacatggggcagccactggagtggacgccatctgcaccctccgccttgatcccactggtcctggactgnacagngagcngctntactgggagctnagccanctgaccaannncatcnnngagctgggnccctacaccctggacaggnacagtctctatgtcaatggtttcacccatcnganctctgngcccaccaccagcactcctgggacctccacagtgnacntnggnacctcngggactccatcctccntccccngccncacancnnctgnccctctcctgntnccnttcaccntcaacttnaccatcaccaacctgcantangnggannacatgcnncncccnggntccaggaagttcaacaccacngagngngtnctgcagggtctgctnnnncccntnttcaagaacnccagtgtnggccntctgtactctggctgcagactgacctnnctcaggncngagaagnatggngcagccactggantggatgccatctgcanccaccnncntnancccaaaagncctggactgnacagngagcngctntactgggagctnagccanctgaccaannncatcnnngagctgggnccctacaccctggacaggnacagtctctatgtcaatggtttcacccatcggacctctgtgcccaccaccagcactcctgggacctccacagtgcacctggcaacctctgggactccatcctccctgcctggccacacagcccctgtccctctcttgataccattcaccctcaactttaccatcaccaacctgcagtatgaggaggacatgcatcgccctggatctaggaagttcaacaccacagagagggtcctgcagggtctgcttagtcccattttcaagaactccagtgttggccctctgtactctggctgcagactgacctctctcaggcccgagaaggatggggcagcaactggaatggatgctgtctgcctctaccaccctaatcccaaaagacctgggctggacagagagcagctgtactgcgagctaagccagctgacccacaacatcactgagctgggcccctacagcctggacagggacagtctctatgtcaatggtttcacccatcagaactctgtgcccaccaccagtactcctgggacctccacagtgtactgggcaaccactgggactccatcctccttccccggccacacancnnctgnccctctcctgntnccnttcaccntcaacttnaccatcaccaacctgcantangnggannacatgcnncncccnggntccaggaagttcaacaccacngagngngtnctgcagggtctgctnnnncccntnttcaagaacnccagtgtnggccntctgtactctggctgcagactgacctnnctcaggncngagaagnatggngcagccactggantggatgccatctgcanccaccnncntnancccaaaagncctggactgnacagngagcngctntactgggagctnagccanctgaccaannncatcnnngagctgggnccctacaccctggacaggnacagtctctatgtcaatggtttcacccattggagctctgggctcaccaccagcactccttggacttccacagttgaccttggaacctcagggactccatcccccgtccccagccccacaactgctggccctctcctggtgccattcaccctaaacttcaccatcaccaacctgcagtatgaggaggacatgcatcgccctggatctaggaagttcaacgccacagagagggtcctgcagggtctgcttagtcccatattcaagaacaccagtgttggccctctgtactctggctgcagactgaccttgctcagacctgagaagcaggaggcagccactggagtggacaccatctgtacccaccgcgttgatcccatcggacctggactgnacagngagcngctntactgggagctnagccanctgaccaannncatcnnngagctgggnccctacaccctggacaggnacagtctctatgtcaatggtttcacccatcnganctctgngcccaccaccagcactcctgggacctccacagtgnacntnggnacctcngggactccatcctccntccccngccncacancnnctgnccctctcctgntnccnttcaccntcaacttnaccatcaccaacctgcantangnggannacatgcnncncccnggntccaggaagttcaacaccacngagngngtnctgcagggtctgctnnnncccntnttcaagaacnccagtgtnggccntctgtactctggctgcagactgacctnnctcaggncngagaagnatggngcagccactggantggatgccatctgcanccaccnncntnancccaaaagncctggactgnacagngagcngctntactgggagctnagccanctgaccaannncatcnnngagctgggnccctacaccctggacaggnacagtctctatgtcaatggtttcacccatcggagctttgggctcaccaccagcactccttggacttccacagttgaccttggaacctcagggactccatcccccgtccccagccccacaactgctggccctctcctggtgccattcaccctaaacttcaccatcaccaacctgcagtatgaggaggacatgcatcgccctggctccaggaagttcaacaccacggagagggtccttcagggtctgcttacgcccttgttcaggaacaccagtgtcagctctctgtactctggttgcagactgaccttgctcaggcctgagaaggatggggcagccaccagagtggatgctgtctgcacccatcgtcctgaccccaaaagccctggactgnacagngagcngctntactgggagctnagccanctgaccaannncatcnnngagctgggnccctacaccctggacaggnacagtctctatgtcaatggtttcacccatcnganctctgngcccaccaccagcactcctgggacctccacagtgnacntnggnacctcngggactccatcctccntccccngccncacancnnctgnccctctcctgntnccnttcaccntcaacttnaccatcaccaacctgcantangnggannacatgcnncncccnggntccaggaagttcaacaccacngagngngtnctgcagggtctgctnnnncccntnttcaagaacnccagtgtnggccntctgtactctggctgcagactgacctnnctcaggncngagaagnatggngcagccactggantggatgccatctgcanccaccnncntnancccaaaagncctggactgnacagngagcngctntactgggagctnagccanctgaccaannncatcnnngagctgggnccctacaccctggacaggnacagtctctatgtcaatggtttcacccattggatccctgtgcccaccagcagcactcctgggacctccacagtggaccttgggtcagggactccatcctccctccccagccccacaactgctggccctctcctggtaccattcaccctcaacttcaccatcaccaacctgcagtatggggaggacatgggtcaccctggctccaggaagttcaacaccacagagagggtcctgcagggtctgcttggtcccatattcaagaacaccagtgttggccctctgtactctggctgcagactgacctctctcaggtccgagaaggatggagcagccactggagtggatgccatctgcatccatcatcttgaccccaaaagccctggactgnacagngagcngctntactgggagctnagccanctgaccaannncatcnnngagctgggnccctacaccctggacaggnacagtctctatgtcaatggtttcacccatcnganctctgngcccaccaccagcactcctgggacctccacagtgnacntnggnacctcngggactccatcctccntccccngccncacancnnctgnccctctcctgntnccnttcaccntcaacttnaccatcaccaacctgcantangnggannacatgcnncncccnggntccaggaagttcaacaccacngagngngtnctgcagggtctgctnnnncccntnttcaagaacnccagtgtnggccntctgtactctggctgcagactgacctnnctcaggncngagaagnatggngcagccactggantggatgccatctgcanccaccnncntnancccaaaagncctggactgnacagngagcngctntactgggagctnagccanctgaccaannncatcnnngagctgggnccctacaccctggacaggnacagtctctatgtcaatggtttcacccatcagacctttgcgcccaacaccagcactcctgggacctccacagtggaccttgggacctcagggactccatcctccctccccagccctacatctgctggccctctcctggtgccattcaccctcaacttcaccatcaccaacctgcagtacgaggaggacatgcatcacccaggctccaggaagttcaacaccacggagcgggtcctgcagggtctgcttggtcccatgttcaagaacaccagtgtcggccttctgtactctggctgcagactgaccttgctcaggcctgagaagaatggggcagccaccagagtggatgctgtctgcacccatcgtcctgaccccaaaagccctggactgnacagngagcngctntactgggagctnagccanctgaccaannncatcnnngagctgggnccctacaccctggacaggnacagtctctatgtcaatggtttcacccatcnganctctgngcccaccaccagcactcctgggacctccacagtgnacntnggnacctcngggactccatcctccntccccngccncacagcccctgtccctctcttgataccattcaccctcaactttaccatcaccaacctgcattatgaagaaaacatgcaacaccctggttccaggaagttcaacaccacggagagggttctgcagggtctgctcaagcccttgttcaagagcaccagcgttggccctctgtactctggctgcagactgaccttgctcagacctgagaaacatggggcagccactggagtggacgccatctgcaccctccgccttgatcccactggtcctggactggacagagagcggctatactgggagctgagccagctgaccaacagcgttacagagctgggcccctacaccctggacagggacagtctctatgtcaatggcttcacccagcggagctctgtgccaaccaccagtattcctgggacctctgcagtgcacctggaaacctctgggactccagcctccctccctggccacacagcccctggccctctcctggtgccattcaccctcaacttcactatcaccaacctgcagtatgaggtggacatgcgtcaccctggttccaggaagttcaacaccacggagagagtcctgcagggtctgctcaagcccttgttcaagagcaccagtgttggccctctgtactctggctgcagactgaccttgctcaggcctgaaaaacgtggggcagccaccggcgtggacaccatctgcactcaccgccttgaccctctaaaccctggactggacagagagcagctatactgggagctgagcaaactgacccgtggcatcatcgagctgggcccctacctcctggacagaggcagtctctatgtcaatggtttcacccatcggaactttgtgcccatcaccagcactcctgggacctccacagtacacctaggaacctctgaaactccatcctccctacctagacccatagtgcctggccctctcctggtgccattcaccctcaacttcaccatcaccaacttgcagtatgaggaggccatgcgacaccctggctccaggaagttcaataccacggagagggtcctacagggtctgctcaggcccttgttcaagaataccagtatcggccctctgtactccagctgcagactgaccttgctcaggccagagaaggacaaggcagccaccagagtggatgccatctgtacccaccaccctgaccctcaaagccctggactgaacagagagcagctgtactgggagctgagccagctgacccacggcatcactgagctgggcccctacaccctggacagggacagtctctatgtcgatggtttcactcattggagccccataccgaccaccagcactcctgggacctccatagtgaacctgggaacctctgggatcccaccttccctccctgaaactacancnnctgnccctctcctgntnccnttcaccntcaacttnaccatcaccaacctgcantangnggannacatgcnncncccnggntccaggaagttcaacaccacngagagggttctgcagggtctgctcaagcccttgttcaagagcaccagtgttggccctctgtattctggctgcagactgaccttgctcaggcctgagaaggacggagtagccaccagagtggacgccatctgcacccaccgccctgaccccaaaatccctgggctagacagacagcagctatactgggagctgagccagctgacccacagcatcactgagctgggaccctacaccctggatagggacagtctctatgtcaatggtttcacccagcggagctctgtgcccaccaccagcactcctgggactttcacagtacagccggaaacctctgagactccatcatccctccctggccccacagccactggccctgtcctgctgccattcaccctcaattttaccatcactaacctgcagtatgaggaggacatgcatcgccctggctccaggaagttcaacaccacggagagggtccttcagggtctgcttatgcccttgttcaagaacaccagtgtcagctctctgtactctggttgcagactgaccttgctcaggcctgagaaggatggggcagccaccagagtggatgctgtctgcacccatcgtcctgaccccaaaagccctggactggacagagagcggctgtactggaagctgagccagctgacccacggcatcactgagctgggcccctacaccctggacaggcacagtctctatgtcaatggtttcacccatcagagctctatgacgaccaccagaactcctgatacctccacaatgcacctggcaacctcgagaactccagcctccctgtctggacctacgaccgccagccctctcctggtgctattcacaattaacttcaccatcactaacctgcggtatgaggagaacatgcatcaccctggctctagaaagtttaacaccacggagagagtccttcagggtctgctcaggcctgtgttcaagaacaccagtgttggccctctgtactctggctgcagactgaccttgctcaggcccaagaaggatggggcagccaccaaagtggatgccatctgcacctaccgccctgatcccaaaagccctggactggacagagagcagctatactgggagctgagccagctaacccacagcatcactgagctgggcccctacaccctggacagggacagtctctatgtcaatggtttcacacagcggagctctgtgcccaccactagcattcctgggacccccacagtggacctgggaacatctgggactccagtttctaaacctggtccctcggctgccagccctctcctggtgctattcactctcaacttcaccatcaccaacctgcggtatgaggagaacatgcagcaccctggctccaggaagttcaacaccacggagagggtccttcagggcctgctcaggtccctgttcaagagcaccagtgttggccctctgtactctggctgcagactgactttgctcaggcctgaaaaggatgggacagccactggagtggatgccatctgcacccaccaccctgaccccaaaagccctaggctggacagagagcagctgtattgggagctgagccagctgacccacaatatcactgagctgggccactatgccctggacaacgacagcctctttgtcaatggtttcactcatcggagctctgtgtccaccaccagcactcctgggacccccacagtgtatctgggagcatctaagactccagcctcgatatttggcccttcagctgccagccatctcctgatactattcaccctcaacttcaccatcactaacctgcggtatgaggagaacatgtggcctggctccaggaagttcaacactacagagagggtccttcagggcctgctaaggcccttgttcaagaacaccagtgttggccctctgtactctggctccaggctgaccttgctcaggccagagaaagatggggaagccaccggagtggatgccatctgcacccaccgccctgaccccacaggccctgggctggacagagagcagctgtatttggagctgagccagctgacccacagcatcactgagctgggcccctacacactggacagggacagtctctatgtcaatggtttcacccatcggagctctgtacccaccaccagcaccggggtggtcagcgaggagccattcacactgaacttcaccatcaacaacctgcgctacatggcggacatgggccaacccggctccctcaagttcaacatcacagacaacgtcatgaagcacctgctcagtcctttgttccagaggagcagcctgggtgcacggtacacaggctgcagggtcatcgcactaaggtctgtgaagaacggtgctgagacacgggtggacctcctctgcacctacctgcagcccctcagcggcccaggtctgcctatcaagcaggtgttccatgagctgagccagcagacccatggcatcacccggctgggcccctactctctggacaaagacagcctctaccttaacggttacaatgaacctggtctagatgagcctcctacaactcccaagccagccaccacattcctgcctcctctgtcagaagccacaacagccatggggtaccacctgaagaccctcacactcaacttcaccatctccaatctccagtattcaccagatatgggcaagggctcagctacattcaactccaccgagggggtccttcagcacctgctcagacccttgttccagaagagcagcatgggccccttctacttgggttgccactgatctccctcaggcctgagaaggatggggcagccactggtgtggacaccacctgcacctaccaccctgaccctgtgggccccgggctggacatacagcagctttactgggagctgagtcagctgacccatggtgtcacccaactgggcttctatgtcctggacagggatagcctcttcatcaatggctatgcaccccagaatttatcaatccggggcgagtaccagataaatttccacattgtcaactggaacctcagtaatccagaccccacatcctcagagtacatcaccctgctgagggacatccaggacaaggtcaccacactctacaaaggcagtcaactacatgacacattccgcttctgcctggtcaccaacttgacgatggactccgtgttggtcactgtcaaggcattgttctcctccaatttggaccccagcctggtggagcaagtctttctagataagaccctgaatgcctcattccattggctgggctccacctaccagttggtggacatccatgtgacagaaatggagtcatcagtttatcaaccaacaagcagctccagcacccagcacttctacctgaatttcaccatcaccaacctaccatattcccaggacaaagcccagccaggcaccaccaattaccagaggaacaaaaggaatattgaggatgcgctcaaccaactcttccgaaacagcagcatcaagagttatttttctgactgtcaagtttcaacattcaggtctgtccccaacaggcaccacaccggggtggactccctgtgtaacttctcgccactggctcggagagtagacagagttgccatctatgaggaatttctgcggatgacccggaatggtacccagctgcagaacttcaccctggacaggagcagtgtccttgtggatgggtattctcccaacagaaatgagcccttaactgggaattctgaccttcccttctgggctgtcatcctcatcggcttggcaggactcctgggactcatcacatgcctgatctgcggtgtcctggtgaccacccgccggcggaagaaggaaggagaatacaacgtccagcaacagtgcccaggctactaccagtcacacctagacctggaggatctgcaatgactggaacttgccggtgcctggggtgcctttcccccagccagggtccaaagaagcttggctggggcagaaataaaccatattggtcggaaaaaaaaaaaaaaa

SEQ ID NO: 3193 - DNA, 2880 bp, Homo sapiens; identical to SEQ ID NO: 114

SEQ ID NO: 3194 - DNA, 2733 bp, Homo sapiens; identical to SEQ ID NO: 158

SEQ ID NO: 3195 - DNA, 5624 bp, Homo sapiens; identical to SEQ ID NO: 1418

SEQ ID NO: 3196 - DNA, 2992 bp, Homo sapiens
ggggtgctagaagtcggaccggaagtggaagtggtccccgaaggctatttcgccgctggcgtcaggactattttcacgttttaatgccgagaggtctctgtgacgattttggttcttgggtgtctctggggagtccctgggccagaccttcctccagactccagcccacctcttcagagcagctctgctgagttcacagatgaccactaaacttcaggcaccctagacaaaaagggttgagatccagtgtggccatgccagctagttggacctcaccccagaaatcctcagccctggctccagaggatcatggcagctcctatgagggatcagtgtccttcagggatgtggctatcgatttcagcagagaggaatggcggcacctggacctttctcagagaaacctgtaccgggatgtgatgctggagacctacagccacctgctctcagtagggtatcaagttcctaaaccagaggtggtcatgttggagcaaggaaaggaaccatgggcactgcagggtgagaggccacgtcacagctgcccaggagagaaattatgggaccataatcaacatagaaaaatcatcggttataaaccagcttcctctcaagatcaaaaaatttattctggggaaaaatcctatgagtgtgctgaatttggaaagagcttcacctggaagtcacagttcaaggtacatctgaaagttcctacaggagaaaaactctatgtatgtattgaatgtgggagggcttttgtacagaagccagaattcatcacacatcagaaaacccatatgagagagaagccccctaagtgcaatgaatgtggaaaatccttttttcaagtatcgtctcttttcaggcatcacagaattcataccggagaaaaactatatgaatgtagtgaatgtgggaaaggtttcccttataactcagatctcagtatacatgagaaaattcatactggagagagacaccatgaatgcactgactgtggcaaagcgttcacacaaaagtccacactcaagattcatcagaaaatccatacaggcgagagatcctacatctgtattgaatgcgggcaggccttcatccagaaaacacaattgattgcacaccgaagaattcatagtggagaaaaaccatatgaatgcaataactgtggcaaatccttcatttccaagtcacaacttcaggtacatcaacgtgttcacacaagagtgaagccctatatatgtaccgaatatgggaaggtcttcagcaataattccaacctcattacacatgagaagattcaaagtagagagaaatcttccatatgtactgagtgtgggaaggcctttacctacaggtcagagttgattattcatcagagaattcacactggagagaaaccttatgaatgcagtgactgtgggagagccttcactcagaagtcagcactcacagtgcatcagagaattcatacaggagaaaaatcgtatatatgcatgaaatgtggactggccttcatccggaaggcacacttgattacacatcaaataattcatactggagagaaaccttataaatgtggtcactgtgggaaattgtttacttccaagtcacaactccatgttcataaacgaattcacacaggagaaaagccctatgtatgcaataaatgtgggaaggcattcaccaaccggtcaaatctcattacacatcagaaaactcatacaggagagaaatcttatatatgttccaaatgtggaaaggccttcacccagaggtcagacttgattacacatcagagaatccatactggggagaagccttatgaatgcaatacttgtggaaaagcctttactcagaagtcaaatcttaatatacatcagaaaattcacactggagagagacagtatgaatgccacgaatgtgggaaagccttcaaccagaaatcaatactcattgttcatcagaaaattcatacaggagagaaaccctatgtatgcactgagtgtggaagagctttcatccgcaagtcaaactttattactcatcaaagaattcatactggagagaagccttatgaatgcagtgactgtgggaagtcctttacctccaagtctcagctcctggtgcatcagccagttcacacaggagagaaaccctatgtgtgtgccgagtgtgggaaagcctttagtggcaggtcaaatctcagtaagcaccagaaaactcataccggagaaaagccctacatttgttctgaatgtgggaagacctttcgacagaagtcagagttgattacacatcacagaattcatactggagagaaaccttatgagtgcagtgactgtgggaagtctttcactaaaaaatcacagctccaagtgcatcagcgaattcacactggagagaagccttacgtgtgtgctgagtgtgggaaggcctttagcaacaggtccaatttgaataaacatcagacaacacacactggagacaaaccctacaagtgtggcatctgtgggaaaggcttcgttcagaaatcagtgttcagtgttcatcagagcagccacgcttgagagaaacagtgtgagaaaacccccctgagggttgggtctgattgtacactgttgcacgcatgcagcagaaaaatatgtatattattgtaaatagaaatgaccacatcagaatgtcacacatggctgttctggagagggcctctgagaaggcactgaatgaggcgagggacccttcctacattgtcaccatccccagtaaaccttgggtcattattcatactgacaaggaaccgagtcaatttggtgaataggaaaagccttctcatgaaaactacaatagaatactgttaccaaattcttcataagaaagatcatattatgggaatgataatcctgtttactgtggattaggtatagtgccaacagtttgaatggtaagacaacataatatatatgatagtgatgaaaaaaaaaaaaaaaaaaaaaaa

SEQ ID NO: 3197 - DNA, 4069 bp, Homo sapiens
ggcagagcgcggcgcggggccggcggcgaaggtccggggtggaatcgacgtcgctgcggctgccgacgacccacacccggccggccgcctccgcagacccaccttggccgcgcggcagggggcgcgcagagccccgagggagcgagtccccgcgcgtggcagctcggcggcttctcccttcgggaggtccggctcccggctctccggacccgcctggcgtcctcgcctgcggcggggcggacgacagcggcgcacaggaatggcttcggcgggcagcggcatggaggaggtgcgcgtgtcggtgctgacccccttgaagctggtcgggctggtgtgcatcttcctggcgctgtgtctggacctgggggcggtgctgagcccggcctgggtcacagctgaccaccagtactacctgtcgttgtgggagtcctgccgcaaacccgccagcttggacatctggcactgcgagtccacgctcagcagcgattggcagattgctactctggctttactcctgggcggcgctgccatcattctcattgcattcctggtgggtttgatttctatctgcgtgggatctcgaaggcgtttctatagacctgttgcggtcatgctttttgcagcagttgttttacaggtttgcagcctggtcctttacccaatcaagttcattgaaactgtgagcttgaaaatttaccatgagttcaactggggttatggcctggcctggggtgcaactatattttcgtttgggggtgccatcctttattgcctgaaccctaagaactatgaagactactactagaaccaatagtctcaaagtaaaaacaaccaccaccatccaacaaaaggattacgtctgcatcttttctaacttactattttctaaaacacttgtggagcatcaagcagtttgctcagttgatttaatcttttttgccttttggctgtcaatatcataaccagcttttacatccattttagaaatctgcacaaattaagagagctgattagacataggcaaatgctgcaaacttccaatatgttcatatcgtttttcttgacaaatgaagggtctatatgacagcaaccattgtgagaaactagttggaatgagatttgcctcaatctcctattgcctgcaggggagcagttggcataagcaacatttagaagttcctttgcgctgacaaggattccactgttagagcccttaccgcctgcttatcctacccaatgactacattggctgttggttatttgcttgagtgagcccttgaaaaatgaactgcccttcagcatctaatgggagttgtgaatgtaactggttaatgatacacattccaccttcaggaacactctttttaatgggaggttatgctttggcaatcagcgtctccctgggaagagagtcaagacttggagacatgtgcttctcattatgtggttagaaattggtgcctcagccctatctagactggggaaaaattgaggatctctgtttttcctggggcaaacagaaagaaatctgcatgagttgcttttgtaccctttaaatcatttgccaaacattgcagcaaacaagtgtgcgtatgtaacaagcttcactgtttttatagaaggtgaaccattagtataaatggtaataagttgttccctaaccctccacatacatttgcctatcacacgtaaaattaatatttactctagtgaagtggtttgagcactaaccttgtacacattgttaagaggcttagattggtattcatacttatttaccatacaaaagtatggtaccttaaagcttttgctctatgttctttactgtttcactggaaagtgtcaatagagttgcctaagaataaaaattgaaatggtgttaatctgaaaattaatgattctctgtaagcactgtagttgaaaagagagtagcaattaggatgatcattttgtgtaaaattcattaaaatagaaggctgctattttttgcaagtattttaaatgtcttcatttttttaagaaaggaatagcgatagatttatataaatatctaaatgtctcagtagaggagtagaattcatctggttatcacctggtcctctgaagttaactgatgggctaaccgatttgtgcacacacttaggatggatttatgttaagggaattacttactgactgttcaatggaaggaagtattaataatagggaataagtttgcaactaatctcatgctgcaaacttgtgttaattctgtttaatatacaaatttggatagcttaattataaacatatttttatatcaaatatacagttctaatataaaagttataaataattatttttgttaacaaagacactaaaacagtatgttctggttttggccctcttgcagaaagaagcattagaaaaattactttaaaagtagctatatgttactgtattgcaaaatctgttaagagcaggaccacatcgatagtatttaataatttgttttacctcccaaaacacagttcttctttcagcttgtcttaagaatggttgccaaaaacaacagccaaaaaaaaaaaacctattttattatccaaatgctagaaaacacacatgaattttctataaaatcacgaatatgaagtaccaggtttagtcttactttagcaatgatagacaaaagcgaataaatacatcacagacagaaacctttataaaaatatatgattctataaagaatcattagaaattatgagtggaaattctccagaaagatagtattatagagtcttttgaagcaattttttgagaaatagtaaaatctggggcagagtgtcttgcagttaattgcatattgtcagagcagcatgagaaatatgatatttggatagggatttcagcaactaaacattctctgttctgagatctctttattcctgaataatgaaagaatagtactttggtgctgacaccaatgaggcacttctcttggtcctagtagaggatgcagtgtactgttaaaccaatatcatcacatctcgagtcttatcaagttttcattctctgtcaatatgacaagctcaaagtgacagaatatgttataggttgaagcacacatatttgcagtttactgaaaagtagatttcttatgtgactttttttcccttctcagcaaagagccctacactagatttctaccatcactaatatttggaagtatttcattactaacaatctcagtacaacatgaaaattgttgcttctcatctaaaatacaattttgtctatcagaataaacacaagtgaaattttcacctacattaacattatgtctttgcagctttaggtttgttagatgtgttcttaagcataatttttagccacaaacccattgttagatagatatctatggatatagatctacatctatagatatagatatacacacatatatatactcacacacatatagcataaaatactcagcagggctagttattccgatttcttgcacaattatttagctttttgtaagttcaacatgtaaattttaaagacataaatatagagagacttatgtgtttgaatataaatgatatatatggattagcatgtacctgtatattattaaacatgcaatgaactgactggtaagtgacgtctaattgtatggctagcaatgtaatttattcagactgtatttttgtacagagcagtgcactctaacctatgcctctgtgtcctctttaatgcctaaagctgtgcctagaaatttcatctgtcttaaaagtaaaatatacttcatgctgtttatgctattagtttctgtactgctattctatatttattatttttaaatatatgacatgtttactacttaaacatgaattcatggtatcctggttattttttttaagtcatctgggggaaaacctgtttatcactccagtgattttgagtttgcagtttcacaatcagttcttcatttcatgatttttgtagttgacatgaagtcatctatgtggaaaaaaataaaaataaaagtgatttcacggatgtggttcgaaaaaaaaaaaaaaaa

SEQ ID NO: 3198 - DNA, 2672 bp, Homo sapiens
gaaacctggcgtactggctgtggcttctctagcgggactcggcatgaggctggcgcggctgcttcgcggagccgccttggccggcccgggcccggggctgcgcgccgccggcttcagccgcagcttcagctcggactcgggctccagcccggcgtccgagcgcggcgttccgggccaggtggacttctacgcgcgcttctcgccgtccccgctctccatgaagcagttcctggacttcggatcagtgaatgcttgtgaaaagacctcatttatgtttctgcggcaagagttgcctgtcagactggcaaatataatgaaagaaataagtctccttccagataatcttctcaggacaccatccgttcaattggtacaaagctggtatatccagagtcttcaggagcttcttgattttaaggacaaaagtgctgaggatgctaaagctatttatgactttacagatactgtgatacggatcagaaaccgacacaatgatgtcattcccacaatggcccagggtgtgattgaatacaaggagagctttggggtggatcctgtcaccagccagaatgttcagtactttttggatcgattctacatgagtcgcatttcaattagaatgttactcaatcagcactctttattgtttggtggaaaaggcaaaggaagtccatctcatcgaaaacacattggaagcataaatccaaactgcaatgtacttgaagttattaaagatggctatgaaaatgctaggcgtctgtgtgatttgtattatattaactctcccgaactagaacttgaagaactaaatgcaaaatcaccaggacagccaatacaagtggtttatgtaccatcccatctctatcacatggtgtttgaacttttcaagaatgcaatgagagccactatggaacaccatgccaacagaggtgtttacccccctattcaagttcatgtcacgctgggtaatgaggatttgactgtgaagatgagtgaccgaggaggtggcgttcctttgaggaaaattgacagacttttcaactacatgtattcaactgcaccaagacctcgtgttgagacctcccgcgcagtgcctctggctggttttggttatggattgcccatatcacgtctttacgcacaatacttccaaggagacctgaagctgtattccctagagggttacgggacagatgcagttatctacattaaggctctgtcaacagactcaatagaaagactcccagtgtataacaaagctgcctggaagcattacaacaccaaccacgaggctgatgactggtgcgtccccagcagagaacccaaagacatgacgacgttccgcagtgcctagacacacttgggacatcggaaaatccaaatgtggcttttgtattaaatttggaagtgtggcccagagttgctcagaattggagcagagcctgagacgtatctgcagatcctgtcatcagctggcaagtccaggagactgtgtcatttagagactgtgttgttagttatccctcaacatcttctaaggtggcaggaaataatattggaaataacattttaaagtaaaaattttaaagtttaaagaagagttttgccacttaaacaggggagctttgtctggaaaatacactgagttgaaacacttcatccttggaaggattatataagatgaacagttgtgataaatgtgtagattagagggatgtgaatgggcagttagtccagtgccctcatttaagaggccaagatcctgattcagaggaggcatcctttgcccagagctgcttagctaatctgaccaaatgttgggaaaaatgtctcacctaacccactattccttaattatggattttgtgaaaaacaatagaacatgttaatgagtaatttatattagttcgatgtattacaattttttagctttaaattacagttttcttataatgttgaaatgttttagaatcctttgaatctaagtatttgtttcctaaatgaaacatttgtacaacatttgatgtttttacttatgaaatattctcctcccccaagaaaatttaaactttttctctctatttaaaagctaagaaatgttttaaaggaaaaatgaaattatcttcctttagcttatttttaaggtaaaacagctttttactctgttattgtggtaatggacagaatattacatacaaaaatattctgggagagctttttcctagttggttttaaatcattgtgccacctgaaaggtttttagattttataggagctaatttgtccaccagcattaatgtaacacagtgtagttatgaaaatatattgaaggacaggaagtggacacgaagtgatttttgtaacctgagcagttaatgaatgtgccaacattttctaggaagggacagcaagaatattctgctctgtagttaaaatactggctggcttttgatgtcttcatgcttaattgtgatcactttcttgcactgtgatgtttttacgtgaatatgttgaagtagaagtctaccatattattttataaaatgttttctgtatggcaataaactgaaaacatggatcaacccttcttttgaaaaaaaaaaaaaaaaaaaaaaaaaaaaaaaaaaaaaaaaaaaaaaaaaaaaaaaaaaaaaaaaaaaaaaaaaaaaaaa

SEQ ID NO: 3199 - DNA, 1900 bp, Homo sapiens
agaaggtgtggcagtcctcatttctgtggaatctgaagaagcccacgcagattttaattcccactctagattctgtatctagatcaccatggcgactggacagaagttgatgagagctgttagagtttttgaatttggtgggccagaagtcctgaaattgcgatcagatattgcagtaccgattccaaaagaccatcaggttctaatcaaggtccatgcatgtggtgtcaaccccgtggagacatacattcgctctggtacttatagtagaaaaccactcttaccctatactcctggctcagatgtggctggggtgatagaagctgttggagataatgcatctgctttcaagaaaggtgacagagttttcactagcagcacgatctctgggggttatgcagagtatgctcttgcagcagaccacactgtttacaaactacctgaaaaactggactttaaacaaggagctgccatcggcattccatattttactgcttatcgagctctgatccacagtgcctgtgtgaaagctggagagagtgttctggttcatggggcaagtggaggagttggattagcagcatgccaaattgctagagcttatggcttaaagattttgggcactgctggtactgaggaaggacaaaagattgttttgcaaaatggagcccatgaagtgttcaatcacagagaagtgaattacattgataaaattaagaagtatgttggtgagaaaggaattgatataattattgaaatgttagctaatgtaaatcttagtaaagacttgagtcttctgtcacatggaggacgagtgatagttgttggcagcagaggtactattgaaataaacccacgagacaccatggcaaaggagtcgagtataattggagttactctcttttcctcaaccaaggaggaatttcagcaatatgcagcagcccttcaagctggaatggaaattggctggttgaaacctgtgataggttctcaatatccattggagaaggtggccgaggctcatgaaaatatcattcatggtagtggggctactggaaaaatgattcttctcttatgatgattaattctttcatggatttcctatgtaattagaggtactgtctttcccccagttgtacttaccctatcttttctttaattaacattcgattccatgagcttcttatgtgaaaaaataagatttttctttagagagcagaagcagaagagtaaaatttattgtatagctagcaatatttttttatgccatctgtctcaaatcaaagagtcatcatagtaggaaataacatgttagttgtcatttggcatgagtgtgcattccagtaattcttaattgatatttgattaattccatacctttgattaaaacatgctagttcaaaataagactgctcagtttccaagggttttcaagcctacttacctttataaaggttctctagtctctgattagccatgactgtattggactttgaacattttctgaactaaaaacctctattctaaactaatctcatttggatgtgtaagtcttttgtaaaggcaagaataaataatatccaggacaatttattagttttctcagtattttcccaaatattagaatatttacttcattattggttggctgccaatgaccccatatgttctgtgagaatagtagctttatctttgatataatacatagtctccaaataggtaatacttcgcaattgattagattttcagagtagatttagagttatctgtttttctggtgagggtcaaatatttttgttaattaagctcacaaatttgataaattaagaattatctgcatttgtctcgtaacataataatgtgtaataaagtctatagaaaattaaaaaaaaaaaaaaaa

SEQ ID NO: 3200 - DNA, 2310 bp, Homo sapiens; identical to SEQ ID NO: 2787

SEQ ID NO: 3201 - DNA, 2890 bp, Homo sapiens; identical to SEQ ID NO: 75

SEQ ID NO: 3202 - DNA, 2207 bp, Homo sapiens; identical to SEQ ID NO: 566

SEQ ID NO: 3203 - DNA, 1374 bp, Homo sapiens; identical to SEQ ID NO: 542

SEQ ID NO: 3204 - DNA, 1554 bp, Homo sapiens
agaagtttttcctttaactcctgaaagccttcctgttgttgggatccccattccaaagcttcccggtccccgccccctttgtgacctcatacaaaggcttggctaatactgcaaagtttgggatccacagtctacaaaaccccacagctcctaagaattctctcacctgccttctgcccttaggctccggtagattgcaaacgacctgctttcttcctgatcccgggctgcgttcggacccctgtggtatagtaaatcccaagtaaggtacctgcggtcggcagatctgagctttcttcttggacacctaatacccagggtcctccaggccacccttaagtacaatgttctcctacctaagaaggcatctggattttctctttccttggaaatagtaaagaactactctttgactgtttttgacctcacagtgaacctcaaagtcttactttgtcacccaggctgcagtacagtggcacagtggcacaatctcagctcactgcaacttccagctcctgggttcaaaggattcttacggctcagcctcctgagtagctgggattagaggcgtgcaccaccacatctggctaatttttctatttttagtagagtcagagttttgccatattggccaggctggtcttgaactctgaccctcaagtgatccacccaccttggcctccagaagtgctgggattacaggtgtgagcaaccacgccctgatgaactatggaactcttaacttcataccccaatagtcttatccagaagcaggaaactgagctagaagttctcctggggacacatctactctataattatgctcatataccaccttttaagcaaagatgtcctctaagtgttacgcaactctaacactaacctaagtatatgtaaaagatttagaagctctgtttatcagttcaaactttgagactgcagatacactggaattcgcaataaatccagtatggtggttatagatgtaaaaatgctatcaggatttactccaaccatgtcatccattgaagagcttgaaaacaagggccaagtgatgaagactgaagtcaagaatgaccatgttcttttctacttggaaaatgtttttggtcgagcagacagtttcactttttctgctgagcagagcaaccttgtgttcaacattcagccagccccaggcatggtctacgattagtacgaaaaagaagaatatgccctagctttttaccacatcaacagtagttcagtttccgagtgagacaaagcaattactggaagaagtaaagaaattttattacgtcataaaccattgaaaacacatctagtaagaaaatgaaaacctgaataagataggacaatagttgaagaaagaaaagtctctggtggagaagcatttcttttaacaaactgattcttctgtatcaaacctggaaaaaaatcatgaaccatctgacatcgtgaacagtctgcagtgggctatggtttcttgacaagtcttatttccttatcatcccattaaatgttgtcattttgcatctgaaaaaaaaaaaaaaa

SEQ ID NO: 3205 - DNA, 993 bp, Homo sapiens
tttctgtactctgggtgactcagagagggaagagattcagccagcacactcctcgcgagcaagcattactctactgactggcagagacaggagaggtagatgtccacgcccacagaccctggtgcgatgccccacccagggccttcgccggggcctgggccttcccctgggccaattcttgggcctagtccaggaccaggaccatccccaggttccgtccacagcatgatggggccaagtcctggacctccaagtgtctcccatcctatgccgacgatggggtccacagacttcccacaggaaggcatgcatcaaatgcataagcccatcgatggtatacatgacaaggggattgtagaagacatccattgtggatccatgaagggcactggtatgcgaccacctcacccaggcatgggccctccccagagtccaatggatcaacacagccaaggttatatgtcaccacacccatctccattaggagccccagagcacgtctccagccctatgtctggaggaggcccaactccacctcagatgccaccaagccagccgggggccctcatcccaggtgatccgcaggccatgagccagcccaacagaggtccctcacctttcagtcctgtccagctgcatcagcttcgagctcagattttagcttataaaatgctggcccgaggccagcccctccccgaaacgctgcagcttgcagtccaggggaaaaggacgttgcctggcttgcagcaacaacagcagcagcaacagcagcagcagcagcagcagcagcagcagcagcagcagcaacagcagccgcagcagcagccgccgcaaccacagacgcagcaacaacagcagccggcccttgttaactacaacagaccatctggcccggggccggagctgagcggcccgagcaccccgcagaagctgccggtgcccgcgcccggcggccggccctcgcccgcgccccccgcagccgcgcagccgccc

SEQ ID NO: 3206 - DNA, 3811 bp, Homo sapiens
ccacgcgtccgggaaacatggccgagtatacgcggctgcacaacgccttggcgctaatccgcctccgaaacccgccggtcaacgcgatcagtacgactttactccgtgacataaaagaaggactacagaaagctgtaatagaccatacaataaaagccattgtgatttgtggagcagagggcaaattttctgcaggtgctgatattcgtggcttcagtgctcctaggacatttggccttacactgggacatgtagtagatgaaatacagagaaatgagaagcccgtggtggcagcaatccaaggcatggctttcggagggggactagagctggccctgggctgtcactataggattgcccacgcagaggctcaagttggcttaccagaagttacactgggacttctccctggtgcaagaggaacccagcttctccccagactcactggagttcctgctgcacttgacttaattacctcaggaagacgtattttagcagatgaagcactcaagctgggcattctagataaagttgtaaactcagacccggttgaagaagcaatcagatttgctcagagagtttcagatcaacctctagaatcccgtagactctgcaacaagccaattcagagcttgcccaacatggacagcatttttagtgaggccctcttgaagatgcggaggcagcaccctgggtgtcttgcacaggaggcttgtgtccgtgcagtccaggctgctgtgcagtatccctatgaagtgggcatcaagaaggaggaggagctgtttctatatcttttgcaatcagggcaggctagagccctgcaatatgctttcttcgctgaaaggaaagcaaataagtggtcaactccctccggagcatcgtggaaaacagcatcagcgcggcctgtctcctcagttggtgttgttggcttgggaacaatgggccgaggcattgtcatttcttttgcaagggccaggattcctgtgattgctgtagactcggacaaaaaccagctagcaactgcaaacaagatgataacctctgtcttggaaaaagaagcctccaaaatgcaacagagcggccacccttggtcaggaccaaaacccaggttaacttcatctgtgaaggagcttggtggtgtagatttagtcattgaagcagtatttgaggaaatgagcctgaagaagcaggtctttgctgaactctcagctgtgtgcaaaccagaagcatttttgtgcactaatacttcagccctggatgttgatgagattgcttcttccactgatcgtcctcacttggtcattggcacccacttcttttcgccagctcatgtcatgaagttgttagaggttattcccagccaatactcttcccccactaccattgccactgttatgaacttatcaaaaaagattaaaaagattggagtcgttgtaggcaactgttttggatttgtggggaatcgaatgttgaatccttactacaatcaggcatatttcttgttagaagaaggcagcaaaccagaggaggtagatcaggtgctggaagagtttggttttaaaatgggaccttttagagtgtctgatcttgctgggttggatgtgggctggaaatctagaaaggggcaaggtcttactggacctacattgcttccaggaactcctgcccgaaaaaggggtaataggaggtactgcccaattcctgatgtgctctgtgaattaggacgatttggccagaagacaggtaagggttggtatcaatatgacaagccattgggtaggattcacaaacctgatccctggctttccaaattcctatcacggtatagaaaaacccatcacattgaaccacgtaccattagccaggatgagatccttgaacgctgcttatattcacttatcaatgaagcattccgtatcttgggagaagggatagctgctagcccagagcacattgatgttgtctatttacatggatatggatggccaaggcacaagggcgggcccatgttctatgcttccacagttgggttgcccacagttctagagaaattgcagaaatattacaggcagaaccctgatattccccaactggagccaagtgactatctaaaaaaactggcttctcagggaaaccctcccctgaaagaatggcaaagcttggcaggctcccctagcagtaaattgtgattcagtcttccagattatgcctcacatgctagcatcaggtaatgctgactgaatttcagtgaaattaaatcaaaaatccaaagtaagattgttctgaaatacaaagcaaaataaataatcattagaatcttctgtgtaacgactctaatggtcaaatctttaggaatgtgcttcctatgcctctgaatctgtccttatcagataaattcaatgcatgaacttgtgtgaatataataccataatagctaatgaaagaggctcaggcataagttgagattctcaaatgcttttatcattggataaatgtgtcatcaattaataaatgataaatgcagctaagtcatacattcattttgactcctttcaatgtcacacacatagtattgatcagaaatcttatgaatcatacatacactcaacaaacattaaagttgtaggaaaaagacagttggaaattggtaagggaactgagtacttcaaaccagcacagggaacttaggttagtgtggcaagcctttcctcttctggtctttcctcttctgtttatggagaaataatagaaagtagtaagtcgttaacttagtgtaagaagggtcttagagaacatctaaccttctaggatttcccaattctgtgatagagtaatgacaccagttttcctgtcatgacaagcctctgtgatgttacatatggaaatggttgaatcttgaaaaatctaaaattgttgcaaaacatattttgtatgattttgttgtaagagttcttctctttttactttttgccttgtgtagttaaaaattaaggggctggtcaatacaaaaacttgtacacaaatatttatagcagaattattcataatggccaaaagctgaatacaacccaaatgtctatgaactaatgaatagataaaccaaatctggtatatccatacaatggactatattattcagccataaaaagaaataaagggccaggcacagtggctcacacctgtaatcccagcactttgggaggctgaggcaggaggattgtttgaggccagaaatttgagaccagcctgggcaacatagcaaaaccctgtctctacaaaaaatactttccgtacattagtggttgcctaaggctagaattgggggtgatgaatggggagtacaggattcatctaatgggtacaggatttctttatggttcatgaaaatggtctaaacttattgtggtaatggtcacataacaatatattaaaaaccattgagttgtatattttaagtgggtgaattatatggtatgtgaattatatctcaataaagttgttagtaaataaatggggctgaagatgttatccttcattgtggtgtaaatgaactttcacaatattttcacctgtgaacccaaataaaatgattaaagttctgatggaaaaatcttgaatggagtataagttttccgttgttaaaaagcaaacaaaaaaccaacaaaaaatccaagtgtgccttgaattgtacagagcacaattattatgtttgaaatgtgtactacttaattttatataatttggtttgtgaaattaaagacatcaataaaaatgattcctgaaagtagtaaaaaaaaaaaaaaaaaaaaaa

SEQ ID NO: 3207 - DNA, 1125 bp, Homo sapiens
gctccatggcgctgtgcgaggccgcgggctgcgggagtgccctgctctggcctcgcttgttgctcttcggggactccatcacccagttttccttccagcagggtggatggggagcatcgctggctgacaggctggtcagaaaatgtgatgttctgaatcgtggattttcaggttacaataccaggtgggccaaaattatccttccaagattaatcaggaaaggaaacagtttggacatcccagtagcagttacaattttctttggggccaatgacagtgcactaaaagatgagaatcccaagcagcacattcccctggaggagtacgctgcgaacctaaagagcatggtgcagtacctgaagtccgtggacatccctgagaatcgagtcattctcatcacgccgaccccactttgtgaaacagcctgggaagaacagtgcatcatacaaggttgcaaactaaatcgcctgaactctgttgttggtgaatatgccaatgcgtgtttacaagtggcccaagactgtgggactgacgtacttgacctgtggaccctgatgcaggacagccaggacttctcatcttatttatcagatggactacatttgtctccaaaggggaatgaatttttgttctcgcatctctggcctttgatagagaaaaaggtctcttctctacctttgctgcttccttactggcgggatgtagcagaagcaaaacctgaattaagtctgctgggagatggagaccattagccaatcacaggagacccaaatctgcttgttatctacagaactcaaagttgtcaatacgtagaggtacgcttttttcttcaggcttaaacctttgccactgatattaataataaaagtattagatgatttttcagggaagttttatacttaggtccattgtgtttcgacagtatttattaatgcagatatcagtgctacagctataaaatataccctgagcagcttgttaattctataaatgacaaagactatgtttttaaaaagtcacaattttataaaaatggtttttcttaaaaaaaaaaaaaaaaaaaaaaaaaaaaaaaaaaaaaaaaaaaaaaaaaaaaaaaaaaaaaaaaaaaaaaaaaaaaaaaaa

SEQ ID NO: 3208 - DNA, 3058 bp, Homo sapiens; identical to SEQ ID NO: 1639

SEQ ID NO: 3209 - DNA, 4617 bp, Homo sapiens
gggagtagggtacaatacagtctggtctcctccagctccttctttctgcaacatggggaagaacaaactccttcatccaagtctggttcttctcctcttggtcctcctgcccacagacgcctcagtctctggaaaaccgcagtatatggttctggtcccctccctgctccacactgagaccactgagaagggctgtgtccttctgagctacctgaatgagacagtgactgtaagtgcttccttggagtctgtcaggggaaacaggagcctcttcactgacctggaggcggagaatgacgtactccactgtgtcgccttcgctgtcccaaagtcttcatccaatgaggaggtaatgttcctcactgtccaagtgaaaggaccaacccaagaatttaagaagcggaccacagtgatggttaagaacgaggacagtctggtctttgtccagacagacaaatcaatctacaaaccagggcagacagtgaaatttcgtgttgtctccatggatgaaaactttcaccccctgaatgagttgattccactagtatacattcaggatcccaaaggaaatcgcatcgcacaatggcagagtttccagttagagggtggcctcaagcaattttcttttcccctctcatcagagcccttccagggctcctacaaggtggtggtacagaagaaatcaggtggaaggacagagcaccctttcaccgtggaggaatttgttcttcccaagtttgaagtacaagtaacagtgccaaagataatcaccatcttggaagaagagatgaatgtatcagtgtgtggcctatacacatatgggaagcctgtccctggacatgtgactgtgagcatttgcagaaagtatagtgacgcttccgactgccacggtgaagattcacaggctttctgtgagaaattcagtggacagctaaacagccatggctgcttctatcagcaagtaaaaaccaaggtcttccagctgaagaggaaggagtatgaaatgaaacttcacactgaggcccagatccaagaagaaggaacagtggtggaattgactggaaggcagtccagtgaaatcacaagaaccataaccaaactctcatttgtgaaagtggactcacactttcgacagggaattcccttctttgggcaggtgcgcctagtagatgggaaaggcgtccctataccaaataaagtcatattcatcagaggaaatgaagcaaactattactccaatgctaccacggatgagcatggccttgtacagttctctatcaacaccaccaatgttatgggtacctctcttactgttagggtcaattacaaggatcgtagtccctgttacggctaccagtgggtgtcagaagaacacgaagaggcacatcacactgcttatcttgtgttctccccaagcaagagctttgtccaccttgagcccatgtctcatgaactaccctgtggccatactcagacagtccaggcacattatattctgaatggaggcaccctgctggggctgaagaagctctccttctattatctgataatggcaaagggaggcattgtccgaactgggactcatggactgcttgtgaagcaggaagacatgaagggccatttttccatctcaatccctgtgaagtcagacattgctcctgtcgctcggttgctcatctatgctgttttacctaccggggacgtgattggggattctgcaaaatatgatgttgaaaattgtctggccaacaaggtggatttgagcttcagcccatcacaaagtctcccagcctcacacgcccacctgcgagtcacagcggctcctcagtccgtctgcgccctccgtgctgtggaccaaagcgtgctgctcatgaagcctgatgctgagctctcggcgtcctcggtttacaacctgctaccagaaaaggacctcactggcttccctgggcctttgaatgaccaggacgatgaagactgcatcaatcgtcataatgtctatattaatggaatcacatatactccagtatcaagtacaaatgaaaaggatatgtacagcttcctagaggacatgggcttaaaggcattcaccaactcaaagattcgtaaacccaaaatgtgtccacagcttcaacagtatgaaatgcatggacctgaaggtctacgtgtaggtttttatgagtcagatgtaatgggaagaggccatgcacgcctggtgcatgttgaagagcctcacacggagaccgtacgaaagtacttccctgagacatggatctgggatttggtggtggtaaactcagcaggtgtggctgaggtaggagtaacagtccctgacaccatcaccgagtggaaggcaggggccttctgcctgtctgaagatgctggacttggtatctcttccactgcctctctccgagccttccagcccttctttgtggagctcacaatgccttactctgtgattcgtggagaggccttcacactcaaggccacggtcctaaactaccttcccaaatgcatccgggtcagtgtgcagctggaagcctctcccgccttcctagctgtcccagtggagaaggaacaagcgcctcactgcatctgtgcaaacgggcggcaaactgtgtcctgggcagtaaccccaaagtcattaggaaatgtgaatttcactgtgagcgcagaggcactagagtctcaagagctgtgtgggactgaggtgccttcagttcctgaacacggaaggaaagacacagtcatcaagcctctgttggttgaacctgaaggactagagaaggaaacaacattcaactccctactttgtccatcaggtggtgaggtttctgaagaattatccctgaaactgccaccaaatgtggtagaagaatctgcccgagcttctgtctcagttttgggagacatattaggctctgccatgcaaaacacacaaaatcttctccagatgccctatggctgtggagagcagaatatggtcctctttgctcctaacatctatgtactggattatctaaatgaaacacagcagcttactccagaggtcaagtccaaggccattggctatctcaacactggttaccagagacagttgaactacaaacactatgatggctcctacagcacctttggggagcgatatggcaggaaccagggcaacacctggctcacagcctttgttctgaagacttttgcccaagctcgagcctacatcttcatcgatgaagcacacattacccaagccctcatatggctctcccagaggcagaaggacaatggctgtttcaggagctctgggtcactgctcaacaatgccataaagggaggagtagaagatgaagtgaccctctccgcctatatcaccatcgcccttctggagattcctctcacagtcactcaccctgttgtccgcaatgccctgttttgcctggagtcagcctggaagacagcacaagaaggggaccatggcagccatgtatataccaaagcactgctggcctatgcttttgccctggcaggtaaccaggacaagaggaaggaagtactcaagtcacttaatgaggaagctgtgaagaaagacaactctgtccattgggagcgccctcagaaacccaaggcaccagtggggcatttttacgaaccccaggctccctctgctgaggtggagatgacatcctatgtgctcctcgcttatctcacggcccagccagccccaacctcggaggacctgacctctgcaaccaacatcgtgaagtggatcacgaagcagcagaatgcccagggcggtttctcctccacccaggacacagtggtggctctccatgctctgtccaaatatggagcagccacatttaccaggactgggaaggctgcacaggtgactatccagtcttcagggacattttccagcaaattccaagtggacaacaacaaccgcctgttactgcagcaggtctcattgccagagctgcctggggaatacagcatgaaagtgacaggagaaggatgtgtctacctccagacatccttgaaatacaatattctcccagaaaaggaagagttcccctttgctttaggagtgcagactctgcctcaaacttgtgatgaacccaaagcccacaccagcttccaaatctccctaagtgtcagttacacagggagccgctctgcctccaacatggcgatcgttgatgtgaagatggtctctggcttcattcccctgaagccaacagtgaaaatgcttgaaagatctaaccatgtgagccggacagaagtcagcagcaaccatgtcttgatttaccttgataaggtgtcaaatcagacactgagcttgttcttcacggttctgcaagatgtcccagtaagagatctgaaaccagccatagtgaaagtctatgattactacgagacggatgagtttgcaattgctgagtacaatgctccttgcagcaaagatcttggaaatgcttgaagaccacaaggctgaaaagtgctttgctggagtcctgttctcagagctccacagaagacacgtgtttttgtatctttaaagacttgatgaataaacactttttctggtcaatgtcaaaaaaaaaaaaaaaaaaaaaaaaa

SEQ ID NO: 3210 - DNA, 1573 bp, Homo sapiens
caccatggggcgcccactgcacctcgtcctgctcagtgcctccctggctggcctcctgctgctcggggaaagtctgttcatccgcagggagcaggccaacaacatcctggcgagggtcacgagggccaattcctttcttgaagagatgaagaaaggacacctcgaaagagagtgcatggaagagacctgctcatacgaagaggcccgcgaggtctttgaggacagcgacaagacgaatgaattctggaataaatacaaagatggcgaccagtgtgagaccagtccttgccagaaccagggcaaatgtaaagacggcctcggggaatacacctgcacctgtttagaaggattcgaaggcaaaaactgtgaattattcacacggaagctctgcagcctggacaacggggactgtgaccagttctgccacgaggaacagaactctgtggtgtgctcctgcgcccgcgggtacaccctggctgacaacggcaaggcctgcattcccacagggccctacccctgtgggaaacagaccctggaacgcaggaagaggtcagtggcccaggccaccagcagcagcggggaggcccctgacagcatcacatggaagccatatgatgcagccgacctggaccccaccgagaaccccttcgacctgcttgacttcaaccagacgcagcctgagaggggcgacaacaacctcaccaggatcgtgggaggccaggaatgcaaggacggggagtgtccctggcaggccctgctcatcaatgaggaaaacgagggtttctgtggtggaactattctgagcgagttctacatcctaacggcagcccactgtctctaccaagccaagagattcaaggtgagggtaggggaccggaacacggagcaggaggagggcggtgaggcggtgcacgaggtggaggtggtcatcaagcacaaccggttcacaaaggagacctatgacttcgacatcgccgtgctccggctcaagacccccatcaccttccgcatgaacgtggcgcctgcctgcctccccgagcgtgactgggccgagtccacgctgatgacgcagaagacggggattgtgagcggcttcgggcgcacccacgagaagggccggcagtccaccaggctcaagatgctggaggtgccctacgtggaccgcaacagctgcaagctgtccagcagcttcatcatcacccagaacatgttctgtgccggctacgacaccaagcaggaggatgcctgccagggggacagcgggggcccgcacgtcacccgcttcaaggacacctacttcgtgacaggcatcgtcagctggggagagggctgtgcccgtaaggggaagtacgggatctacaccaaggtcaccgccttcctcaagtggatcgacaggtccatgaaaaccaggggcttgcccaaggccaagagccatgccccggaggtcataacgtcctctccattaaagtgagatcccactcaaaaaaaaaaaaaaaaaaaaaaaaaaaaaaaaaaaaaaaaaaaaaaaaaaaaaaaaaaaaaaaaaaaaaaaaaaaaaaaaaaaaaaaaaaaa

SEQ ID NO: 3211 - DNA, 2110 bp, Homo sapiens
caaagagaaaggaagcaggcccgttggaagtggttgtgacaaccccagcaatgtggagaagcctggggcttgccctggctctctgtctcctcccatcgggaggaacagagagccaggaccaaagctccttatgtaagcaacccccagcctggagcataagagatcaagatccaatgctaaactccaatggttcagtgactgtggttgctcttcttcaagccagctgatacctgtgcatactgcaggcatctaaattagaagacctgcgagtaaaactgaagaaagaaggatattctaatatttcttatattgttgttaatcatcaaggaatctcttctcgattaaaatacacacatcttaagaataaggtttcagagcatattcctgtttatcaacaagaagaaaaccaaacagatgtctggactcttttaaatggaagcaaagatgacttcctcatatatgatagatgtggccgtcttgtatatcatcttggtttgcctttttccttcctaactttcccatatgtagaagaagccattaagattgcttactgtgaaaagaaatgtggaaactgctctctcacgactctcaaagatgaagacttttgtaaacgtgtatctttggctactgtggataaaacagttgaaactccatcgcctcattaccatcatgagcatcatcacaatcatggacatcagcaccttggcagcagtgagctttcagagaatcagcaaccaggagcaccaaatgctcctactcatcctgctcctccaggccttcatcaccaccataagcacaagggtcagcataggcagggtcacccagagaaccgagatatgccagcaagtgaagatttacaagatttacaaaagaagctctgtcgaaagagatgtataaatcaattactctgtaaattgcccacagattcagagttggctcctaggagctgatgctgccattgtcgacatctgatatttgaaaaaacagggtctgcaatcacctgacagtgtaaagaaaacctcccatctttatgtagctgacagggacttcgggcagaggagaacataactgaatcttgtcagtgacgtttgcctccagctgcctgacaaataagtcagcagcttatacccacagaagccagtgccagttgacgctgaaagaatcaggcaaaaaagtgagaatgaccttcaaactaaatatttaaaataggacatactccccaatttagtctagacacaatttcatttccagcatttttataaactaccaaattagtgaaccaaaaatagaaattagatttgtgcaaacatggagaaatctactgaattggcttccagattttaaattttatgtcatagaaatattgactcaaaccatattttttatgatggagcaactgaaaggtgattgcagcttttggttaatatgtcttttttttctttttccagtgttctatttgctttaatgagaatagaaacgtaaactatgacctaggggtttctgttggataattagcagtttagaatggaggaagaacaacaaagacatgctttccatttttttctttacttatctctcaaaacaatattactttgtcttttcaatcttctacttttaactaataaaataagtggattttgtattttaagatccagaaatacttaacacgtgaatattttgctaaaaaagcatatataactattttaaatatccatttatcttttgtatatctaagactcatcctgatttttactatcacacatgaataaagcctttgtatctttctttctctaatgttgtatcatactcttctaaaacttgagtggctgtcttaaaagatataaggggaaagataatattgtctgtctctatattgcttagtaagtatttccatagtcaatgatggtttaataggtaaaccaaaccctataaacctgacctcctttatggttaatactattaagcaagaatgcagtacagaattggatacagtacggatttgtccaaataaattcaataaaaaccttaaaaaaaaaaaaaaaaaaaaaaaaaaaaaaaaaaaaaaaaaaaaaaaaaaaaaaaaaaaaaaaaaaaaaaaaaaaaaaaaaaa

SEQ ID NO: 3212 - DNA, 3411 bp, Homo sapiens; identical to SEQ ID NO: 682

SEQ ID NO: 3213 - DNA, 2344 bp, Homo sapiens; identical to SEQ ID NO: 1583

SEQ ID NO: 3214 - DNA, 5115 bp, Homo sapiens; identical to SEQ ID NO: 2316

SEQ ID NO: 3215 - DNA, 1033 bp, Homo sapiens
gacccgccgtcatgctccgggccgcgctgcccgcgctcctgctgccgttgctgggcctcgccgctgctgccgtcgcggactgtccttcatctacttggattcagttccaagacagttgttacatttttctccaagaagccatcaaagtagaaagcatagaggatgtcagaaatcagtgtactgaccatggagcggacatgataagcatacataatgaagaagaaaatgcttttatactggatactttgaaaaagcaatggaaaggcccagatgatatcctactaggcatgttttatgacacagatgatgcgagtttcaagtggtttgataattcaaatatgacatttgataagtggacagaccaagatgatgatgaggatttagttgacacctgtgcttttctgcacatcaagacaggtgaatggaaaaaaggaaattgtgaagtttcttctgtggaaggaacactatgcaaaacagctatcccatacaaaaggaaatatttatcagataaccacattttaatatcagcattggtgattgctagcacggtaattttgacagttttgggagcaatcatttggttcctgtacaaaaaacattctgattctcgtttcaccacagttttttcaaccgcaccccaatcaccttataatgaagactgtgttttggtagttggagaagaaaatgaatatcctgttcaatttgactaagtttttggtaatcttgcactaagacatcaacaaatgccctggcagagataacttgggaaagattttaatataaaacttgacattggatattagagctttaatggtattccttattccagtaacatttttatgtactcatctgctgtgaaaagtctttaggttcattaaaaaaacaggttttagaaatgatcttagatctaatatagtgattttaagcatcccgtcaaaggcagaatctgtcacttgaatgaaggaaagcttaaagcccaagcagataaaaataaaagcccagcctatttgtcttgcctgctgtatcttcccta

SEQ ID NO: 3216 - DNA, 4612 bp, Homo sapiens
cgggagcggcgggggcggcgccgaggccgcgggcggggggaggagggccgcagccccggagaggggaaaaggcgggccggacggcgccagcagccagcccgaggacgcgagcggcaggtgtgcacagaggttctccactttgttttctgaactcgcggtcaggatggttttctctgtcaggcagtgtggccatgttggcagaactgaagaagttttactgacgttcaagatattccttgtcatcatttgtcttcatgtcgttctggtaacatccctggaagaagatactgataattccagtttgtcaccaccacctgctaaattatctgttgtcagttttgccccctcctccaatggtactccagaggttgaaacaacaagcctcaatgatgttactttaagcttactcccttcaaacgaaacagaaaaaactaaaatcactatagtaaaaaccttcaatgcttcaggcgtcaaaccccagagaaatatctgcaatttgtcatctatttgcaatgactcagcattttttagaggtgagatcatgtttcaatatgataaagaaagcactgttccccagaatcaacatataacgaatggcaccttaactggagtcctgtctctaagtgaattaaaacgctcagagctcaacaaaaccctgcaaaccctaagtgagacttactttataatgtgtgctacagcagaggcccaaagcacattaaattgtacattcacaataaaactgaataatacaatgaatgcatgtgctgcaatagccgctttggaaagagtaaagattcgaccaatggaacactgctgctgttctgtcaggataccctgcccttcctccccagaagagttgggaaagcttcagtgtgacctgcaggatcccattgtctgtcttgctgaccatccacgtggcccaccattttcttccagccaatccatcccagtggtgcctcgggccactgtgctttcccaggtccccaaagctacctcttttgctgagcctccagattattcacctgtgacccacaatgttccctctccaataggggagattcaacccctttcaccccagccttcagctcccatagcttccagccctgccattgacatgcccccacagtctgaaacgatctcttcccctatgccccaaacccatgtctccggcaccccacctcctgtgaaagcctcattttcctctcccaccgtgtctgcccctgcgaatgtcaacactaccagcgcacctcctgtccagacagacatcgtcaacaccagcagtatttctgatcttgagaaccaagtgttgcagatggagaaggctctgtccttgggcagcctggagcctaacctcgcaggagaaatgatcaaccaagtcagcagactccttcattccccgcctgacatgctggcccctctggctcaaagattgctgaaagtagtggatgacattggcctacagctgaacttttcaaacacgactataagtctaacctccccttctttggctctggctgtgatcagagtgaatgccagtagtttcaacacaactacctttgtggcccaagaccctgcaaatcttcaggtttctctggaaacccaagctcctgagaacagtattggcacaattactcttccttcatcgctgatgaataatttaccagctcatgacatggagctagcttccagggttcagttcaatttttttgaaacacctgctttgtttcaggatccttccctggagaacctctctctgatcagctacgtcatatcatcgagtgttgcaaacctgaccgtcaggaacttgacaagaaacgtgacagtcacattaaagcacatcaacccgagccaggatgagttaacagtgagatgtgtattttgggacttgggcagaaatggtggcagaggaggctggtcagacaatggctgctctgtcaaagacaggagattgaatgaaaccatctgtacctgtagccatctaacaagcttcggcgttctgctggacctatctaggacatctgtgctgcctgctcaaatgatggctctgacgttcattacatatattggttgtgggctttcatcaatttttctgtcagtgactcttgtaacctacatagcttttgaaaagatccggagggattacccttccaaaatcctcatccagctgtgtgctgctctgcttctgctgaacctggtcttcctcctggactcgtggattgctctgtataagatgcaaggcctctgcatctcagtggctgtatttcttcattattttctcttggtctcattcacatggatgggcctagaagcattccatatgtacctggcccttgtcaaagtatttaatacttacatccgaaaatacatccttaaattctgcattgtcggttggggggtaccagctgtggttgtgaccatcatcctgactatatccccagataactatgggcttggatcctatgggaaattccccaatggttcaccggatgacttctgctggatcaacaacaatgcagtattctacattacggtggtgggatatttctgtgtgatatttttgctgaacgtcagcatgttcattgtggtcctggttcagctctgtcgaattaaaaagaagaagcaactgggagcccagcgaaaaaccagtattcaagacctcaggagtatcgctggccttacatttttactgggaataacttggggctttgccttctttgcctggggaccagttaacgtgaccttcatgtatctgtttgccatctttaataccttacaaggatttttcatattcatcttttactgtgtggccaaagaaaatgtcaggaagcaatggaggcggtatctttgttgtggaaagttacggctggctgaaaattctggaaatgcttctacagagaggaatggggtctcttttagtgttcagaatggagatgtgtgccttcacgatttcactggaaaacagcacatgtttaacgagaaggaagattcctgcaatgggaaaggccgtatggctctcagaaggacttcaaagcggggaagcttacactttattgagcaaatgtgattcctttcttctaaaatcaaagcatgatgcttgacagtgtgaaatgtccaattttaccttttacacaatgtgagatgtatgaaaatcaactcattttattctcggcaacatctggagaagcataagctaattaagggcgatgattattattacaagaagaaaccaagacattacaccatggtttttagacatttctgatttggtttcttatctttcattttataagaaggttggttttaaacaatacactaagaatgactcctataaagaaaacaaaaaaaggtagtgaactttcagctaccttttaaagaggctaagttatctttgataacatcatataaagcaactgttgacttcagcctgttggtgagtttagttgtgcatgcctttgttgtatataagctaaattctagtgacccatgtgtcaaaaatcttacttctacatttttttgtatttattttctactgtgtaaatgtattcctttgtagaatcatggttgttttgtctcacgtgataattcagaaaatccttgctcgttccgcaaatcctaaagctccttttggagatgatataggatgtgaaatacagaaacctcagtgaaatcaagaaataatgatcccagccagactgagaaaatgtaagcagacagtgccacagttagctcatacagtgcctttgagcaagttaggaaaagatgcccccactgggcagacacagccctatgggtcatggtttgacaaacagagtgagagaccatattttagccccactcaccctcttgggtgcacgacctgtacagccaaacacagcatccaatatgaatacccatcccctgaccgcatccccagtagtcagattatagaatctgcaccaagatgtttagctttataccttggccacagagagggatgaactgtcatccagaccatgtgtcaggaaaattgtgaacgtagatgaggtacatacactgccgcttctcaaatccccagagcctttaggaacaggagagtagactaggattccttctcttaaaaaggtacatatatatggaaaaaaatcatattgccgttctttaaaaggcaactgcatggtacattgttgattgttatgactggtacactctggcccagccagagctataattgttttttaaatgtgtcttgaagaatgcacagtgacaaggggagtagctattgggaacagggaactgtcctacactgctattgttgctacatgtatcgagccttgattgctcctagttatatacagggtctatcttgcttcctacctacatctgcttgagcagtgcctcaagtacatccttattaggaacatttcaaaccccttttagttaagtctttcactaaggttctcttgcatatatttcaagtgaatgttggatctcagactaaccatagtaataatacacatttctgtgagtgctgacttgtctttgcaatatttcttttctgatttatttaattttcttgtatttatatgttaaaatcaaaaatgttaaaatcaatgaaataaatttgcagttaaga

SEQ ID NO: 3217 - DNA, 3687 bp, Homo sapiens
tccgcgggcggccagggcgcgcgtgcgcggaggttctcctcgtccgcccgttgttcagcgagggaggctctgcgcgtgccgcagctgacggggaaactgaggcacggagcgggcctgtaggagctgtccaggccatctccaaccatgggagtgaggcacccgccctgctcccaccggctcctggccgtctgcgccctcgtgtccttggcaaccgctgcactcctggggcacatcctactccatgatttcctgctggttccccgagagctgagtggctcctccccagtcctggaggagactcacccagctcaccagcagggagccagtagaccagggccccgggatgcccaggcacaccccggccgtcccagagcagtgcccacacagtgcgacgtcccccccaacagccgcttcgattgcgcccctgacaaggccatcacccaggaacagtgcgaggcccgcggctgttgctacatccctgcaaagcaggggctgcagggagcccagatggggcagccctggtgcttcttcccacccagctaccccagctacaagctggagaacctgagctcctctgaaatgggctacacggccaccctgacccgtaccacccccaccttcttccccaaggacatcctgaccctgcggctggacgtgatgatggagactgagaaccgcctccacttcacgatcaaagatccagctaacaggcgctacgaggtgcccttggagaccccgcatgtccacagccgggcaccgtccccactctacagcgtggagttctccgaggagcccttcggggtgatcgtgcgccggcagctggacggccgcgtgctgctgaacacgacggtggcgcccctgttctttgcggaccagttccttcagctgtccacctcgctgccctcgcagtatatcacaggcctcgccgagcacctcagtcccctgatgctcagcaccagctggaccaggatcaccctgtggaaccgggaccttgcgcccacgcccggtgcgaacctctacgggtctcaccctttctacctggcgctggaggacggcgggtcggcacacggggtgttcctgctaaacagcaatgccatggatgtggtcctgcagccgagccctgcccttagctggaggtcgacaggtgggatcctggatgtctacatcttcctgggcccagagcccaagagcgtggtgcagcagtacctggacgttgtgggatacccgttcatgccgccatactggggcctgggcttccacctgtgccgctggggctactcctccaccgctatcacccgccaggtggtggagaacatgaccagggcccacttccccctggacgtccagtggaacgacctggactacatggactcccggagggacttcacgttcaacaaggatggcttccgggacttcccggccatggtgcaggagctgcaccagggcggccggcgctacatgatgatcgtggatcctgccatcagcagctcgggccctgccgggagctacaggccctacgacgagggtctgcggaggggggttttcatcaccaacgagaccggccagccgctgattgggaaggtatggcccgggtccactgccttccccgacttcaccaaccccacagccctggcctggtgggaggacatggtggctgagttccatgaccaggtgcccttcgacggcatgtggattgacatgaacgagccttccaacttcatcaggggctctgaggacggctgccccaacaatgagctggagaacccaccctacgtgcctggggtggttggggggaccctccaggcggccaccatctgtgcctccagccaccagtttctctccacacactacaacctgcacaacctctacggcctgaccgaagccatcgcctcccacagggcgctggtgaaggctcgggggacacgcccatttgtgatctcccgctcgacctttgctggccacggccgatacgccggccactggacgggggacgtgtggagctcctgggagcagctcgcctcctccgtgccagaaatcctgcagtttaacctgctgggggtgcctctggtcggggccgacgtctgcggcttcctgggcaacacctcagaggagctgtgtgtgcgctggacccagctgggggccttctaccccttcatgcggaaccacaacagcctgctcagtctgccccaggagccgtacagcttcagcgagccggcccagcaggccatgaggaaggccctcaccctgcgctacgcactcctcccccacctctacacactgttccaccaggcccacgtcgcgggggagaccgtggcccggcccctcttcctggagttccccaaggactctagcacctggactgtggaccaccagctcctgtggggggaggccctgctcatcaccccagtgctccaggccgggaaggccgaagtgactggctacttccccttgggcacatggtacgacctgcagacggtgccagtagaggcccttggcagcctcccacccccacctgcagctccccgtgagccagccatccacagcgaggggcagtgggtgacgctgccggcccccctggacaccatcaacgtccacctccgggctgggtacatcatccccctgcagggccctggcctcacaaccacagagtcccgccagcagcccatggccctggctgtggccctgaccaagggtggggaggcccgaggggagcttttctgggacgatggagagagcctggaagtgctggagcgaggggcctacacacaggtcatcttcctggccaggaataacacgatcgtgaatgagctggtacgtgtgaccagtgagggagctggcctgcagctgcagaaggtgactgtcctgggcgtggccacggcgccccagcaggtcctctccaacggtgtccctgtctccaacttcacctacagccccgacaccaaggtcctggacatctgtgtctcgctgttgatgggagagcagtttctcgtcagctggtgttagccgggcggagtgtgttagtctctccagagggaggctggttccccagggaagcagagcctgtgtgcgggcagcagctgtgtgcgggcctgggggttgcatgtgtcacctggagctgggcactaaccattccaagccgccgcatcgcttgtttccacctcctgggccggggctctggcccccaacgtgtctaggagagctttctccctagatcgcactgtgggccggggccctggagggctgctctgtgttaataagattgtaaggtttgccctcctcacctgttgccggcatgcgggtagtattagccacccccctccatctgttcccagcaccggagaagggggtgctcaggtggaggtgtggggtatgcacctgagctcctgcttcgcgcctgctgctctgccccaacgcgaccgctgcccggctgcccagagggctggatgcctgccggtccccgagcaagcctgggaactcaggaaaattcacaggacttgggagattctaaatcttaagtgcaattatttttaataaaaggggcatttggaaaaaaaaaaaaaaaaaaaaaaaaaaaaaaaaaaaaaaaaaaaaaaaaaaaaaaaaaaaaaaaaaaaaaaaaaaaaaaaaaaaaaaaaaaaaaaaaaaaaaaaaaaaaaaaaaaaaaaaaaaaaaaaaaaaaaaaaaaaa

SEQ ID NO: 3218 - DNA, 2724 bp, Homo sapiens
agggacctacagcgggcgcggcgccggcggtctgcggccggcggtgtagacgccccttcgccgggacctggcacccgaatccggcctgccgggcctctttgtgcagcgccttgctgacgcccagggttctgatgtagaagcctacaccagggcctgaggttgtgaaactcatggcagtccacgcctgagaagagaaggcctgaaagagaaggaagagcccatgggacttgccacggttttgacttacatctgcaactccaaggctacaggcaggaagtaagaacagtgctcaagtggcagcagatactgactatggcttcatttcacagcttcacacagcagggtagcagaaaacaaagaatgtaagattggacccagttgctgctgttcaccaactctgtgatcttcaaaaagccatatagcttctccagacctgttaatcagggaagaagcagataactgaaggctggctttgagaagtttcgaggtcattattctctactgtgttacactcagctgctttcacctggaaaagcagaggaatcaggctgtctcctgcagctgtcttggtccattctgctgcccaagcagtacacttggtttcagatggaaatctaggatcccaagcatgggtacatttgtcggcagcatttggaagtatttttcgtcatcaggatggcagtcaatttgcaattcagtcatctcagtgcaaggtagtttggcaaaaagattatgacacttaatggatttttttcctcttttaaatctgtttacccagcattttgtagtataatgcaatgtaataacattgcattattttgagcatagtttagaagccaagaagatgctttcaaacagctgacataattcagttatggcccagatgtcctgccttccccatcacacattcatattaatggtcttagaaagctgtttctgaggcaacagtttcttcctcaatatcatcctactggggaaattttggcagttgatgtctaatgttgatttttttttcctgatcgattttaattgttcactgggcactttggggtagaattgttttaaaaatttggttactgggaaagctagacaagcctttgctatggtgaaagagacagaaggaatatagatataatttgtaagtggttatgccattgggcttaatgctttgcatacattatctagtttgcatctcctgatcgccctttaagtttgcttacggtaaagcattattccttgcttggcaatgcacagagaaaaattatttgctgaaggaccctgcaaatgagggacaggatcagagttggaactgtaaaccctgccactccatttcatgtgatcttcatgggtacagcagctataccctgccccagcaatgagtatggtagagccacattcaaaggcggactttggggtcagcattcctgaaaagagctgcttaagtttgcttctacatccaaaaacgatgcagtcacagtcaactaacactgagcttgctgggcatctcctgaacagaaatgtatgtggtggtccatgtagcatgtatgcgatataattggccacccacctttccttttcacattaacatttatcacagaaacacattcatttgctacagggatatttcacaatttggctgaactttgagagaagtgggtgaggaaaaggtagtttcgtaactagtttatatataaacctaaattgtagtgagtactcttgtaagtggagcatcttttctatggtaattataaatggctgttagcccctttgcactaaagctaggtgggtggttttgccacagaggtaaattatctttcgggcggtataaccaaacaaataaaatataaagtgagattcagggcatgttctgaatacagcagttaattaggcagctaagaaaactgtattttagcccctctgactatgtgattggtatttttttaaattaaaaaatggaaaataatatttttaacaggttatgatatgtcagtcatttaatcctcacagtaactctgtggggtaggtaggtactgtttctatctcattttacaggtaaggaatcaaaacagtgggtatacccaggttgtatatctagaaagtgatagagctgggattttaaactttataatctgattccagaatctctagctttaaacactatgttaccacttacttctcttcaaattttattgagcattagatgtttccagtatttagaagtcaaatgcttcgtttttaataggaacttacacagtcttttatgtttttttatagccctcaatgtcactgatgtggattctcccaaactcgatactttgtttgtttttatgtccccataataagtctttaagaaaacagggcaagtgagctgaaaatcaaaagaaaacccaccaacagtgaatgcattcagggctatttccaggtctttcttttgaagaaagataagactcagtccagagagcacatctgtgacacaccgtgcctcttgcctttggtgcgtggcagtcatctttggctcatgctgtacattattctacattagaaaactcactgtatgttgctaaataattttttgaaaacaggcagattaataaatggacatcttatttattgcaccataaaaaaaaaaaaaaaaaaaaaaaaaaaaaaaaaaaaaaaaaaaaaaaaaaaaaaaaaaaaaaaaaaaaaaaaaaaaaaaaaaaaaaaaaaaaaaaaaaaaaaaaa

SEQ ID NO: 3219 - DNA, 4006 bp, Homo sapiens; identical to SEQ ID NO: 152

SEQ ID NO: 3220 - DNA, 2828 bp, Homo sapiens
ggcggttaactgccaccaagtggtggttgtatgccatagctctgtaacatgaacagtgtttccaataaactgtccaccgcaaaacccgttaaaaaatgagtgagctccatgagctgaggagctagcagattgccgggattacaaagacaacgagacaggaccctttccttagcagggtttacaatctctcttttaagagcctgtgccgatggaggtgccaaccgcttatatgatatcaccgaaggagagagagaaagattcctctgacagtatcctccaagacctgacatggacaatgtgtgaaaaagcgctcaacctccaacttgaaactctcctcgaggcccccagccaccagtcatctcatcaggacaccgaaagacacccattactgtggagcttccaagggtcttggcaactcttttatcggaaacgagagctttttgcctgaattcatcaatggagactttgattctattaggcctgaagtcagagaatactatgctactaagggatgtgagctcatttcaactcctgatcaagaccacactgactttactaagtgccttaaaatgctccaaaagaagatagaagaaaaagacttaaagaagaaacagtgaaaggaatactgttcaattccaacatcagctgtgtaaccgaggcatcgtaatacttttatgacaagtttcactacctttttgcctgtgccagtgtacctcaaagggatatggttgatgtgatcgtgacactgggaggccttgctgggcgttttgaccagattatggcatctgtgaataccttgttccaagcgactcacatcactccttttccaattataataatccaagaggaatcgctgatctacctgctccaaccaggaaagcacaggttgcatgtagacactggaatggagggtgattggtgtggccttattcctgttggacagccttgtatgcaggttacaaccacaggcctcaagtggaacctcagaacttgtgactacactaggaccacctggatagccaaggataatcccgtcccaagactaatcagattaatcagacttaatcacatctgtaaagttcctcttgccatcaaatgatgtgcttgcttttggaacattggtcagtacttccaatacctacgacgggtctggtgttgtgactgtggaaactgaccacccactcctctggaccatggccatcaaaagctaacctgttgactggcatccataagtgtgcctctgccttatctcatttctcaacagttcattgctcaacaagaacgattcacctgggtttgcaagaatctaaacctctctaggggaagcccactgggtttaaagatgttagtgtttagataatacaggtagcattataaatgacagatctcaattttatagtagtgggaaagatacatgctaagaaagcaaataagctctattatattcggttggaacctaatgggaatcattccactatacaattcagtactgattattcttcttacattattaatcattccatttatcctagaaaattgtttttaatttgaatcagagaaaactgttgaggttcctcttggagtctagaacatccttaaatgtctaacaacaagggctacctctgagtaccttttagtattagttttctgtatatgatatatattatcttatactgaaaaaaaattcctttcagattggggtgttagaagtgcaccaggtcactctgaccttattactgtctttggtattgtcttaaataaatcaagaatcattgacctaattgttaaatttaaaaataggtagttagcaataggtggaaagagaaatgatgtgaaagataaatgatgattcgtggagccctactcacacattaacccccaaattcaaaagtaagaatgcaaaagtctagagggggtaacagtctgcatcatcatcacaacctaaatggagaaagctgtgcagaggaaacttaagcataaaaattgaattcgtttctgacataccttagactgaaaaactgttggttcatccagaagtgtattcatattaccagaaaatgagtttgtctatggggatacatgaacttcatatactaaggagcctaactccaaagcctgcgttctcatcccagtctgatattcacctaagtttccggacccttttccttagctgtaaaatggaagcggttggactgatggtgtctgaggtcctttcccacactgaaattctaaatattgacacttagcagtcatagggctgataatacacacagttactgacttagcctaaacaacctggtgcatcgaaatgtattcacctttcttttgtaaagagaccatcttctatcttctttccacctttctctgttttatgaaaccaactgttgacatacaaaccatgattgaaggagaacctgtccaacatgttttatgtacacaaatccctatgttgctataagaaaagtgaaagtaactgttttcttcttggtgctatgacagtgtgagactcaggttgtctgtagagaatgaaaggagcagtggcccgcgtgattgtggcatttaaggagcagtggcccatgtgactgtggcattttcgacacttttcattactttctgcttgaccggaagttgaggcttagctatgtttccatcttcagtttctgaagactagttatatattccttactagaaatatattcataatatataaaagaaatatatctgtgattttaaaattttgctaccaaagaatgcatgttctgtgtgccctgaaaatgttaccagtgttaataaatggatacttatcaaaaaagaaaaaaaaaaaaaaa

SEQ ID NO: 3221 - DNA, 2654 bp, Homo sapiens
gggaaatggctttaattctgacggcagggctgtgagggactagcgggaacccgagccttttgtcaaggaactgcggcgtcggtggccagtcatccccgccgccgcggagccgctgcactgctgggggatctcccagcagctctgacgagcgcgggctgcagcatgggcagaaaacgctgccctgcagattagctgggtggattttttaagcgcaccccaccccccaaacccataaaataacaaaaccaacccgcagtggccgaccggagatagctaagatgccgcgcaggagtttccacctggatgtttgaggttgtgtagatgtggccggcacccttgagagtggagctagggggtgcagactgagcagtgaacagaaggagccttggacagggctgggccagcctcccgagttccaggagcgaattgcaaacccaccgggaaaatgagcgaagagacggtccccgaggctgcctcgccgccgcccccgcaggggcagccttactttgaccgcttctcagaggacgaccccgagtacatgcgccttcgcaaccgggcggcggacctgcggcaggacttcaacctgatggagcagaagaagcgcgtcaccatgatcctgcagagtccctctttcagggaggagctggaaggcctcatccaggagcagatgaagaaggggaacaactcctccaacatctgggccctgcgacagatcgcggacttcatggccagcacctcccacgcagtcttcccgacatcttccatgaatgtctccatgatgacgcctatcaatgacctccacacagctgactccctgaacctggccaaaggggagcggctcatgcggtgcaagatcagcagtgtctaccgactcctggacctctatggctgggcccagctgagtgacacctatgtcacgttgagagtcagcaaggagcaggaccacttcctgatcagccctaagggagtttcttgcagtgaagtcacagcgtccagcctgatcaaggtgaacattctgggagaggtggtggagaagggcagcagctgcttcccagtggacaccacaggcttctgtctgcactcggccatctatgcagcgaggcccgacgtgcgctgcatcatccacctgcacacaccggccacagcagcggtgtcggccatgaagtggggcctcctgcctgtctcccacaatgccctgctggtgggggacatggcctattatgacttcaatggggaaatggagcaggaagccgatcggatcaacctgcagaagtgccttggacccacctgcaagatcctggtgctaagaaaccatggagtggttgctctgggtgacacggtagaggaggcattttacaagatcttccacctgcaggctgcatgtgagatacaggtgtcggctctgtccagtgccgggggagtggagaacctcatcctcctggagcaggagaagcaccggccccatgaggtgggctccgtgcagtgggccgggagcacctttgggcctatgcagaagagtcggctgggggagcatgagtttgaggccctcatgaggatgctggacaacctgggctacagaacaggttacacgtatcgccacccctttgttcaagagaaaaccaaacacaaaagtgaggtggagattccagccacggtcacagccttcgtgtttgaggaggacggtgccccggtgcccgccctgcgacagcatgcccagaagcagcagaaggagaagacccgctggctcaatacgcccaacacctacctgcgggtcaatgtggccgatgaggtccagaggagcatgggcagcccccgacccaagaccacgtggatgaaggctgacgaggtggagaaatccagcagtggcatgccgattcgcatcgaaaacccaaaccaatttgtgcctctctatactgacccccaggaagtactggagatgaggaacaagattcgagaacaaaaccgacaagatgtgaagtcagcggggcctcagtcccagctcctggcgagcgtcattgccgagaagagccgaagcccgtctacagagagccagctgatgtccaagggagacgaggataccaaagacgattcagaggagacggtgcccaaccccttcagccaactcactgaccaggagttggaggagtacaagaaagaggtggagaggaagaaactagaacttgatgagacaggacaggaacgagagccaggctctggtccggccgtgtgcgagttcttcagcgttgccctccacatctggagtaacatattggagagaaagaaactgccccagaagagcctggctcacctgcaaagtctgcacctgcttctccagtgcagagcccagcgaaggaggcagagacaaagagccctttagtctctccttccaagtctttagaggaaggtactaagaagacagaaacaagcaaagccgccaccacagagcccgaaacaacccagccggaaggggtggtggtcaacgggagggaggaggagcagacggcagaggaaatcctcagcaaaggcctgagccagatgaccaccagtgctgacacggatgttgatacctctaaggacaaaaccgagtcggtcaccagcggccccatgtccccagagggctcaccttccaagtctccctcaaaaaaaaaaaaaaa

SEQ ID NO: 3222 - DNA, 3443 bp, Homo sapiens
aaaacacaggacacatggctccattcaaggctaactgattgcacaacggctctgagcaggagagagcaaaaggtgaaccacagttgtacagcttgctggtggttggggtcacattggactatcaatatccaggagatgttgagaaaaagaggggatcctttccaacaagtcatccagcaactctgggacagaaggaaagctgtgggaagaaaagcagggtgctggtttctaggacactaaacctcatggtatcacatcggtatcctcgaattcaaagtatcaaagtacaatttaccgaatataagaaggagaaaggtttcatcctcacttcccaaaaggaggatgaaatcatgaaggtgcagaacaactcagtcatcatcaactgtgatgggttttatctcatctccctgaagggctacttctcccaggaagtcaacattagccttcattaccagaaggatgaggagcccctcttccaactgaagaaggtcaggtctgtcaactccttgatggtggcctctctgacttacaaagacaaagtctacttgaatgtgaccactgacaatacctccctggatgacttccatgtgaatggcggagaactgattcttatccatcaaaatcctggtgaattctgtgtcctttgaggggctgatggcaatatctaaaaccaggcaccagcatgaacaccaagctgggggtggacagggcatggattcttcattgcaagtgaaggagcctcccagctcagccacgtgggatgtgacaagaagcagatcctggccctcccgcccccacccctcagggatatttaaaacttattttatataccagttaatcttatttatccttatattttctaaattgcctagccgtcacaccccaagattgccttgagcctactaggcacctttgtgagaaagaaaaaatagatgcctcttcttcaagatgcattgtttctattggtcaggcaattgtcataataaacttatgtcattgaaaacggtacctgactaccatttgctggaaatttgacatgtgtgtggcattatcaaaatgaagaggagcaaggagtgaaggagtggggttatgaatctgccaaaggtggtatgaaccaacccctggaagccaaagcggcctctccaaggttaaattgattgcagtttgcatattgcctaaatttaaactttctcatttggtgggggttcaaaagaagaatcagcttgtgaaaaatcaggacttgaagagagccgtctaagaaataccacgtgctttttttctttaccattttgctttcccagcctccaaacatagttaatagaaatttcccttcaaagaactgtctggggatgtgatgctttgaaaaatctaatcagtgacttaagagagattttcttgtatacagggagagtgagataacttattgtgaagggttagctttactgtacaggatagcagggaactggacatctcagggtaaaagtcagtacggattttaatagcctggggaggaaaacacattctttgccacagacaggcaaagcaacacatgctcatcctcctgcctatgctgagatacgcactcagctccatgtcttgtacacacagaaacattgctggtttcaagaaatgaggtgatcctattatcaaattcaatctgatgtcaaatagcactaagaagttattgtgccttatgaaaaataatgatctctgtctagaaataccatagaccatatatagtctcacattgataattgaaactagaagggtctataatcagcctatgccagggcttcaatggaatagtatccccttatgtttagttgaaatgtccccttaacttgatataatgtgttatgcttatggcgctgtggacaatctgatttttcatgtcaactttccagatgatttgtaacttctctgtgccaaaccttttataaacataaatttttgagatatgtattttaaaattgtagcacatgtttccctgacattttcaatagaggatacaacatcacagaatctttctggatgattctgtgttatcaaggaattgtactgtgctacaattatctctagaatctccagaaaggtggagggctgttcgcccttacactaaatggtctcagttggatttttttttcctgttttctatttcctcttaagtacaccttcaactatattcccatccctctattttaatctgttatgaaggaaggtaaataaaaatgctaaatagaagaaattgtaggtaaggtaagaggaatcaagttctgagtggctgccaaggcactcacagaatcataatcatggctaaatatttatggagggcctactgtggaccaggcactgggctaaatacttacatttacaagaatcattctgagacagatattcaatgatatctggcttcactactcagaagattgtgtgtgtgtttgtgtgtgtgtgtgtgtgtgtatttcactttttgttattgaccatgttctgcaaaattgcagttactcagtgagtgatatccgaaaaagtaaacgtttatgactataggtaatatttaagaaaatgcatggttcatttttaagtttggaatttttatctatatttctcacagatgtgcagtgcacatgcaggcctaagtatatgttgtgtgtgttgtttgtctttgatgtcatggtcccctctcttaggtgctcactcgctttgggtgcacctggcctgctcttcccatgttggcctctgcaaccacacagggatatttctgctatgcaccagcctcactccaccttccttccatcaaaaatatgtgtgtgtgtctcagtccctgtaagtcatgtccttcacagggagaattaacccttcgatatacatggcagagttttgtgggaaaagaattgaatgaaaagtcaggagatcagaattttaaatttgacttagccactaactagccatgtaaccttgggaaagtcatttcccatttctgggtcttgcttttctttctgttaaatgagaggaatgttaaatatctaacagtttagaatcttatgcttacagtgttatctgtgaatgcacatattaaatgtctatgttcttgttgctatgagtcaaggagtgtaaccttctcctttactatgttgaatgtatttttttctggacaagcttacatcttcctcagccatctttgtgagtccttcaagagcagttatcaattgttagttagatattttctatttagagaatgcttaagggattccaatcccgatccaaatcataatttgttcttaagtatactgggcaggtcccctattttaagtcataattttgtatttagtgctttcctggctctcagagagtattaatattgatattaataatatagttaatagtaatattgctatttacatggaaacaaataaaagatctcagaattcaaaaaaaaaaaaaaa

SEQ ID NO: 3223 - DNA, 2209 bp, Homo sapiens; identical to SEQ ID NO: 637

SEQ ID NO: 3224 - DNA, 2082 bp, Homo sapiens
cctccgaagcagtaaaccagcccctctgtttgtttgtttgctttgcccttagttccactgctccaaacccacccaccaaggactctgaacctgtccaccccgggcgcatcaagatcttccagctgggtacccccgatttgggccgactttgcacctccaaacaaccttagcatgatgtcttatcttaagcaaccgccttacgcagtcaatgggctgagtctgaccacttcgggtatggacttgctgcacccctccgtgggctacccggccaccccccggaaacagcgccgggagaggacgacgttcactcgggcgcagctagatgtgctggaagcactgtttgccaagacccggtacccagacatcttcatgcgagaggaggtggcactgaaaatcaacttgcccgagtcgagggtgcaggtatggtttaagaatcgaagagctaagtgccgccaacaacagcaacaacagcagaatggaggtcaaaacaaagtgagacctgccaaaaagaagacatctccagctcgggaagtgagttcagagagtggaacaagtggccaattcactcccccctctagcacctcagtcccgaccattgccagcagcagtgctcctgtgtctatctggagcccagcttccatctccccactgtcagatcccttgtccacctcctcttcctgcatgcagaggtcctatcccatgacctatactcaggcttcaggttatagtcaaggatatgctggctcaacttcctactttgggggcatggactgtggatcatatttgacccctatgcatcaccagcttcccggaccaggggccacactcagtcccatgggtaccaatgcagtcaccagccatctcaatcagtccccagcttctctttccacccagggatatggagcttcaagcttgggttttaactcaaccactgattgcttggattataaggaccaaactgcctcctggaagcttaacttcaatgctgactgcttggattataaagatcagacatcctcgtggaaattccaggttttgtgaagacctgtagaacctctttttgtgggtgatttttaaatatactgggctggacattccagttttagccaggcattggttaaaagagttagatgggatgatgctcagactcatctgatcaaagttccgagaggcatagaaggaaaaacgaagggccttagaggggcctacaaaccagcaacatgaaatggacaaaccaatctgcttaagatcctgtcatagttttagatcattggttatcctgatttgcaaagtgatcaaaagcattctagccatgtgcaaccaaacaccaccaaaaataaaatcaaacaaaactaagttgtgaaggaagggagggaaggtcatagccttcttaagcagaggtgttccattgttttagccaatccttggttgaatcttaggaatgaacagtgtctcaagctcattcacgtttcatgaccaactggtagttggcactgaaaaaacttttcagggctgtgtgaattgtgtgactgattgtcctagatgcactactttatttaaaaaataatgttcataaggagtcaatatgtagtttaagagacaatcagtgtgtgtcttataaatggtacatctgtggtttttaatctgtgctagacttcaaaactgtgatctcctgttattgtatgcaaccttgaactccacctctgcaggggttcttctgtgattaaataggttataattataagcaaaattcagagcaactgagtactgatctaaaaagattacctttggctggaggtgagctgcactgaaactttacgacaaaatgtctctggacaaagagagtcagagaagagaagcaaaaggacactaattcatctgtaatttactgttggtaagcctagcagtaaagagacattggtcaattgctctgaccctgatgaattattaaactgagatcattgtcgtttatgcttgcagatgttaaatggaaaagttatatatgcataaaccttttcttcctggatttggcagatatgtataattatattaaaatggttctagcacaaaaaaaaaaaaaaa

SEQ ID NO: 3225 - DNA, 5333 bp, Homo sapiens; identical to SEQ ID NO: 223

SEQ ID NO: 3226 - DNA, 1441 bp, Homo sapiens
gtcgaggctgcggcgcgtggggagcgggcggagcgggggcgggggccgagcgcggggcacccgggggcctcctgtataggcgggcaccatgggctcctgctccggccgctgcgcgctcgtcgtcctctgcgcttttcagctggtcgccgccctggagaggcaggtgtttgacttcctgggctaccagtgggcgcccatcctggccaactttgtccacatcatcatcgtcatcctgggactcttcggcaccatccagtaccggctgcgctatgtcatggtgtacacgctgtgggcagccgtctgggtcacctggaacgtcttcatcatctgcttctacctggaagtcggtggcctcttaaaggacagcgagctactgaccttcagcctctcccggcatcgctcctggtggcgtgagcgctggccaggctgtctgcatgaggaggtgccagcagtgggcctcggggccccccatggccaggccctggtgtcaggtgctggctgtgccctggagcccagctatgtggaggccctacacagttgcctgcagatcctgatcgcgcttctgggctttgtctgtggctgccaggtggtcagcgtgtttacggatgaagaggacagctttgatttcattggtggatttgatccatttcctctctaccatgtcaatgaaaagccatccagtctcttgtccaagcaggtgtacttgcctgcgtaagtgaggaaacagctgaccctgctcctgtggcctccagcctcagcgaccgaccagtgacaatgacaggagctcccaggccttgggacgcgcccccacccagcaccccccaggcggccggcagcacctgccctgggttctaagtactggacaccagccagggcggcagggcagtgccacggctggctgcagcgtcaagagagtttgtaatttcctttctcttaaaaaaaaaaaagaaaagaaaacatacaaaagaaaaggcaaaaccccacatgcccacctcctctggcaacatgggggtcacagctctgcccccaggctgtcgtctcgtcgaggagcccctccctcaggtgccaacctggggctgctggaccctcgggctgcaagcactgctgctgggatgcagcctccccaggaagtcaatgtgaggcccgagacccctcaagcggtgagggcccctgttgaacatggagggttcctaaccccaaactcgtgccagaagaacccccaccccacccaggagctgaggctgatggagccctagggtgggggctgggcttgaccaggaacagcagagccaggccccaaggcatagggcagggcacatggtggtgacgagcaggcagtactcttgtaaagggggctcttgggcaaacagtcccaaaggctcccccaggtatcatcaagttggtaaataaacaggaacatggcccaaaaaaaaaaaaaaaa

SEQ ID NO: 3227 - DNA, 2712 bp, Homo sapiens
gtggggggagcggtgatctgagctccgagcagctggtcttcgcggctcgctccctccttcgcgctctctcgctccctgccgccgcccgcagggctgcggggctcggtggcatctcccgggcgcggcccgcagtccttgcccctgcctccgggccgctcccgcccccggcgccgctcgctcccccgacccggactcccccatgtatgacgactcctacgtgcccgggtttgaggactcggaggcgggttcagccgactcctacaccagccgcccatctctggactcagacgtctccctggaggaggaccgggagagtgcccggcgtgaagtagagagccaggctcagcagcagctcgaaagggccaagcacaaacctgtggcatttgcggtgaggaccaatgtcagctactgtggcgtactggatgaggagtgcccagtccagggctctggagtcaactttgaggccaaagattttctgcacattaaagagaagtacagcaatgactggtggatcgggcggctagtgaaagagggcggggacatcgccttcatccccagcccccagcgcctggagagcatccggctcaaacaggagcagaaggccaggagatctgggaacccttccagcctgagtgacattggcaaccgacgctcccctccgccatctctagccaagcagaagcaaaagcaggcggaacatgttcccccatatgacgtggtgccctccatgcggcctgtggtgctggtgggaccatctctgaaaggttatgaggtcacagacatgatgcagaaggctctcttcgacttcctcaaacacagatttgatggcaggatctccatcacccgagtcacagccgacctctccctggcaaagcgatctgtgctcaacaatccgggcaagaggaccatcattgagcgctcctctgcccgctccagcattgcggaagtgcagagtgagatcgagcgcatatttgagctggccaaatccctgcagctagtagtgttggacgctgacaccatcaaccacccagcacagctggccaagacctcgctggcccccatcatcgtctttgtcaaagtgtcctcaccaaaggtactccagcgtctcattcgctcccgggggaagtcacagatgaagcacctgaccgtacagatgatggcatatgataagctggttcagtgcccaccggagtcatttgatgtgattctggatgagaaccagctggaggatgcctgtgagcacctggctgagtacctggaggtttactggcgggccacgcaccacccagcccctggccccggacttctgggtcctcccagtgccatcccgggacttcagaaccagcagctgctgggggagcgtggcgaggagcactccccccttgagcgggacagcttgatgccctctgatgaggccagcgagagctcccgccaagcctggacaggatcttcacagcgtagctcccgccacctggaggaggactatgcagatgcctaccaggacctgtaccagcctcaccgccaacacacctcggggctgcctagtgctaacgggcatgacccccaagaccggcttctagcccaggactcagagcacaaccacagtgaccggaactggcagcgcaaccggccttggcccaaggatagctactgacagcctcctgctgccctaccctggcaggcacaggcgcagctggctggggggcccactccaggcagggtggcgttagactggcatcaggctggcactaggctcagcccccaaaaccccctgcccagccccagcttcagggctgcctgtggtcccaaggttctgggagaaacaggggaccccctcacctcctgggcagtgacccctactaggctcccattccaggtactagctgtgtgttctgcacccctggcaccttcctctcctcccacacaggaagctgccccactgggcagtgccctcaggccaggatccccttagcagggtccttcccaccagactcagggaagggatgccccattaaagtgacaaaagggtggggtgtgggcaccatggcatgaggaagaaacaaggtccctgagcaggcacaagtcctgacagtcaagggactgctttggcatccagggcctccagtcacctcactgccatacattagaaatgagacaatcaaagcccccccagggtggcacacccatccgtttgctggggtgtggcagccacatccaagactggagcagcaggctggccacgctcgggccagagagagctcacagctgaagctcttggagggaagggctctcctcaccctgccaggaagcttcttaacatgtgacaggaccagggaccaggagcatggtgaagccaagtggcagatgggagccaacctggatgggggtttggggaaggagggcatgtgtagcagagaacttaggggggcctccttgcctttctcattcttttgccctgcatcctgtcatttctgttcttgtccctcatacatctttggagaaccgggctccagactttgttccctgactcatagctgccgcttgttaggttagggttagatggggagagacagggcacagaggacctgtctccccggctactcttgccttatggctctagtgtgtgacctacagagcatgctccacaagcccctgcctcacctcactgtcatcactaataaacatcatgcacagtcaaaaaaaaaaaaaaaa

SEQ ID NO: 3228 - DNA, 725 bp, Homo sapiens
atgtcgccctctggtcgcctgtgtcttctcaccatcgttggcctgattctccccaccagaggacagacgttgaaagataccacgtccagttcttcagcagactcaactatcatggacattcaggtcccgacacgagccccagatgcagtctacacagaactccagcccacctctccaaccccaacctggcctgctgatgaaacaccacaaccccagacccagacccagcaactggaaggaacggatgggcctctagtgacagatccagagacacacaagagcaccaaagcagctcatcccactgatgacaccacgacgctctctgagagaccatccccaagcacagacgtccagacagacccccaggccctcaagccatctggttttcatgaggatgactccttcttctatgatgaacacaccctccggaaacgggggctgttggtcgcagctgtgctgttcatcacaggcatcatcatcctcaccagtggcaagtgcgggcagctgtcccggttatgccggaatcattgcaggtgagtccatcagaaacaggagctgacaacccgctgggcacccgaagaccaagccccctgccagctcaccgtgcccagccttctgcatcccctcgaagagcctggccagagagggaagacacagatgatgaagctggagccagggctgccggtccgagtcttctaccttccccaaccctgcccggccctgaa

SEQ ID NO: 3229 - DNA, 3142 bp, Homo sapiens; identical to SEQ ID NO: 1790

SEQ ID NO: 3230 - DNA, 2072 bp, Homo sapiens
aaaacccccctgcatcgtagagagcgggctggattctctgtggtgctgatggaggagggggagcaggttgaaacaatcgagtgggcgcgccaggactccccagctcctggcggggaagggagggggagccactgttctgcgcagggaggcggcggggctggggggcccccggaacgaggaagaggcaggggtgaccgctagaataggaaagtgctcacccccgggaggcaaaatttcgttcagatcgcacattaattggagatatctgattaattccagcttctgatgactataaatggcgattctctaccaaggtgtctatattaaaaaaaaaaatcattccgtgtcatcccccacgtcaggcctgctcgtgggcgtgaggctgtacttcctccgcccccttctaatggagtgaaccattcccagctctccccccccctcagcctctctctctctctctctttctctctctctctctctttctgtctcttcctcgctccctctctttctctcctccctctgccttcccagtgcataaagtctctgtcgctcccggaacttgttggcaatgcctattttttggctttcccccgcgttctctaaactaactatttaaaggtctgcggtcgcaaatggtttgactaaacgtaggatgggacttaagttgaacggcagatatatttcactgatcctcgcggtgcaaatagcgtatctggtgcaggccgtgagagcagcgggcaagtgcgatgcggtcttcaagggcttttcggactgtttgctcaagctgggcgacagcatggccaactacccgcagggcctggacgacaagacgaacatcaagaccgtgtgcacatactgggaggatttccacagctgcacggtcacagcccttacggattgccaggaaggggcgaaagatatgtgggataaactgagaaaagaatccaaaaacctcaacatccaaggcagcttattcgaactctgcggcagcggcaacggggcggcggggtccctgctcccggcgttcccggtgctcctggtgtctctctcggcagctttagcgacctggctttccttctgagcgtggggccagctccccccgcgcgcccacccacactcactccatgctcccggaaatcgagaggaagatccattagttctttggggacgttgtgattctctgtgatgctgaaaacactcatataggattgtgggaaatcctgattctcttttttatttcgtttgatttcttgtgttttatttgccaaatgttaccaatcagtgagcaagcaagcacagccaaaatcggacctcagctttagtccgtcttcacacacaaataagaaaacggcaaacccaccccattttttaattttattattattaattttttttgttggcaaaagaatctcaggaacggcgctgggccacctactatattaatcatgctagtaacatgaaaaatgatgggctcctcctaataggaaggcgaggagaggagaaggccaggggaatgaattcaagagagatgtccacggacgaaacatacggtgaataattcacgctcacgtcgttcttccacagtatcttgttttgatcatttccactgcacatttctcctcaagaaaagcgaaaggacagactgttggctttgtgtttggaggataggagggagagagggaaggggctgaggaaatctctggggtaagagtaaagtcttccagaagacatgctgctatggtcactgaggggttagctttatctgctgttgttgatgcatccgtccaagttcactgcctttattttccctcctccctcttgttttagctgttacacacacagtaatacctgaatatccaacggtatagatcacaagggggggatgttaaatgttaatctaaaatatagctaaaaaaagattttgacataaaagagccttgattttaaaaaaaaagagagagagatgtaatttaaaaagtttattataaattaaattcagcaaaaaaagatttgctacaaagtatagagaagtataaaataaaagttattgtttgaagaaaaaaaaaaaaaaa

SEQ ID NO: 3231 - DNA, 3250 bp, Homo sapiens; identical to SEQ ID NO: 1987

SEQ ID NO: 3232 - DNA, 2170 bp, Homo sapiens
cggggcccaaggcaggggtggcgggtcagtgctgctcgggggcttctccatccaggtccctggagttcctggtccctggagctccgcacttggcggcgcaacctgcgtgaggcagcgcgactctggcgactggccggccatgccttcccgggctgaggactatgaagtgttgtacaccattggcacaggctcctacggccgctgccagaagatccggaggaagagtgatggcaagatattagtttggaaagaacttgactatggctccatgacagaagctgagaaacagatgcttgtttctgaagtgaatttgcttcgtgaactgaaacatccaaacatcgttcgttactatgatcggattattgaccggaccaatacaacactgtacattgtaatggaatattgtgaaggaggggatctggctagtgtaattacaaagggaaccaaggaaaggcaatacttagatgaagagtttgttcttcgagtgatgactcagttgactctggccctgaaggaatgccacagacgaagtgatggtggtcataccgtattgcatcgggatctgaaaccagccaatgttttcctggatggcaagcaaaacgtcaagcttggagactttgggctagctagaatattaaaccatgacacgagttttgcaaaaacatttgttggcacaccttattacatgtctcctgaacaaatgaatcgcatgtcctacaatgagaaatcagatatctggtcattgggctgcttgctgtatgagttatgtgcattaatgcctccatttacagcttttagccagaaagaactcgctgggaaaatcagagaaggcaaattcaggcgaattccataccgttactctgatgaattgaatgaaattattacgaggatgttaaacttaaaggattaccatcgaccttctgttgaagaaattcttgagaaccctttaatagcagatttggttgcagacgagcaaagaagaaatcttgagagaagagggcgacaattaggagagccagaaaaatcgcaggattccagccctgtattgagtgagctgaaactgaaggaaattcagttacaggagcgagagcgagctctcaaagcaagagaagaaagattggagcagaaagaacaggagctttgtgttcgtgagagactagcagaggacaaactggctagagcagaaaatctgttgaagaactacagcttgctaaaggaacggaagttcctgtctctggcaagtaatccagaacttcttaatcttccatcctcagtaattaagaagaaagttcatttcagtggggaaagtaaagagaacatcatgaggagtgagaattctgagagtcagctcacatctaagtccaagtgcaaggacctgaagaaaaggcttcacgctgcccagctgcgggctcaagccctgtcagatattgagaaaaattaccaactgaaaagcagacagatcctgggcatgcgctagccaggtagagagacacagagctgtgtacaggatgtaatattaccaacctttaaagactgatattcaaatgctgtagtgttgaatacttggttccatgagccatgcctttctgtatagtacacatgatatttcggaattggttttactgttcttcagcaactattgtacaaaatgttcacatttaatttttctttcttcttttaagaacatattataaaaagaatactttcttggttgggcttttaatcctgtgtgtgattactagtaggaacatgagatgtgacattctaaatcttgggagaaaaaataatgttaggaaaaaaatatttatgcaggaagagtagcactcactgaatagttttaaatgactgagtggtatgcttacaattgtcatgtctagatttaaattttaagtctgagattttaaatgtttttgagcttagaaaacccagttagatgcaatttggtcattaataccatgacatcttgcttataaatattccattgctctgtagttcaaatctgttagctttgtgaaaattcatcactgtgatgtttgtattcttttttttttttctgtttaacagaatatgagctgtctgtcatttacctacttctttcccactaaataaaagaattcttcagtttccctgtaaaaaaaaaaaaaaaaaaaaaaaaaaaaaaaaaaaaaaa

SEQ ID NO: 3233 - DNA, 1185 bp, Homo sapiens
acagccttgcagcgtctccggaagtggaggcgggagcggcacggcagccactgcttggggtagcgggagggcagactctgggcgccactcccgggccggtcatgaacgggccggcggacggcgaagtggactacaaaaaaaaataccggaatctgaagcggaagctcaagttcctcatctacgagcacgagtgcttccaggaggagctgaggaaagcgcaaaggaaattactgaaggtgtcccgggacaagagtttcctcctagaccgacttctgcagtacgagaacgtggatgaagactcttcggactcagatgccactgcatcatcagataacagcgagacggaggggacacccaagttgtctgacacaccggcccctaagaggaagagaagccctccgctggggggcgccccctctccctccagcctctccctgcctccttcaacagggtttccccttcaggcctccggggtcccctccccatacctgagctcgctggcctcctcccgctaccccccattcccttctgactacctggccctgcagctgcccgagcccagtcccctgaggcccaagcgggagaaacggccccgcctgccccggaaactcaagatggcggtgggaccccccgactgccctgtgggagggccgctgaccttccctggccggggttctggggctggggtcgggacaaccctgacccccctcccaccccctaagatgcccccccccacgatcctgagcacggtccctcggcagatgttcagcgatgcaggtagcggggacgatgccttggatggagacgatgacctggtgatcgacatcccggagtgaccgtgacatcacgccatgcccaccacggccccgcccggcgccctccccgtgccagcacacacgagtccagcttcctcggaggtgtttattgatgcccagctgccatgctccggccactgacacaaccagaaaaggcgtaaacatgcacgggtgtcccccaggagggtggcaggggccctgccttcaaaccccggccccctccaggggacagttatttaaacgagtggccgggagcatctgccacctgctggggaggcagagaccctgcaatggccacctctttaaaagggctgctgtacagggctaggttttttcaatgaagtttctgtattaaaggagtggctctggg

SEQ ID NO: 3234 - DNA, 1300 bp, Homo sapiens; identical to SEQ ID NO: 1721

SEQ ID NO: 3235 - DNA, 2611 bp, Homo sapiens
aatccttggttaggaggaaagggagtggagaggaccgtgctgcctggcgttccccagctgcctttctttctgttttccccccaacggaatctctatgtggtctcctagagcctcgtgcctgcctctcagctagatgctgatatcattcccactcatgtagttgggaaggaagggtgtggcagagataaagggtccacggtcacgcagtatgtgggggtcacacagcctgtatgccaaagtggcacaccctgtgaatatgtagggtcgcacagcctttatgtgtcagtgccagagcctggacccgggtctgtagatgtgtgaaccgtgagctgataccatggatattcaaagatttacatcccatcaatgtttataccttcttgagaagaaatttgtgtcaaagcacactcctcctttcaagactacctcctcgccgtgctgcgtgatagccctagtatcacaaccaaaacacatgatacagaaagaggccagtatctgtgtggcttcaggctcttgtgcgttggccatgaagcaaaggaaggctgttgcatgaaataacctccttctgactccacccttgcatttgtgagatgtaaacagcagtgttaccaagaggtcttccagggaacacgttgcaggtcgtccttggtggaaggaaccatgaactggcatctccccctcttcctcttggcctctgtgacgctgccttccatctgctcccacttcaatcctctgtctctcgaggaactaggctccaacacggggatccaggttttcaatcagattgtgaagtcgaggcctcatgacaacatcgtgatctctccccatgggattgcgtcggtcctggggatgcttcagctgggggcggacggcaggaccaagaagcagctcgccatggtgatgagatacggcgtaaatggagttggtaaaatattaaagaagatcaacaaggccatcgtctccaagaagaataaagacattgtgacagtggctaacgccgtgtttgttaagaatgcctctgaaattgaagtgccttttgttacaaggaacaaagatgtgttccagtgtgaggtccggaatgtgaactttgaggatccagcctctgcctgtgattccatcaatgcatgggttaaaaatgaaaccagggatatgattgacaatctgctgtccccagatcttattgatggtgtgctcaccagactggtcctcgtcaacgcagtgtatttcaagggtctgtggaaatcacggttccaacccgagaacacaaagaaacgcactttcgtggcagccgacgggaaatcctatcaagtgccaatgctggcccagctctccgtgttccggtgtgggtcgacaagtgcccccaatgatttatggtacaacttcattgaactgccctaccacggggaaagcatcagcatgctgattgcactgccgactgagagctccactccgctgtctgccatcatcccacacatcagcaccaagaccatagacagctggatgagcatcatggtgcccaagagggtgcaggtgatcctgcccaagttcacagctgtagcacaaacagatttgaaggagccgctgaaagttcttggcattactgacatgtttgattcatcaaaggcaaattttgcaaaaataacaaggtcagaaaacctccatgtttctcatatcttgcaaaaagcaaaaattgaagtcagtgaagatggaaccaaagcttcagcagcaacaactgcaattctcattgcaagatcatcgcctccctggtttatagtagacagaccttttctgtttttcatccgacataatcctacaggtgctgtgttattcatggggcagataaacaaaccctgaagagtatacaaaagaaaccatgcaaagcaacgactactttgctacgaagaaagactcctttcctgcatctttcatagttctgttaaatatttttgtacatcgcttctttttcaaaactagttcttaggaacagactcgatgcaagtgtttctgttctgggaggtattggagggaaaaaacaagcaggatggctggaacactgtactgaggaatgaatagaaaggcttccagatgtctaaaagattctttaaactactgaactgttacctaggttaacaaccctgttgagtatttgctgtttgtccagttcaggaatttttgttttgttttgtctatatgtgcggcttcagaagaaatttaatcagtgtgacagaaaaaaaaatgttttatggtagcttttactttttatgaaaaaaaaattatttgccttttaaattcttttcccccatccccctccaaagtcttgatagcaagcgttattttgggggtagaaacggtgaaatctctagcctctttgtgtttttgttgttgttgttgttgttgttttatataatgcatgtattcactaaaataaaatttaaaaaactcctgtcttgctagacaaggttgctgttgtgcagtgtgcctgtcactactggtctgtactccttggatttgcatttttgtattttgtacaaagtaaaaataaactgttatgagtagtaaaaaaaaaaagaaaaaaaaaaaaaaaaaaaaaaaaagaaaaaaaaaaaaaaaa

SEQ ID NO: 3236 - DNA, 2737 bp, Homo sapiens
caactgcaaagtttgctgtccggctgcctagggtctgggaagctcgggcaccctccctctccggggctcctgctcccacccctccggcccctccaccgtcgcgctcctccaggctgggcctgtggccgcggtgctttttaattttcccccagctcagaatcttgctgctcggcccccaggagagcaacaactcaacgggaacgatgtggaaggtgtcagctctgctcttcgttttgggaagcgcgtcgctctgggtcctggcagaaggagccagcacaggccagccagaagatgacactgagactacaggtttggaaggcggcgttgccatgccaggtgccgaagatgatgtggtgactccaggaaccagcgaagaccgctataagtctggcttgacaactctggtggcaacaagtgtcaacagtgtaacaggcattcgcatcgaggatctgccaacttcagaaagcacagtccacgcgcaagaacaaagtccaagcgccacagcctcaaacgtggccaccagtcactccacggagaaagtggatggagacacacagacaacagttgagaaagatggtttgtcaacagtgaccctggttggaatcatagttggggtcttactagccatcggcttcattggtgcaatcatcgttgtggttatgcgaaaaatgtcgggaaggtactcgccctaaagagctgaagggttacgccctgctgccaacgtgcttaaaaaaagaccgtttctgactctgtgccctgtccctgagctcgtgggagaagatgacccgtggaacacttgcctggcccactcagaatccacggtgacctctccgcttgccaaaataaccgaaggaaagaccgttcaccagacttggctgctctaaacatttgctgggcaaacatgtttttgaatatacattctataaaagattatttgaacgacaaaattcatagataatggagcaaaactgtataaactgatttgtaactaacactggaccattggatcgatattatatgctgtaaccatgtgtctccgtctgaccattcttgttattgttaaaatgcagaggaatctggaaatatttatatccacggagtccttggatccagtgctacgtcagtaaatagcaccagcattttgcaattgctgatctgctgaaatgtacacattctggtctagtttggtctatcttttaaagcctgatctggtgtgaataatcaactaggaaatctaaacttggataacacgtggtgaacaactgcctttagctggtccagattaatcatttcaaagacatccattttagatcacaagcaggaagtcgatagtctcaaaggcactttgtttctcccaagtaggccaccaggcagcctctagagttgctttacccaaatccttctccagccatgacttggtgactctaagcttgctcccacctgccccctccacttccctcagatgatgaggagccagggctaagggggcagccttctctcttcccagtgatgcacatccttcacattggctgctttgttctggaatatggatatctcagcctggatgccgaggaagctgctggatgcttaatggtgctagaggctcaagtgtgtttgaaaccaagagccagttgtcccccatgcagaaagaaatcctgtgtgagcctctggtatgagaaataaaatctgccagttttataacattcactttctgctctgaggaaagatacagggaacaaaaatcaatttgtacagtcttaatattaaaagcagcttgactaaatacctgatttaaaaatagaagacatccccagtcctcatgacataccgcaaatatctgtggggtcctgttgaaaagaacaaaataaaggagcccaaggggtcattctgtctcagcaccatccagcctggcacttctcttcccatatatccattggatttttttttttttttcctaaacaaagtttttacactgagcagatgctctgtcatgatggcggttgtgcaattctggtatcctctaaatttgtaagcattcataaaacaggaaaaagtaaactatcattcggaagcacagcccattcctcccattttttgcaatgatgtctggatgttattttaaacagtgtgtctgtgtgttcccaaatccagctggccccaccagctcagattccattttttttgtgtgtgtgtgtgaaacgtagtctgcaactctgcctcccggcaattatacatgtgtcaggatgtcaaaaagcaattctcctgcctcagcctcctgagtagctgggactacaggttcctaccaccacacccggccaatttttgtatttttagtagagatggggtttcaccgtatcggcgaggatgatctctatctcttgacctcgtgatctgcccgcctcggcctcccaaagtgctgggattacaggcgtgtgccactgcgctcggcctcagattccatatttgaacaccagctgattgagagaaggggaatgagaagagctggatgagtttaaataactcattgttcagattcctgaacaggagttgggataatggccatcttttctttcctatcctttcttcccccctcactgtgaaaaataacagtccaccccaagtcatacactggacccagtgcctgcggggacaggactgtgggtttcttggtcacacctgtgttggtgctcaatgcagtgtagacatgttttcaaataaaacaaatgattgtgtacaa

SEQ ID NO: 3237 - DNA, 4909 bp, Homo sapiens; identical to SEQ ID NO: 1653

SEQ ID NO: 3238 - DNA, 7650 bp, Homo sapiens; identical to SEQ ID NO: 2265

SEQ ID NO: 3239 - DNA, 1926 bp, Homo sapiens
tggggccgtcgtgccccgccccagtgcggccggggcgcgggttcgagctgctgctcggcaagcctgggtgtctagggcatgagcggagtgtggggggccggcgggcctcggtgccaggaggcgctcgcggtcctcgcctcgctgtgccgggcccggccgccccctctcgggctggacgtggagacttgtcggagcttcgagctgcagcccccagagcggagtcccagcgcggcaggcgcagctgtgctggatgccctggaggaacaaggaggcctccagtccctcttctgctaatccccccttggaagccctccagagccccagcttcagaggcaacatggcggacaagctgaaggaccccagcaccctgggcttcctggaggcggccgtgaagatcagccacacgtccccagatatcccagctgaggtgcagatgtcggtcaaggagcacatcatgcgtcacacccggctgcagcggcaaactacagagccagcgtcatccaccaggcacacgtccttcaagcgccacctgccaaggcagatgcatgtctccagtgtagactatggcaatgagcttccaccagcagcagagcagcccaccagcattggccgcatcaagcctgagctctacaagcagaagtcggtggatggggaggatgccaagtctgaggccaccaagagctgcgggaagatcaacttcagcctacgctacgattacgagaccgagaccctgattgtgcgtatcctgaaggcttttgacctccctgccaaggacttttgtggaagctctgacccttatgtcaagatctacctcctgcctgaccgcaaatgcaagctgcagacccgggtgcaccgcaagaccctgaaccccacctttgatgagaacttccacttccctgtgccctatgaggagctggctgaccgcaagctgcatctcagtgtcttcgactttgaccgcttctcccgccatgacatgattggcgaggtcatcctggacaacctctttgaggcctctgacctgtctcgggaaacctccatctggaaggatatccaatatgccacaagtgaaagcgtggacttgggagagatcatgttctccctttgctacctgcccactgcaggcaggctcaccctcacagtgattaagtgtcggaacctcaaggcgatggacatcacaggctattcagatccctatgtgaaagtgtccttgctctgtgatgggcggaggctgaagaagaagaaaacaaccataaagaaaaacactctcaatcctgtctacaatgaggccatcatctttgacattcccccggaaaacatggatcaagtcagcctgctcatctcagtcatggactatgatcgagtgggccacaatgagatcataggagtctgtcgtgtggggatcactgctgaaggcctgggcagggaccactggaacgagatgctggcatacccccggaagcccatcgcacactggcactccttggtggaggtaaagaaatccttcaaagagggaaaccctcggttgtgatttcattcacgtggatgctgcaagcagagagactgccacctggagttaggatggcagggccgagctgctagcttcgacagtgagagctcgtgcccatctccgaaaccacctccaacaccatgagatgtgcagccaaataacacaaatgggactcagcaatgttctctttgcacttgttcaaccgtctaaacagtgttgtgcagtcgcagtggcggcagcagcggcagccgtccgtcactccagagtcttacctgctcctgtgtaggtcaaggctgagacacttgtcatgtggtcagatctgtcttagtcttttgtgtctcccaaggtgatgtttttgtggtttttcactttttatgggtctgctggtaaaaaaaaaaaaaaaaaaaaaaaaaaaaaaa

SEQ ID NO: 3240 - DNA, 5699 bp, Homo sapiens
ggagttctcagacctccagtttcagccctgccctcagcctccaatccgtaagagacacccagccccagcaattggattgggcagcccgtcttgacacaccactgtgctgagtgcttgaggacgtgtttcaacagatggttggggttagtgtgtgtcatcacattcgagtggggattaagagaaggaaggctgccttgctggagctgtgtggtcttctccaagtgagagtcgcaggcaatagaactactttgcttttggaggaaaaggaggaattcattttcagcagacacaagaaaagcagtttttttttcagggattcttcacttctcttgaacaaggaactcactcagagactaacacaaaggaagtaatttcttacctggtcattatttagtctacaataagttcatccttcttcagtgtgaccagtaaattcttcccatactcttgaagagagcataattggaatggagaggtggtgctgacggccacccaccatcatctaaagaagataaacttggcaaatgacatgcaggttcttcaaggcagaataattgcagaaaatcttcaaaggaccctatctgcagatgttctgaatacctctgagaatagagattgattattcaaccaggatacctaattcaagaactccagaaatcaggagacggagacattttgtcagttttgcaacattggaccaaatacaatgaagtattcttgctgtgctctggttttggctgtcctgggcacagaattgctgggaagcctctgttcgactgtcagatccccgaggttcagaggacggatacagcaggaacgaaaaaacatccgacccaacattattcttgtgcctaccgatgatcaagatgtggagctggggtccctgcaagtcatgaacaaaacgagaaagattatggaacatgggggggccaccttcatcaatgcctttgtgactacacccatgtgctgcccgtcacggtcctccatgctcaccgggaagtatgtgcacaatcacaatgtctacaccaacaacgagaactgctcttccccctcgtggcaggccatgcatgagcctcggacttttgctgtatatcttaacaacactggctacagaacagccttttttggaaaatacctcaatgaatataatggcagctacatcccccctgggtggcgagaatggcttggattaatcaagaattctcgcttctataattacactgtttgtcgcaatggcatcaaagaaaagcatggatttgattatgcaaaggactacttcacagacttaatcactaacgagagcattaattacttcaaaatgtctaagagaatgtatccccataggcccgttatgatggtgatcagccacgctgcgccccacggccccgaggactcagccccacagttttctaaactgtaccccaatgcttcccaacacataactcctagttataactatgcaccaaatatggataaacactggattatgcagtacacaggaccaatgctgcccatccacatggaatttacaaacattctacagcgcaaaaggctccagactttgatgtcagtggatgattctgtggagaggctgtataacatgctcgtggagacgggggagctggagaatacttacatcatttacaccgccgaccatggttaccatattgggcagtttggactggtcaaggggaaatccatgccatatgactttgatattcgtgtgcctttttttattcgtggtccaagtgtagaaccaggatcaatagtcccacagatcgttctcaacattgacttggcccccacgatcctggatattgctgggctcgacacacctcctgatgtggacggcaagtctgtcctcaaacttctggacccagaaaagccaggtaacaggtttcgaacaaacaagaaggccaaaatttggcgtgatacattcctagtggaaagaggcaaatttctacgtaagaaggaagaatccagcaagaatatccaacagtcaaatcacttgcccaaatatgaacgggtcaaagaactatgccagcaggccaggtaccagacagcctgtgaacaaccggggcagaagtggcaatgcattgaggatacatctggcaagcttcgaattcacaagtgtaaaggacccagtgacctgctcacagtccggcagagcacgcggaacctctacgctcgcggcttccatgacaaagacaaagagtgcagttgtagggagtctggttaccgtgccagcagaagccaaagaaagagtcaacggcaattcttgagaaaccaggggactccaaagtacaagcccagatttgtccatactcggcagacacgttccttgtccgtcgaatttgaaggtgaaatatatgacataaatctggaagaagaagaagaattgcaagtgttgcaaccaagaaacattgctaagcgtcatgatgaaggccacaaggggccaagagatctccaggcttccagtggtggcaacaggggcaggatgctggcagatagcagcaacgccgtgggcccacctaccactgtccgagtgacacacaagtgttttattcttcccaatgactctatccattgtgagagagaactgtaccaatcggccagagcgtggaaggaccataaggcatacattgacaaagagattgaagctctgcaagataaaattaagaatttaagagaagtgagaggacatctgaagagaaggaagcctgaggaatgtagctgcagtaaacaaagctattacaataaagagaaaggtgtaaaaaagcaagagaaattaaagagccatcttcacccattcaaggaggctgctcaggaagtagatagcaaactgcaacttttcaaggagaacaaccgtaggaggaagaaggagaggaaggagaagagacggcagaggaagggggaagagtgcagcctgcctggcctcacttgcttcacgcatgacaacaaccactggcagacagccccgttctggaacctgggatctttctgtgcttgcacgagttctaacaataacacctactggtgtttgcgtacagttaatgagacgcataattttcttttctgtgagtttgctactggctttttggagtattttgatatgaatacagatccttatcagctcacaaatacagtgcacacggtagaacgaggcattttgaatcagctacacgtacaactaatggagctcagaagctgtcaaggatataagcagtgcaacccaagacctaagaatcttgatgttggaaataaagatggaggaagctatgacctacacagaggacagttatgggatggatgggaaggttaatcagccccgtctcactgcagacatcaactggcaaggcctagaggagctacacagtgtgaatgaaaacatctatgagtacagacaaaactacagacttagtctggtggactggactaattacttgaaggatttagatagagtatttgcactgctgaagagtcactatgagcaaaataaaacaaataagactcaaactgctcaaagtgacgggttcttggttgtctctgctgagcacgctgtgtcaatggagatggcctctgctgactcagatgaagacccaaggcataaggttgggaaaacacctcatttgaccttgccagctgaccttcaaaccctgcatttgaaccgaccaacattaagtccagagagtaaacttgaatggaataacgacattccagaagttaatcatttgaattctgaacactggagaaaaaccgaaaaatggacggggcatgaagagactaatcatctggaaaccgatttcagtggcgatggcatgacagagctagagctcgggcccagccccaggctgcagcccattcgcaggcacccgaaagaacttccccagtatggtggtcctggaaaggacatttttgaagatcaactatatcttcctgtgcattccgatggaatttcagttcatcagatgttcaccatggccaccgcagaacaccgaagtaattccagcatagcggggaagatgttgaccaaggtggagaagaatcacgaaaaggagaagtcacagcacctagaaggcagcgcctcctcttcactctcctctgattagatgaaactgttaccttaccctaaacacagtatttctttttaacttttttatttgtaaactaataaaggtaatcacagccaccaacattccaagctaccctgggtacctttgtgcagtagaagctagtgagcatgtgagcaagcggtgtgcacacggagactcatcgttataatttactatctgccaagagtagaaagaaaggctggggatatttgggttggcttggttttgattttttgcttgtttgtttgttttgtactaaaacagtattatcttttgaatatcgtagggacataagtatatacatgttatccaatcaagatggctagaatggtgcctttctgagtgtctaaaacttgacacccctggtaaatctttcaacacacttccactgcctgcgtaatgaagttttgattcatttttaaccactggaatttttcaatgccgtcattttcagttagatgattttgcactttgagattaaaatgccatgtctatttgattagtcttatttttttatttttacaggcttatcagtctcactgttggctgtcattgtgacaaagtcaaataaacccccaaggacgacacacagtatggatcacatattgtttgacattaagcttttgccagaaaatgttgcatgtgttttacctcgacttgctaaaatcgattagcagaaaggcatggctaataatgttggtggtgaaaataaataaataagtaaacaaaatgaagattgcctgctctctctgtgcctagcctcaaagcgttcatcatacatcatacctttaagattgctatattttgggttattttcttgacaggagaaaaagatctaaagatcttttattttcatcttttttggttttcttggcatgactaagaagcttaaatgttgataaaatatgactagttttgaatttacaccaagaacttctcaataaaagaaaatcatgaatgctccacaatttcaacataccacaagagaagttaatttcttaacattgtgttctatgattatttgtaagaccttcaccaagttctgatatcttttaaagacatagttcaaaattgcttttgaaaatctgtattcttgaaaatatccttgttgtgtattaggtttttaaataccagctaaaggattacctcactgagtcatcagtaccctcctattcagctccccaagatgatgtgtttttgcttaccctaagagaggttttcttcttatttttagataattcaagtgcttagataaattatgttttctttaagtgtttatggtaaactcttttaaagaaaatttaatatgttatagctgaatctttttggtaactttaaatctttatcatagactctgtacatatgttcaaattagctgcttgcctgatgtgtgtatcatcggtgggatgacagaacaaacatatttatgatcatgaataatgtgctttgtaaaaagatttcaagttattaggaagcatactctgttttttaatcatgtataatattccatgatacttttatagaacaattctggcttcaggaaagtctagaagcaatatttcttcaaataaaaggtgtttaaacttt

SEQ ID NO: 3241 - DNA, 4477 bp, Homo sapiens
gacgtcggcggttgccgtggagagacccgctcggtcccgaccgagagctggcgtcaggagccgcagggtcacagcgtgtctttgaagctgcctccgccgccaccatgagcggccgaagtcggggtcgaaagtcctcccgcgccaaaaaccggggcaaaggccgcgccaaagcccgagtccgccctgctccggacgacgccccgcgcgacccggacccttcacagtaccagagtctcggggaagacacccaggcggcacaggtgcaggctggcgcggggtggggtggcctggaagccgctgcgtccgcgcagctcctccggctcggggaggaggccgcctgccggctccccctggactgtggcctcgcgctgcgggcccgagctgcgggggaccacgggcaggccgcggccaggcccggcccggggaaggccgcatctctctcggagcgcctggccgcagacactgtcttcgtgggaacagcgggaaccgtgggaaggccgaaaaatgccccccgcgttggaaaccggcgtggccctgccgggaagaaggccccagaaacctgtagcaccgcggggagggggcctcaggtcatagctggtgggaggcagaagaaaggggcggcaggggagaatacctcggtgtcagctggggaggaaaagaaggaagagagggatgcagggtcggggcccccagcgacggaaggcagcatggatacgctggagaacgtgcagctgaagctggagaacatgaacgcccaggcggacagggcctaccttcggctctccaggaagtttgggcagttgcgactgcagcacttggagcgcaggaaccacctcatccaaaatatcccgggcttctgggggcaagcatttcagaaccatccccagctagcatcctttctgaatagccaagagaaagaggtactgagctacttaaacagcttggaagtggaagagctcggccttgccagattgggctacaaaatcaagttctacttcgatcgcaacccgtatttccaaaataaggtgctcatcaaggaatatgggtgtggtccttctggccaggtggtgtctcgttctactccaatccagtggctcccagggcatgatctccagtccctaagccagggaaacccagaaaacaaccgtagtttctttgggtggttttcaaaccacagctccattgagtctgacaaggttgtggagataatcaacgaagaattgtggcccaatcccttgcagttctaccttttgagtgaaggggctcgtgtagagaaaggaaaggaaaaagaaggcaggcaaggtccaggaaagcagccaatggagactactcagcctggggtgagccaatccaactgatcctgcacaagtctccctgctacctcctgctgggctgctcctggttgactacatatttggctctctgccttctcttcatgttggcctctgtgtactatagaccctttggactttagttacaagaatatggcatttatgatcatgttcttttgcctcccatagcctcttgcttttctacgttagtgtcacatgttatgtgatcgcacccggactgttcatatgttaagcacacatactttagatgtgtgctccctgttatctacattgcctggaccttgttcttggctctggcctttcctacttgtctttaacatggacactcatgagtcatcctccaggacgaccagtgcatcctcaagctctgctccttcagggccagtgacttgctgggcttcgtgttcatgctggccatgcatgtcatctatgcaagcgtttccattgccactgcagaatgaagccagtgcacatggtattagtcatcagccagaacttcctgttctgtgggtctggggtcaccagctgagatgtcacctgctttatttctggctttggcctgtggtctgtgatacccatcctgcttgatgttctgcagaatggcacttgactgctgggcatgcatgaagttaagggcaagaaacagtatgccatgtgttctgtaccatcatgtgtctcttcttccttctgggcccttctactggtgaactttcatcaagatctgcgccatgccgtgtcactatcaagccattaagttttgtctgggttgctgtcagccccagttggcttcctggtcaacaaggacctcaagaactgcctgtggaccgaggccccctaccagtgcatgagacacacacctaccctccccagctttccaggaaccctactggctgccagactgatgggcgggctggtatgtgtggacatgtgttcactgtcattatgctgtggctccaggtgagggtgaggactgggcctatatagaatccagatatcattgtcaacttcccttattcccgtctaagatgtgtgcagagtgccatagtaggggttctgggaagaggtatttctgatttgtgggcctctgcttgcttgacttcaggtcacttatacttcttattttgcttgcctgccttcatccctcatttcctccctctcattcttctttcctccctccctttcctggtagcctcctttcctccccttctgccttccccttccttctttccttattcttttttattttgtttaaatagtaccacagagaaaacaactgaaaaaccacatttttctacatacagctggggaggtagctgagaacttggcactgcgcacacatactaggttgaaagagagttgaggaaaccagaaggccaagtggatctgctggcaaaccctgaacctgtctcctgcgcttgctctacagttctgaagttgaaaatccttttcatgcctagcatctgcttgagttataaaccccaaggcagccatgtcatagactagtgtttactcttgttttgactttgttttaatgcttcctaagacccaagtgcctcctgctgtttcctcctttgtggtagcctctggccatctggacctcaatccccagctttcccactttcagcagtcctttgctctctttgcttctacctcaaatagccccaggagtgggctttagtctccaatatggagcatctcaagcttctcctgggggatggggattgggatgggcagaatctgttttggatctccgggttatttccagtgggtgtaaaagcagagctgggcctttccctctcttatccctgagggtgggtaagaaggactgtatctacacctgttcttccctaccttctcttttgttagggaggcctcattctaagttcctcaagagagtccttggcttaaagctgtagcaagggtgtgctaggtgggggatttggagcaaaaccgtcgagtaggcatgatactggtatggagtggcctgcaaaatcagacagaaatggcttgagaagccgcagggggagcatgcctgtctctcagtgatagagtatgggagggacctccctagcttggaaaatgagaattgaaggggttatgaacaaataggatgcctagttgaggatgttcccaaagttttgtccaatcttatcattagtagattttataagccacagagacaaaccagaaacggaataatgttactttggatgctttatttttttgttctaggtgtggctttgtacatgcagaagaatgctatatgctgcacattttgcctttaaagtcttacgactttccccattttagtctaatgggaagatacagatgtgcaagtctgcttttttgttttttgttattatttttttttttttgctctgtgttatggacattttcagacatgcacagaagtggagaggatggtccttggaccccatgtgtccatcacctagctgcatcacttatcagctatggtcaacctggtttcatctgtatctctctcttttcacctgtattgtttattgaaaatccaagacactatgccaatgcaaccgtgactactttgggagattggtagtctcttttgatggtgatagtgatggggtgcactatcataatcacatcaggtctgctttttgcttttaatgttaactaatgaagttccagagatgggccttagaaatgtgttttaagaattaacaaggagtctcaaaaagaaatgagagggatgcttcctttcccttgcatctacaaaacaagagagagactgttctgttgtaaaactctttcaaaaattctgatatggtaaggtacttgagacccttcaccagaatgtcaatctttttttctgtgtaacatggaaacttgtgtgaccattagcattgttatcagcttgtactggtctcataactctggttttggaagaataatttggaaattgttgctgtgttctgtgaaaataacctccccaaaataattagtaactggttgttctacttggtaatttgacaccctgttaataacgcaattatttctgtgttcttaaacagtataaatagttgtaagtttgcatgcatgatggaaaaataaaaacctgtatctctgttataaaaaaaaaaaaaaaa

SEQ ID NO: 3242 - DNA, 2366 bp, Homo sapiens
gtttgaatccaaagtccacggcactcctaaccgctgctcaacgctgccccacaagaacgtccagctggcaagacccgggtggggctcgttgctctccccgcttcacctccctgcttcacggccgggggtgtgctggctaagttcgctcatctgccaagcttcgggacacagacctatgtgagcaagcgataaacaaatgcaaataaatgtaactttccacattagctaaaaattcagagaacgtcaagcccagggaaatgggacggatcccagttagcccgcggctccaatctggtccccccccaaccccgagcctcgcggcgagaaaggaagcggctccggatggagagtaaagtgacaatcggagaagggcaggctgcctttcctcccgggggagccaaggggacctgcagagggcggtttctccccgcttttcctgtcccaccccgtcggcctgccccccaccccctccggcctctgcgccaaccccgcgcgccacccgcggcttcctccgctcggggtcctcgctcggcctctgctggcctccgcgactccgcggtgcccgcccccgttgagttcaaaaggacgcgcggagcggcgccggcccttcaccagcagcccgtccgactggaaagatctgcctcttctccaagaaactcaaccactagtgacaatgaccagcctcctgactactccttctccaagagaagaactgatgaccaccccaattttacagcccactgaggccctgtccccagaagatggagccagcacagcactcattgcagttgttatcaccgttgtcttcctcaccctgctctcggtcgtgatcttgatcttcttttacctgtacaagaacaaaggcagctacgtcacctatgaacctacagaaggtgagcccagtgccatcgtccagatggagagtgacttggccaagggcagcgagaaagaggaatatttcatctaatgactcccaggccccaaggagcttattcctggctccatcgctaacacgttgactgcttattatgggaaagttttctctgaagccagggagaagcattgattgatgtgggcaaatccaagctccagccaggtcgcagtcccaaatgccgacatcactgactccagggaccagggacatggagaaagctgtttatgatatctttaaccaggccctcttactagagctggtgtttgtgactggccaacaagatgtggctatgccaggggacatctgagtatgtgcccagtcatcttttttcacaggttgaagggagagaaaagattttgagttaaggtcattggctgctctactctgtcccctacctggtcacctagtgatagccccagtggagatactgtccatacaaggtcttcccagaggctggataccacagtaaaaggccaggccaggaggggtaggagactatggagatcttacctcctgataaatgtgctacaccccctaatctgagcccttcctttccgtgttccccaacaacctcatgcttacgtgatttttattcaaattaaaaattttcattgctacagaaatcagattctcatgtgcaagaagtaactacattttgacttatttttgcttaaacatttttgacattttcttttccctatttaacgcctttacatatgttctcttccaagcaataagaaccctaggaaagttctagaagtttgcagaactatctcagggatttgagacaaagatggtgcaggaaagcttgttccaggggaacatcattagaaacataccctgggagggccgggttcggtggctcacgcctgtgatcccagcactttgggaggccgaggcaggcggatcacaaggttaggagatcgagaccatcctggctaacacggtgaaaccccgtctctactaaaaatataaaaaaaaaatagctgggcgtggtggcgggcgcccatagtcccagctgcttgggaggctgaggcaggagaatggcttgaacccaggaggcggagcttgcagtgagctgagattgcaccactatactccagcctgggcaacagagtgagactccgtctcaaaaaaaaaaaaaaaaaaaaaaaaagtaccctgggagatgagttggttcaagcctccatcctggcaagggccagaatttcccagaatcccttctacatatatacagaaggaaccagaaaaaatcaacctaccacctttcccagtgtatcctcagaatcaagccaagaagcttcttggattttagtctcaagataagttgtgtttaaaaggcacattttggtataaattattagctcatcagatattgttcactttggaattaaagctagatctcctttgaagtctcaaaaaaaaaaaaaaa

SEQ ID NO: 3243 - DNA, 2351 bp, Homo sapiens
caaacccggaagcgggtcgcgtggagtgacggtcccaccgcggggatatctcttccaaatgcatgatgaaggagttctcatccacagcgcaaggcaatacagaagtgatccacacagggacattgcaaagacatgaaagtcatcacattagagatttttgcttccaggaaattgagaaagatattcataactttgagtttcagtggcaagaagaggaaaggaatggtcacgaagcacccatgacagaaatcaaagagttgactggtagtacagaccgacatgatcaaaggcatgctggaaacaagcctattaaagatcagcttggatccagctttcattcgcatctgcctgaactccacatatttcagcctgaatggaaaattggtaatcaagttgagaagtctatcatcaatgcctccttaattttgacatcccaaagaatttcttgtagtcccaaaacccgtatttctaataactatgggaataattccctccattcttcattacccatacaaaaattgggaagtacacatgagagaaaaatctttccaatgtaatgagagtggcaaatcctttaattatagctaactcttaaggaaatatcagataatccatttaggatagaaacaatataaatgtgaggtatgtgacaaggtctttaatcagaattgattccttgtatgccataatagatgtcacactggtaagaaaccttacagttgttatgagtgtggcaagaccttcagtcagacgtcatcctttacatgctatcgtagacttcatactggagggaaaccttacaagtgtagtgagcataacaagacctttggttgaaattcagcccttgtaattcataaggcaattcatactggagagaatccttgcaagtgtaatgaatgtggcaaggtttttaatcagaaagcacaccttgcacgtcatcatagacttcatactagagagaagccttacaaatgtgaagaatgtgaaaaagttttcagtcgcaaatcacatcttgaaagacaaaacttaaaagaggtggcgttgcccttgtttttgagaatgccctactgtgtaagtggtagtgttctttctttttttttttttttttaagacggagtctcacctgagcgagcctctgcactggccttatttattattgttattaattttttgtttttgagacggagtttcactcttattgcccaggctggagtgcaatggtgcaatcttggctcactgcaccctctgtctgttgggctcaagcgtttctcttgcctcagcctcccaagtagctgggactacaggtgcatgccaccacgcctggttaatttttgtatttatagtggagatggggtttctccatattggtcaggctggtcttgaacccttgacctcaggtcatccacccgcctcggccttccaaaacgctggatttacaggcttgagccacgcgtccggcctgaagtggtattttttagaaagtaactaaaccttttttcagtttaatgacccagggatgtatttctgaaggacttgggagcgatccttttaaggcaaacaagggagatagtacctgtatcttagtaggaaattaaataattcaaacatcaaatgtttcaaattaaaagctaccgacctttaaataattctgagccttgagaggaacgtggtcatgcaacaagagtccagtggcatgcaggcacaaggttttttgttttttgttttttgtttttttttgagacagcctcgctctgtcgcccaagctgaagtgcagtggtgcgatctcggctcgctgcaggctccgcctcctgggttcaggtcattttcctgtctcagcctccccagtagctgggactccaggcacccaccaccactcccggctaattttttgtatttttagtacagacggggtttcactgtgttagccaggatggtcttgatctcctgaccttgtgatccacccacctcggcctcccaaagtgctgggattacaggcatgaatgaccgcgcccagccgcaggcgcaacttttttgagttttcctggccaggcgcggtggctcaagcctgtaatcccagcattttgggaggccgaggtgggcggatcacttgaggtcaggagttagaaaccagcctggccaacgtggtgaaaccccgtctccagtaaacatacaaagccattacagggcatggtggggcacgcctgtattcccagctacttgggaggctgaggcaggagaactgcttgatccggggaggtggaggttgcagtgggccaagatcatgccactgcaccccagcctgggcaacagagcaagactccgtaccaaaaaaaaaaaaaaaaaaaaaaaaa

SEQ ID NO: 3244 - DNA, 1887 bp, Homo sapiens
gctgcagaagctgccgccacctccaatgcacaaggtgtctcatctgaaaagaaacctgagccccagggaggcggcgcggagcgaccctggcagagctggcgcaaacagggcgagaggtcgctgggcagcgttcgaggaccagagggagctcggccacagaagaccccagtgatctgatcccgggatcccggctccaagctctcctcgcattttacagatttcacccccgcgactatctccccaaaacggagcctttatatcaagagaaggtgcgggagctggggcaaccaggactttctcgggcacccaagatgcgctccattaggaagaggtggacgatctgcacaataagtctgctcctgatcttttataagacaaaagaaatagcaagaactgaggagcaccaggagacgcaactcatcggagatggtgaattgtctttgagtcggtcacttgtcaatagctctgataaaatcattcgaaaggctggctcttcaatcttccagcacaatgtagaaggttggaaaatcaattcctctttggtcctagagataaggaagaacatacttcgtttcttagatgcagaacgagatgtgtcagtggtcaagagcagttttaagcctggtgatgtcatacactatgtgcttgacaggcgccggacactaaacatttctcatgatctacatagcctcctacctgaagtttcaccaatgaagaatcgcaggtttaagacctgtgcagttgttggaaattctggcattctgttagacagtgaatgtggaaaggagattgacagtcacaattttgtaataaggtgagctttcttctgctttttgagattgtaagtttttcaaagatattttacttgggggtggaaaactgttagaaaattttaaagtattactaaaacctcaaacaaatatttgtctatgatatccttttctgtgcaacatttaaattacatttaccctggaatagaatattataattattgcgtagttgaaagaaaaagtgatcctgtcatagcaacaagattcacacagctttttttggtgaggtgaggggggaggcaaatggcaattttattaaatttaatattccacacaaacttttttcttagtatctcttcttcatactcattagttttgtgtgattttatttgttgtataaagattatgaatattactatggaatgatgtaatagatttatgttaatgttactttttattaataattatctaggagatagtaagaacatagtttagcaagtttatatttgatatcctgagccatatttctttaatttctctttatatgtggtatttgtgtatgttagtatatttgaattttatgtttttttaacataattaagcgtgcatgtttgtttttcattaacggttaaaagatatttgatgaattgtgtgtttgattaacctattaactgaaaaaaactcaacagtagaaatggaattataatcacatcataaatataagcagtttttaatgatcaatttttatatctgtacagtttttttggattgttttagttccttagaaaaattagctaaatgacagaaacatggatattgaaatatgaaatagtacaatataaagatagatagaaaagtatgctgagttgacatgttgaaaaacacagtctcttgaagatatactggaatacattatttttgaatattttgaatattttttgaatatttttaaataaagtcttaaaagcataaataggtaactacttttaaaaaaaaagtcatgagaaatcacactcaagcattatcaagtgaagaaaattcataatagcaaataaaactgcaaacattttaccttaaaaaaaaaaaaaaaaaaaaaaaaaaaaaaaaaaaaaaaaaa

SEQ ID NO: 3245 - DNA, 2066 bp, Homo sapiens
aagtggcttcagagatgcagccctcagtgcttaacgtcctagttattgtccttgaaacccgagccatctcaccgctcgcccccaaccctgggctctggctgtttaaaagctggagaggaagtgaaagcgtcaagtacatcccgttaggtgcaaagcaagtctcgttgatcgccattgctagttttgcacacgtttgcgaatcagagctgcccggggtacaccgaccgcgcagggaaacatcgagagtgtaaataaatacatcgcctcttgttcggatttttgctactaccgaaaatatgtaaattgtgaactctgttggctctctttggatccaggttgatagaagtccagatcctgaggaaatctccagctaaatgctcaaaatataaaaactgagctgagatttgcgaagagcagcagcatggatggattttatgaccagcaagtgccttacatggtcaccaatagtcagcgtgggagaaattgtaacgagaaaccaacaaatgtcaggaaaagaaaattcattaacagagatctggctcatgattcagaagaactctttcaagatctaagtcaattacaggaaacatggcttgcagaagctcaggtacctgacaatgatgagcagtttgtaccagactatcaggctgaaagtttggcttttcatggcctgccactgaaaatcaagaaagaaccccacagtccatgttcagaaatcagctctgcctgcagtcaagaacagccctttaaattcagctatggagaaaagtgcctgtacaatgtcagtgcctatgatcagaagccacaagtgggaatgaggccctccaacccccccacaccatccagcacgccagtgtccccactgcatcatgcatctccaaactcaactcatacaccgaaacctgaccgggccttcccagctcacctccctccatcgcagtccataccagatagcagctaccccatggaccacagatttcgccgccagctttctgaaccctgtaactcctttcctcctttgccgacgatgccaagggaaggacgtcctatgtaccaacgccagatgtctgagccaaacatccccttcccaccacaaggctttaagcaggagtaccacgacccagtgtatgaacacaacaccatggttggcagtgcggccagccaaagctttccccctcctctgatgattaaacaggaacccagagattttgcatatgactcagaagtgcctagctgccactccatttatatgaggcaagaaggcttcctggctcatcccagcagaacagaaggctgtatgtttgaaaagggccccaggcagttttatgatgacacctgtgttgtcccagaaaaattcgatggtttttcaaatgttgccatttctgtaattattttaagaggtatatgtctctctactgacaataggagacatcaaacaagagccaggaatgtatcgggaaggacccacataccaacggcgaggatcacttcagctctggcagtttttggtagctcttctggatgacccttcaaattctcattttattgcctggactggtcgaggcatggaatttaaactgattgagcctgaagaggtggcccgacgttggggcattcagaaaaacaggccagctatgaactatgataaacttagccgttcactccgctattactatgagaaaggaattatgcaaaaggtggctggagagagatatgtctacaagtttgtgtgtgatccagaagcccttttctccatggcctttccagataatcagcgtccactgctgaagacagacatggaacgtcacatcaacgaggaggacacagtgcctctttctcactttgatgagagcatggcctacatgccggaagggggctgctgcaacccccacccctacaacgaaggctacgtgtattaacacaagtgacagtcaagcagggcgtttttgcgcttttccttttttctgcaagatacagagaattgctgaatctttgttttatttctgttgtttgtattttatttttaaataataatacacaaaaaggggccaaaaaaaaaaaaaaaa

SEQ ID NO: 3246 - DNA, 1541 bp, Homo sapiens
gtcccagtgaggacagggacacagtactcggccacaccatggggcgcccactgcacctcgtcctgctcagtgcctccctggctggcctcctgctgctcggggaaagtctgttcatccgcagggagcaggccaacaacatcctggcgagggtcacgagggccaattcctttcttgaagagatgaagaaaggacacctcgaaagagagtgcatggaagagacctgctcatacgaagaggcccgcgaggtctttgaggacagcgacaagacgaatgaattctggaataaatacaaagatggcgaccagtgtgagaccagtccttgccagaaccagggcaaatgtaaagacggcctcggggaatacacctgcacctgtttagaaggattcgaaggcaaaaactgtgaattattcacacggaagctctgcagcctggacaacggggactgtgaccagttctgccacgaggaacagaactctgtggtgtgctcctgcgcccgcgggtacaccctggctgacaacggcaaggcctgcattcccacagggccctacccctgtgggaaacagaccctggaacgcaggaagaggtcagtggcccaggccaccagcagcagcggggaggcccctgacagcatcacatggaagccatatgatgcagccgacctggaccccaccgagaaccccttcgacctgcttgacttcaaccagacgcagcctgagaggggcgacaacaacctcaccaggatcgtgggaggccaggaatgcaaggacggggagtgtccctggcaggccctgctcatcaatgaggaaaacgagggtttctgtggtggaactattctgagcgagttctacatcctaacggcagcccactgtctctaccaagccaagagattcaaggtgagggtaggggaccggaacacggagcaggaggagggcggtgaggcggtgcacgaggtggaggtggtcatcaagcacaaccggttcacaaaggagacctatgacttcgacatcgccgtgctccggctcaagacccccatcaccttccgcatgaacgtggcgcctgcctgcctccccgagcgtgactgggccgagtccacgctgatgacgcagaagacggggattgtgagcggcttcgggcgcacccacgagaagggccggcagtccaccaggctcaagatgctggaggtgccctacgtggaccgcaacagctgcaagctgtccagcagcttcatcatcacccagaacatgttctgtgccggctacgacaccaagcaggaggatgcctgccagggggacagcgggggcccgcacgtcacccgcttcaaggacacctacttcgtgacaggcatcgtcagctggggagagggctgtgcccgtaaggggaagtacgggatctacaccaaggtcaccgccttcctcaagtggatcgacaggtccatgaaaaccaggggcttgcccaaggccaagagccatgccccggaggtcataacgtcctctccattaaagtgagatcccactcaaaaaaaaaaaaaaaaaaaaaaaaaa

SEQ ID NO: 3247 - DNA, 2561 bp, Homo sapiens
cctgcctgcccttcgggcacctcaggaaggcaccttcctctgtcagaatggccaccatggtaccatccgtgttgtggcccagggcctgctggactctgctggtctgctgtctgctgaccccaggtgtccaggggcaggagttccttttgcgggtggagccccagaaccctgtgctctctgctggagggtccctgtttgtgaactgcagtactgattgtcccagctctgagaaaatcgccttggagacgtccctatcaaaggagctggtggccagtggcatgggctgggcagccttcaatctcagcaacgtgactggcaacagtcggatcctctgctcagtgtactgcaatggctcccagataacaggctcctctaacatcaccgtgtacaggctcccggagcgtgtggagctggcacccctgcctccttggcagccggtgggccagaacttcaccctgcgctgccaagtggaggatgggtcgccccggaccagcctcacggtggtgctgcttcgctgggaggaggagctgagccggcagcccgcagtggaggagccagcggaggtcactgccactgtgctggccagcagagacgaccacggagcccctttctcatgccgcacagaactggacatgcagccccaggggctgggactgttcgtgaacacctcagccccccgccagctccgaacctttggtgagagaaggggcttcagacggtgggtgacgagctgagccagggtagacggtgccctgaccttggggttcctgagagtggggtaccccggacctcacaggcttctgggaaggaaagcccccggccactgggcaaggtggccccggaagggaggcccgagccgtgggatctttgaagaaggccgttttcatggccctgtgtgtgtgtcctgtgaagaagggtgacccagtcagcaagatatcctgactgggggggatgagggtgtcctggggaaggcacagtcctgggggttgtactatgcccacctttctccccagtcctgcccgtgacccccccgcgcctcgtggccccccggttcttggaggtggaaacgtcgtggccggtggactgcaccctagacgggctttttccagcctcagaggcccaggtctacctggcgctgggggaccagatgctgaatgcgacagtcatgaaccacggggacacgctaacggccacagccacagccacggcgcgcgcggatcaggagggtgcccgggagatcgtctgcaacgtgaccctagggggcgagagacgggaggcccgggagaacttgacggtctttagtaagaggaggcgtgggaagggggcgcggcctcagcagtctgggggcgtggcagagggggcggagactagccgaaaaggtggggcctggcttgccccaatagcagttgcaacgtgggttgggcctgagtgcccgaagctggacacagcgcggaaagagggcgaggcttgaacggccgaaagcgtggcccggatatcccgagaggaaaggggagggcggagggagcggcttgacccacaggaaggtcctgttcattaagctcctgggcaatgccccgcctttaggcttcctaggacccattgtgaacctcagcgagcccaccgcccatgaggggtccacagtgaccgtgagttgcatggctggggctcgagtccaggtcacgctggacggagttccggccgcggccccggggcagccagctcaacttcagctaaatgctaccgagagtgacgacggacgcagcttcttctgcagtgccactctcgaggtggacggcgagttcttgcacaggaacagtagcgtccagctgcgagtcctgtgtgagtcggtcaccctgacctttaatccctccacccctgccctggaaagattagacgctcctctgcaccactgtgcctcgggtttgttgggtgtctgatcacacatggtggttccacagatggtcccaaaattgaccgagccacatgcccccagcacttgaaatggaaagataaaacgagacacgtcctgcagtgccaagccaggggcaacccgtaccccgagctgcggtgtttgaaggaaggctccagccgggaggtgccggtggggatcccgttcttcgtcaacgtaacacataatggtacttatcagtgccaagcgtccagctcacgaggcaaatacaccctggtcgtggtgatggacattgaggctgggagctcccactttgtccccgtcttcgtggcggtgttactgaccctgggcgtggtgactatcgtactggccttaatgtacgtcttcagggagcaccaacggagcggcagttaccatgttagggaggagagcacctatctgcccctcacgtctatgcagccgacagaagcaatgggggaagaaccgtccagagctgagtgacgctgggatccgggatcaaagttggcgggggcttggctgtgccctcagattccgcaccaataaagccttcaaactccctaaaaaaaaaaaaaaaaaaaaaaaaaaaaaaaaaaaaaaaaaaaaaaaaaaaaaaaaaaaaaaaaaaaaaaaa

SEQ ID NO: 3248 - DNA, 2052 bp, Homo sapiens
gcaaagagaaaggaagcaggcccgttggaagtggttgtgacaaccccagcaatgtggagaagcctggggcttgccctggctctctgtctcctcccatcgggaggaacagagagccaggaccaaagctccttatgtaagcaacccccagcctggagcataagagatcaagatccaatgctaaactccaatggttcagtgactgtggttgctcttcttcaagccagctgatacctgtgcatactgcaggcatctaaattagaagacctgcgagtaaaactgaagaaagaaggatattctaatatttcttatattgttgttaatcatcaaggaatctcttctcgattaaaatacacacatcttaagaataaggtttcagagcatattcctgtttatcaacaagaagaaaaccaaacagatgtctggactcttttaaatggaagcaaagatgacttcctcatatatgatagatgtggccgtcttgtatatcatcttggtttgcctttttccttcctaactttcccatatgtagaagaagccattaagattgcttactgtgaaaagaaatgtggaaactgctctctcacgactctcaaagatgaagacttttgtaaacgtgtatctttggctactgtggataaaacagttgaaactccatcgcctcattaccatcatgagcatcatcacaatcatggacatcagcaccttggcagcagtgagctttcagagaatcagcaaccaggagcaccaaatactcctactcatcctgctcctccaggccttcatcaccaccataagcacaagggtcagcataggcagggtcacccagagaaccgagatatgccagcaagtgaagatttacaagatttacaaaagaagctctgtcgaaagagatgtataaatcaattactctgtaaattgcccacagattcagagttggctcctaggagctgatgctgccattgtcgacatctgatatttgaaaaaacagggtctgcaatcacctgacagtgtaaagaaaacctcccatctttatgtagctgacagggacttcgggcagaggagaacataactgaatcttgtcagtgacgttttcctccagctgcctgacaaataagtcagcagcttatacccacagaagccagtgccagttgacgctgaaagaatcaggcaaaaaagtgagaatgaccttcaaactaaatatttaaaataggacatactccccaatttagtctagacacaatttcatttccagcatttttataaactaccaaattagtgaaccaaaaatagaaatcagatttgtgcaaacatggagaaatctactgaattggcttccagattttaaattttatgtcatagaaatattgactcaaaccatattttttatgatggagcaactgaaaggtgattgcagcttttggttaatatgtcttttttttttctttttccagtgttctatttgctttaatgagaatagaaacgtaaactatgacctaggggtttctgttggataattagcagtttagaatggaggaagaacaacaaagacatgctttccatttttttctttacttatctctcaaaacaatattactttgtcttttcaatcttctacttttaactaataaaataagtggattttgtattttaagatccagaaatacttaacacgtgaatattttgctaaaaaagcatatataactattttaaatatccatttatcttttgtatatctaagactcatcctgatttttactatcacacatgaataaagcctttgtatctttctttctctaatgttgtatcatactcttctaaaacttgagtggctgtcttaaaagatataaggggaaagataatattgtctgtctctatattgcttagtaagtatttccatagtcaatgatggtttaataggtaaaccaaaccctataaacctgacctcctttatggttaatactattaagcaagaatgcagtacagaattggatacagtacggatttgtccaaataaattcaataaaaaccttaaagctgaaaaaaaaaaaaaaa

SEQ ID NO: 3249 - DNA, 4353 bp, Homo sapiens; identical to SEQ ID NO: 1696

SEQ ID NO: 3250 - DNA, 4293 bp, Homo sapiens
acccactcccgctgccccgtccggcccgcgccgcttcctcgcagcagctgctcccggctccgcggccgcagcccgcgtggacgctccgagcgccccccgacggacgggaccggctccctggcggtcgggcgagcgggcggcaacgctgcccggccggcagcgctggggttaagtggcccaagtaaacctagctcggcgatcggcgccggagattcgcgagcccagcgccctgcacggccgccagccggcctcccgccagccagccccgacccgcggctccgccgcccagccgcgccccagccagccctgcggcaggaaagcatgaagggagacaccaggcatctcaatggagaggaggacgccggcgggagggaagactcgatcctcgtcaacggggcctgcagcgaccagtcctccgactcgcccccaatcctggaggctatccgcaccccggagatcagaggccgaagatcaagctcgcgactctccaagagggaggtgtccagtctgctaagctacacacaggacttgacaggcgatggcgacggggaagatggggatggctctgacaccccagtcatgccaaagctcttccgggaaaccaggactcgttcagaaagcccagctgtccgaactcgaaataacaacagtgtctccagccgggagaggcacaggccttccccacgttccacccgaggccggcagggccgcaaccatgtggacgagtcccccgtggagttcccggctaccaggtccctgagacggcgggcaacagcatcggcaggaacgccatggccgtcccctcccagctcttaccttaccatcgacctcacagacgacacagaggacacacatgggacgccccagagcagcagtaccccctacgcccgcctagcccaggacagccagcaggggggcatggagtccccgcaggtggaggcagacagtggagatggagacagttcagagtatcaggatgggaaggagtttggaataggggacctcgtgtggggaaagatcaagggcttctcctggtggcccgccatggtggtgtcttggaaggccacctccaagcgacaggctatgtctggcatgcggtgggtccagtggtttggcgatggcaagttctccgaggtctctgcagacaaactggtggcactggggctgttcagccagcactttaatttggccaccttcaataagctcgtctcctatcgaaaagccatgtaccatgctctggagaaagctagggtgcgagctggcaagaccttccccagcagccctggagactcattggaggaccagctgaagcccatgttggagtgggcccacgggggcttcaagcccactgggatcgagggcctcaaacccaacaacacgcaaccagagaacaagactcgaagacgcacagctgacgactcagccacctctgactactgccccgcacccaagcgcctcaagacaaattgctataacaacggcaaagaccgaggggatgaagatcagagccgagaacaaatggcttcagatgttgccaacaacaagagcagcctggaagatggctgtttgtcttgtggcaggaaaaaccccgtgtccttccaccctctctttgagggggggctctgtcagacatgccgggatcgcttccttgagctgttttacatgtatgatgacgatggctatcagtcttactgcactgtgtgctgcgagggccgagagctgctgctttgcagcaacacgagctgctgccggtgtttctgtgtggagtgcctggaggtgctggtgggcacaggcacagcggccgaggccaagcttcaggagccctggagctgttacatgtgtctcccgcagcgctgtcatggcgtcctgcggcgccggaaggactggaacgtgcgcctgcaggccttcttcaccagtgacacggggcttgaatatgaagcccccaagctgtaccctgccattcccgcagcccgaaggcggcccattcgagtcctgtcattgtttgatggcatcgcgacaggctacctagtcctcaaagagttgggcataaaggtaggaaagtacgtcgcttctgaagtgtgtgaggagtccattgctgttggaaccgtgaagcacgaggggaatatcaaatacgtgaacgacgtgaggaacatcacaaagaaaaatattgaagaatggggcccatttgacttggtgattggcggaagcccatgcaacgatctctcaaatgtgaatccagccaggaaaggcctgtatgagggtacaggccggctcttcttcgaattttaccacctgctgaattactcacgccccaaggagggtgatgaccggccgttcttctggatgtttgagaatgttgtagccatgaaggttggcgacaagagggacatctcacggttcctggagtgtaatccagtgatgattgatgccatcaaagtttctgctgctcacagggcccgatacttctggggcaacctacccgggatgaacaggcccgtgatagcatcaaagaatgataaactcgagctgcaggactgcttggaatacaataggatagccaagttaaagaaagtacagacaataaccaccaagtcgaactcgatcaaacaggggaaaaaccaacttttccctgttgtcatgaatggcaaagaagatgttttgtggtgcactgagctcgaaaggatctttggctttcctgtgcactacacagacgtgtccaacatgggccgtggtgcccgccagaagctgctgggaaggtcctggagcgtgcctgtcatccgacacctcttcgcccctctgaaggactactttgcatgtgaatagttccagccaggccccaagcccactggggtgtgtggcagagccaggacccaggaggtgtgattcctgaaggcatccccaggccctgctcttcctcagctgtgtgggtcataccgtgtacctcagttccctcttgctcagtgggggcagagccacctgactcttgcaggggtagcctgaggtgccgcctccttgtgcacaaatcagacctggctgcttggagcagcctaacacggtgctcattttttcttctcctaaaactttaaaacttgaagtaggtagcaacgtggctttttttttttcccttcctgggtctaccactcagagaaacaatggctaagataccaaaaccacagtgccgacagctctccaatactcaggttaatgctgaaaaatcatccaagacagttattgcaagagtttaatttttgaaaactggctactgctctgtgtttacagacgtgtgcagttgtaggcatgtagctacaggacatttttaagggcccaggatcgttttttcccagggcaagcagaagagaaaatgttgtatatgtcttttacccggcacattccccttgcctaaatacaagggctggagtctgcacgggacctattagagtattttccacaatgatgatgatttcagcagggatgacgtcatcatcacattcagggctattttttcccccacaaacccaagggcaggggccactcttagctaaatccctccccgtgactgcaatagaaccctctggggagctcaggaaggggtgtgctgagttctataatataagctgccatatattttgtagacaagtatggctcctccatatctccctcttccctaggagaggagtgtgaagcaaggagcttagataagacaccccctcaaacccattccctctccaggagacctaccctccacaggcacaggtccccagatgagaagtctgctaccctcatttctcatctttttactaaactcagaggcagtgacagcagtcagggacagacatacatttctcataccttccccacatctgagagatgacagggaaaactgcaaagctcggtgctccctttggagattttttaatccttttttattccataagaagtcgtttttagggagaacgggaattcagacaagctgcatttcagaaatgctgtcataatggtttttaacaccttttactcttcttactggtgctattttgtagaataaggaacaacgttgacaagttttgtggggctttttatacactttttaaaatctcaaacttctatttttatgtttaacgttttcattaaaattttttttgtaactggagccacgacgtaacaaatatggggaaaaaactgtgccttgtttcaacagtttttgctaatttttaggctgaaagatgacggatgcctagagtttaccttatgtttaattaaaatcagtatttgtctaaaaaaaaaaaaaaaaaa

SEQ ID NO: 3251 - DNA, 4104 bp, Homo sapiens
acccactcccgctgccccgtccggcccgcgccgcttcctcgcagcagctgctcccggctccgcggccgcagcccgcgtggacgctccgagcgccccccgacggacgggaccggctccctggcggtcgggcgagcgggcggcaacgctgcccggccggcagcgctggggttaagtggcccaagtaaacctagctcggcgatcggcgccggagattcgcgagcccagcgccctgcacggccgccagccggcctcccgccagccagccccgacccgcggctccgccgcccagccgcgccccagccagccctgcggcaggaaagcatgaagggagacaccaggcatctcaatggagaggaggacgccggcgggagggaagactcgatcctcgtcaacggggcctgcagcgaccagtcctccgactcgcccccaatcctggaggctatccgcaccccggagatcagaggccgaagatcaagctcgcgactctccaagagggaggtgtccagtctgctaagctacacacaggacttgacaggcgatggcgacggggaagatggggatggctctgacaccccagtcatgccaaagctcttccgggaaaccaggactcgttcagaaagcccagctgtccgaactcgaaataacaacagtgtctccagccgggagaggcacaggccttccccacgttccacccgaggccggcagggccgcaaccatgtggacgagtcccccgtggagttcccggctaccaggtccctgagacggcgggcaacagcatcggcaggaacgccatggccgtcccctcccagctcttaccttaccatcgacctcacagacgacacagaggacacacatgggacgccccagagcagcagtaccccctacgcccgcctagcccaggacagccagcaggggggcatggagtccccgcaggtggaggcagacagtggagatggagacagttcagagtatcaggatgggaaggagtttggaataggggacctcgtgtggggaaagatcaagggcttctcctggtggcccgccatggtggtgtcttggaaggccacctccaagcgacaggctatgtctggcatgcggtgggtccagtggtttggcgatggcaagttctccgaggtctctgcagacaaactggtggcactggggctgttcagccagcactttaatttggccaccttcaataagctcgtctcctatcgaaaagccatgtaccatgctctggagaaagctagggtgcgagctggcaagaccttccccagcagccctggagactcattggaggaccagctgaagcccatgttggagtgggcccacgggggcttcaagcccactgggatcgagggcctcaaacccaacaacacgcaaccagagaacaagactcgaagacgcacagctgacgactcagccacctctgactactgccccgcacccaagcgcctcaagacaaattgctataacaacggcaaagaccgaggggatgaagatcagagccgagaacaaatggcttcagatgttgccaacaacaagagcagcctggaagatggctgtttgtcttgtggcaggaaaaaccccgtgtccttccaccctctctttgagggggggctctgtcagacatgccgggatcgcttccttgagctgttttacatgtatgatgacgatggctatcagtcttactgcactgtgtgctgcgagggccgagagctgctgctttgcagcaacacgagctgctgccggtgtttctgtgtggagtgcctggaggtgctggtgggcacaggcacagcggccgaggccaagcttcaggagccctggagctgttacatgtgtctcccgcagcgctgtcatggcgtcctgcggcgccggaaggactggaacgtgcgcctgcaggccttcttcaccagtgacacggggcttgaatatgaagcccccaagctgtaccctgccattcccgcagcccgaaggcggcccattcgagtcctgtcattgtttgatggcatcgcgacaggctacctagtcctcaaagagttgggcataaaggtaggaaagtacgtcgcttctgaagtgtgtgaggagtccattgctgttggaaccgtgaagcacgaggggaatatcaaatacgtgaacgacgtgaggaacatcacaaagaaaaatattgaagaatggggcccatttgacttggtgattggcggaagcccatgcaacgatctctcaaatgtgaatccagccaggaaaggcctgtatgagggtacaggccggctcttcttcgaattttaccacctgctgaattactcacgccccaaggagggtgatgaccggccgttcttctggatgtttgagaatgttgtagccatgaaggttggcgacaagagggacatctcacggttcctggagtgtaatccagtgatgattgatgccatcaaagtttctgctgctcacagggcccgatacttctggggcaacctacccgggatgaacaggatctttggctttcctgtgcactacacagacgtgtccaacatgggccgtggtgcccgccagaagctgctgggaaggtcctggagcgtgcctgtcatccgacacctcttcgcccctctgaaggactactttgcatgtgaatagttccagccaggccccaagcccactggggtgtgtggcagagccaggacccaggaggtgtgattcctgaaggcatccccaggccctgctcttcctcagctgtgtgggtcataccgtgtacctcagttccctcttgctcagtgggggcagagccacctgactcttgcaggggtagcctgaggtgccgcctccttgtgcacaaatcagacctggctgcttggagcagcctaacacggtgctcattttttcttctcctaaaactttaaaacttgaagtaggtagcaacgtggctttttttttttcccttcctgggtctaccactcagagaaacaatggctaagataccaaaaccacagtgccgacagctctccaatactcaggttaatgctgaaaaatcatccaagacagttattgcaagagtttaatttttgaaaactggctactgctctgtgtttacagacgtgtgcagttgtaggcatgtagctacaggacatttttaagggcccaggatcgttttttcccagggcaagcagaagagaaaatgttgtatatgtcttttacccggcacattccccttgcctaaatacaagggctggagtctgcacgggacctattagagtattttccacaatgatgatgatttcagcagggatgacgtcatcatcacattcagggctattttttcccccacaaacccaagggcaggggccactcttagctaaatccctccccgtgactgcaatagaaccctctggggagctcaggaaggggtgtgctgagttctataatataagctgccatatattttgtagacaagtatggctcctccatatctccctcttccctaggagaggagtgtgaagcaaggagcttagataagacaccccctcaaacccattccctctccaggagacctaccctccacaggcacaggtccccagatgagaagtctgctaccctcatttctcatctttttactaaactcagaggcagtgacagcagtcagggacagacatacatttctcataccttccccacatctgagagatgacagggaaaactgcaaagctcggtgctccctttggagattttttaatccttttttattccataagaagtcgtttttagggagaacgggaattcagacaagctgcatttcagaaatgctgtcataatggtttttaacaccttttactcttcttactggtgctattttgtagaataaggaacaacgttgacaagttttgtggggctttttatacactttttaaaatctcaaacttctatttttatgtttaacgttttcattaaaattttttttgtaactggagccacgacgtaacaaatatggggaaaaaactgtgccttgtttcaacagtttttgctaatttttaggctgaaagatgacggatgcctagagtttaccttatgtttaattaaaatcagtatttgtctaaaaaaaaaaaaaaaaaa

SEQ ID NO: 3252 - DNA, 2748 bp, Homo sapiens
ccgtcgccggccgcgtcctccgggcatggaaggaggcggcaagcccaactcttcgtctaacagccgggacgatggcaacagcgtcttccccgccaaggcgtccgcgacgggcgcggggccggccgcggccgagaagcgcctgggcaccccgccggggggcggcggggccggcgcgaaggagcacggcaactccgtgtgcttcaaggtggacggcggtggcggcggtggcggcggcggcggcggcggcgaggagccggcggggggcttcgaagacgccgaggggccccggcggcagtacggcttcatgcagaggcagttcacctccatgctgcagcccggggtcaacaaattctccctccgcatgtttgggagccagaaggcggtggaaaaggagcaggaaagggttaaaactgcaggcttctggattatccacccttacagtgatttcaggttttactgggatttaataatgcttataatgatggttggaaatctagtcatcataccagttggaatcacattctttacagagcaaacaacaacaccatggattattttcaatgtggcatcagatacagttttcctattggacctgatcatgaattttaggactgggactgtcaatgaagacagttctgaaatcatcctggaccccaaagtgatcaagatgaattatttaaaaagctggtctgtggttgacttcatctcatccatcccagtggattatatctttcttattgtagaaaaaggaatggattctgaagtttacaagacagccagggcacttcgcattgtgaggtttacaaaaattctcagtctcttgcgtttattacgactttcaaggttaattagatacatacatcaatgggaagagatattccacatgacatatgatctcgccagtgcagtggtgagaatttttaatctcatcggcatgatgctgctcctgtgccactgggatggttgtcttcagttcttagtaccactactgcaggacttcccaccagattgctgggtgtctttaaatgaaatggttaatgattcttggggaaagcagtattcatacgcactcttcaaagctatgagtcacatgctgtgcattgggtatggagcccaagccccagtcagcatgtctgacctctggattaccatgctgagcatgatcgtcggggccacctgctatgccatgtttgtcggccatgccaccgctttaatccagtctctggattcttcgaggcggcagtatcaagagaagtataagcaagtggaacaatacatgtcattccataagttaccagctgatatgcgtcagaagatacatgattactatgaacacagataccaaggcaaaatctttgatgaggaaaatattctcaatgaactcaatgatcctctgagaggggagatagtcaacttcaactgtcggaaactggtggctacaatgcctttatttgctaatgcggatcctaattttgtgactgccatgctgagcaagttgagatttgaggtgtttcaacctggagattatatcgtacgagaaggagccgtgggtaaaaaaatgtatttcattcaacacggtgttgctggtgtcattacaaaatccagtaaagaaatgaagctgacagatggctcttactttggagagatttgcctgctgaccaaaggacgtcgtactgccagtgttcgagctgatacatattgtcgtctttactcactttccgtggacaatttcaacgaggtcccggaggaatatccaatgatgaggagagcctttgagacagttgccattgaccgactagatcgaataggaaagaaaaattcaattcttctgcaaaagttccagaaggatctgaacactggtgttttcaacaatcaggagaacgaaatcctcaagcagattgtgaaacatgacagggagatggtgcaggcaatcgctcccatcaattatcctcaaatgacaaccctgaattccgcatcgtctactacgaccccgacctcccgcatgaggacacaatctccaccggtgtacacagcgaccagcctgtctcacagcaacctgcactcccccagtcccagcacacagaccccccagccatcagccatcctgtcaccctgctcctacaccaccgcggtctgcagccctcctgtacagagccctctggccgctcgaactttccactatgcctcccccaccgcctcccagctgtcactcatgcaacagcagccgcagcagcaggtacagcagtcccagccgccgcagactcagccacagcagccgtccccgcagccacagacacctggcagctccacgccgaaaaatgaagtgcacaagagcacgcaggcgcttcacaacaccaacctgacccgggaagtcaggccactctccgcctcgcagccctcgctgccccatgaggtgcccactctgatttccagacctcatcccactgtgggcgagtccctggcctccatccctcaacccgtgacggcggtccccggaacgggccttcaggcagggggcaggagcactgtcccgcagcgcgtcaccctcttccgacagatgtcgtcgggagccatccccccgaaccgaggagtccctccagcaccccctccaccagcagctgctcttccaagagaatcttcctcagtcttaaacacagacccagacgcagaaaagccacgatttgcttcaaatttatgatccctgctgattgtcaaagcagaaagaaatactctcataaactgagacta

SEQ ID NO: 3253 - DNA, 5165 bp, Homo sapiens
gggaagccagacggttaacacagacaaagtgctgccgtgacactcggccctccagtgttgcggagaggcaagagcagcgaccgcggcacctgtccgcccggagctgggacgcgggcgcccgggcggccggacgaagcgaggagggaccgccgaggtgcgcgtctgtgcggctcagcctggcgggggacgcggggagaatgtggactgggtagagatgaacgagacttttctcagatgttggatatttgcttggaaaaacgtgtgggtacgaccttggctgcccccaagtgtaactccagcactgtgaggtttcagggattggcagaggggaccaaggggaccatgaaaatggacatggaggatgcggatatgactctgtggacagaggctgagtttgaagagaagtgtacatacattgtgaacgaccacccctgggattctggtgctgatggcggtacttcggttcaggcggaggcatccttaccaaggaatctgcttttcaagtatgccaccaacagtgaagaggttattggagtgatgagtaaagaatacataccaaagggcacacgttttggacccctaataggtgaaatctacaccaatgacacagttcctaagaacgccaacaggaaatatttttggaggatctattccagaggggagcttcaccacttcattgacggctttaatgaagagaaaagcaactggatgcgctatgtgaatccagcacactctccccgggagcaaaacctggctgcgtgtcagaacgggatgaacatctacttctacaccattaagcccatccctgccaaccaggaacttcttgtgtggtattgtcgggactttgcagaaaggcttcactacccttatcccggagagctgacaatgatgaatctcacacaaacacagagcagtctaaagcaaccgagcactgagaaaaatgaactctgcccaaagaatgtcccaaagagagagtacagcgtgaaagaaatcctaaaattggactccaacccctccaaaggaaaggacctctaccgttctaacatttcacccctcacatcagaaaaggacctcgatgactttagaagacgtgggagccccgaaatgcccttctaccctcgggtcgtttaccccatccgggcccctctgccagaagactttttgaaagcttccctggcctacgggatcgagagacccacgtacatcactcgctcccccattccatcctccaccactccaagcccctctgcaagaagcagccccgaccaaagcctcaagagctccagccctcacagcagccctgggaatacggtgtcccctgtgggccccggctctcaagagcaccgggactcctacgcttacttgaacgcgtcctacggcacggaaggtttgggctcctaccctggctacgcacccctgccccacctcccgccagctttcatcccctcgtacaacgctcactaccccaagttcctcttgcccccctacggcatgaattgtaatggcctgagcgctgtgagcagcatgaatggcatcaacaactttggcctcttcccgaggctgtgccctgtctacagcaatctcctcggtgggggcagcctgccccaccccatgctcaaccccacttctctcccgagctcgctgccctcagatggagcccggaggttgctccagccggagcatcccagggaggtgcttgtcccggcgccccacagtgccttctcctttaccggggccgccgccagcatgaaggacaaggcctgtagccccacaagcgggtctcccacggcgggaacagccgccacggcagaacatgtggtgcagcccaaagctacctcagcagcgatggcagcccccagcagcgacgaagccatgaatctcattaaaaacaaaagaaacatgaccggctacaagacccttccctacccgctgaagaagcagaacggcaagatcaagtacgaatgcaacgtttgcgccaagactttcggccagctctccaatctgaaggtccacctgagagtgcacagtggagaacggcctttcaaatgtcagacttgcaacaagggctttactcagctcgcccacctgcagaaacactacctggtacacacgggagaaaagccacatgaatgccaggtctgccacaagagatttagcagcaccagcaatctcaagacccacctgcgactccattctggagagaaaccataccaatgcaaggtgtgccctgccaagttcacccagtttgtgcacctgaaactgcacaagcgtctgcacacccgggagcggccccacaagtgctcccagtgccacaagaactacatccatctctgtagcctcaaggttcacctgaaagggaactgcgctgcggccccggcgcctgggctgcccttggaagatctgacccgaatcaatgaagaaatcgagaagtttgacatcagtgacaatgctgaccggctcgaggacgtggaggatgacatcagtgtgatctctgtagtggagaaggaaattctggccgtggtcagaaaagagaaagaagaaactggcctgaaagtgtctttgcaaagaaacatggggaatggactcctctcctcagggtgcagcctttatgagtcatcagatctacccctcatgaagttgcctcccagcaacccactacctctggtacctgtaaaggtcaaacaagaaacagttgaaccaatggatccttaagattttcagaaaacacttattttgtttcttaagttatgacttggtgagtcagggtgcctgtaggaagtggcttgtacataatcccagctctgcaaagctctctcgacagcaaatggtttcccctcacctctggaattaaagaaggaactccaaagttactgaaatctcagggcatgaacaaggcaaaggccatatatatatatatatatatatctgtatacatattatatatacttatttacacctgtgtctatatatttgcccctgtgtattttgaatatttgtgtggacatgtttgcatagccttcccattactaagactattacctagtcataattattttttcaatgataatccttcataatttattatacaatttatcattcagaaagcaataattaaaaaagtttacaatgactggaaagattccttgtaatttgagtataaatgtatttttgtcttgtggccattctttgtagataatttctgcacatctgtataagtacctaagatttagttaaacaaatatatgacttcagtcaacctctctctctaataatggtttgaaaatgaggtttgggtaattgccaatgttggacagttgatgtgttcattcctgggatcctatcatttgaacagcattgtacataacttgggggtatgtgtgcaggattacccaagaataacttaagtagaagaaacaagaaagggaatcttgtatatttttgttgatagttcatgtttttcccccagccacaattttaccggaagggtgacaggaaggctttaccaacctgtctctccctccaaaagagcagaatcctcccaccgccctgccctccccaccgagtcctgtggccattcagagcggccacatgacttttgcatccattgtattatcagaaaatgtgaagaagaaaaaaatgccatgttttaaaaccactgcgaaaatttccccaaagcataggtggctttgtgtgtgtgcgatttgggggcttgagtctgggtggtgttttgttgttggtttttgttgctttttttttttttttttttttaatgtcaaaattgcacaaacatggtgctctaccaggaaggattcgaggtagataggctcaggccacactttaaaaacaaacacacaaacaacaaaaaacgggtattctagtcatcttggggtaaaagcgggtaatgaacattcctatccccaacacatcaattgtattttttctgtaaaactcagattttcctcagtatttgtgtttttacattttatggttaatttaatggaagatgaaagggcattgcaaagttgttcaacaacagttacctcattgagtgtgtccagtagtgcaggaaatgatgtcttatctaatgatttgcttctctagaggagaaaccgagtaaatgtgctccagcaagatagactttgtgttattctatcttttattctgctaagcccaaagattacatgttggtgttcaaagtgtagcaaaaaatgatgtatatttataaatctatttataccactatatcatatgtatatatatttataaccacttaaattgtgagccaagccatgtaaaagatctactttttctaagggcaaaaaaaaaaaaaaaaaaaaaagaacactcctttctgagactttgcttaatacttggtgacctcacaatcacgtcggtatgattgggcacccttgcctactgtaagagaccctaaaaccttggtgcagtggtggggaccacaaaacaaccagggaggaagagatacatcattttttagtattaaggaccatctaagacagctctattttttttttgccactttatgattatgtggtcacacccaagtcacagaaataaaaaactgactttaccgctgcaatttttctgttttcctccttactaaatactgatacattactccaatctattttataattatatttgacattttgttcacatcaactaatgttcacctgtagaagagaacaaatttcgaataatccagggaaacccaagagccttactggtcttctgtaacttccaagactgacagctttttatgtatcagtgtttgataaacacagtccttaactgaaggtaaaccaaagcatcacgttgacattagaccaaatacttttgattcccaactactcgtttgttctttttctccttttgtgctttcccatagtgagaatttttataaagacttcttgcttctctcaccatccatccttctcttttctgcctcttacatgtgaatgttgagcccacaatcaacagtggttttattttttcctctactcaaagttaaaactgaccaaagttactggctttttactttgctagaacaacaaactatcttatgtttacatactggtttacaatgttatttatgtgcaaattgtcaaaatgtaaattaaatataaatgttcatgctttaccaaaat

SEQ ID NO: 3254 - DNA, 1895 bp, Homo sapiens
atgcgcgtcgggcacagcgcgtgcagcctcgtgcagctcttctggtctccggcgcccgcccctcagacgtaatgttgaattaaagaaaatactttatcagaagaagatggccactgcccagttgcagaggactcccatgagtgcactggtatttcccaataagatatcaactgaacaccagtctttggtgttagtgaagaggcttctagcagtttcagtatcctgtatcacgtatttgaggggaatattcccagaatgcgcttatggaacaagatatctagatgatctttgtgtcaaaatactgagagaagataaaaattgcccaggatctacacagttagtgaaatggatgctaggatgttatgatgctttacagaaaaaatatctaaggatggttgttctagctgtatacacaaacccagaagatcctcagacaatttcagaatgttaccaattcaaattcaaatacaccaataatggaccactcatggacttcataagtaaaaaccaaagcaacgaatctagcatgttgtctactgacaccaagaaagcaagcattctcctcattcgcaagatttatatcctaatgcaaaatctggggcctttacctaatgatgtttgtttgaccatgaaacttttttactatgatgaagttacacccccagattaccagcctcccggttttaaggatggtgattgtgaaggagttatatttgaaggggaacctatgtatttaaatgtgggagaagtctcaacaccttttcacatcttcaaagtaaaagtgaccactgagagagaacgaatggaaaatattgactcaactatactatcaccaaaacaaataaaaacaccatttcaaaaaatcctgagggacaaagatgtagaagatgaacaggagcattatacaagtgatgatttggacattgaaactaaaatggaagaacaggaaaaaaaccctgcatcttctgaacttgaagaaccaagtttagtttgtgaggaagatgaaattatgaggtctaaagaaagtccagatctttctatttctcattctcaggttgagcagttagtcaataaaacatctgaacttgatatgtctgaaagcaaaacaagaagtggaaaagtctttcagaataaaatggcaaatggaaatcaaccagtaaaatcttccaaagaaaatcggaagagaagtcaacatgaatctgggagaatagtcctccatcactttgattcttctagtcaagagtcagtgccaaaaaggagaaagtttagtgaaccaaaggaacatatataaaaattatttttgttctgcaggcttgcagagttcttctcaccatttaaactgaaggaccctatattatatttccctaactctgaagatgtatatgtagtttaaagcagtttgtacactaaaactaagtttttggctgactgtcatattgtggtccttaatcttgagataaatccaatagaacttttgaataaaagcaaaagtacaaatgtcataattgattcggtaataagtaaaatttcaaaattgattttgttcattacctacttaatatttcctttaaatatatactaactgttaaggccctctaatgccatttttctaaacagtaatgtttactttggtattaaaatttggtatggattcactttttacttatgttaaaattataccatttaactggctcttttgtcattgtgctgttattaaaacaatgttcttcaatattttgacataatgtattaacattttaatatataatgtacaatttaagaattggtgctttacctttactatgcttttttttacaggacaaaaagactgatttttaaagtatggcattttttgcagcataaataaaatattgttcagcaaaaaaaaaaaaaaa

SEQ ID NO: 3255 - DNA, 3241 bp, Homo sapiens
gcttccgagctgggtgcgcgccgagcacaggagattgcctgcgtttaggaggtggctgcgttgtgggaaaagctatcaaggaagaaattgccaaaccatgtctttttttctgttttcagagtagttcacaacagatctgagtgttttaattaagcatggaatacagaaaacaacaaaaaacttaagctttaatttcatctggaattccacagttttcttagctccctggacccggttgacctgttggctcttcccgctggctgctctatcacgtggtgctctccgactactcaccccgagtgtaaagaaccttcggctcgcgtgcttctgagctgctgtggatggcctcggctctctggactgtccttccgagtaggatgtcactgagatccctcaaatggagcctcctgctgctgtcactcctgagtttctttgtgatgtggtacctcagccttccccactacaatgtgatagaacgcgtgaactggatgtacttctatgagtatgagccgatttacagacaagactttcacttcacacttcgagagcattcaaactgctctcatcaaaatccatttctggtcattctggtgacctcccacccttcagatgtgaaagccaggcaggccattagagttacttggggtgaaaaaaagtcttggtggggatatgaggttcttacatttttcttattaggccaagaggctgaaaaggaagacaaaatgttggcattgtccttagaggatgaacaccttctttatggtgacataatccgacaagattttttagacacatataataacctgaccttgaaaaccattatggcattcaggtgggtaactgagttttgccccaatgccaagtacgtaatgaagacagacactgatgttttcatcaatactggcaatttagtgaagtatcttttaaacctaaaccactcagagaagtttttcacaggttatcctctaattgataattattcctatagaggattttaccaaaaaacccatatttcttaccaggagtatcctttcaaggtgttccctccatactgcagtgggttgggttatataatgtccagagatttggtgccaaggatctatgaaatgatgggtcacgtaaaacccatcaagtttgaagatgtttatgtcgggatctgtttgaatttattaaaagtgaacattcatattccagaagacacaaatcttttctttctatatagaatccatttggatgtctgtcaactgagacgtgtgattgcagcccatggcttttcttccaaggagatcatcactttttggcaggtcatgctaaggaacaccacatgccattattaacttcacattctacaaaaagcctagaaggacaggatactttgtggaaagtgttaaataaagtaggtactgtggaaaattcatggggaggtcagtgtgctggcttacactgaactgaaactcatgaaaaacccagactggagactggagggttacacttgtgatttattagtcaggcccttcaaagatgatatgtggaggaattaaatataaaggaattggaggtttttgctaaagaaattaataggaccaaacaatttggacatgtcattctgtagactagaatttcttaaaaaggtgttactgagttataagctcactaggctgtaaaaacaaaacaatgtagagttttatttattgaacaatgtagtcacttgaaggttttgtgtatatcttatgtggattaccaatttaaaaatatatgtagttctgtgtcaaaaaacttcttcactgaagttatactgaacaaaattttacctgtttttggtcatttataaagtacttcaagatgttgcagtatttcacagttattattatttaaaattacttcaactttgtgtttttaaatgttttgacgatttcaatacaagataaaaaggatagtgaatcattctttacatgcaaacattttccagttacttaactgatcagtttattattgatacatcactccattaatgtaaagtcataggtcattattgcatatcagtaatctcttggactttgttaaatattttactgtggtaatatagagaagaattaaagcaagaaaatctgaagtattgtcttgtttttaaaaaatacagttcctagtgtttttagaagtcacttaatttgtctcatttttccacctggaaattaggaataatgtagaatgcaaggcagtaatttcgttttggaaaggactctgaaggcagaaaagaagggagagaacctcatgggcagaatattataaaaagagtgtcatattccagcatttgaattggaaagagaagagtgaagatccaagttgcattattaatctgccctgtgttttttccttttaacaatcagtttgagctgctgctgttatgagtttctcatcaagatgaaagccctaatatgtaaagtcaaatccgatttaaattttgtgcttttatagaaagaaatttcttcatagacgtggtgatatatcatttgttggacctgctaatagtaggtcaaaggggagcactccttgccccctgttcctgggtttatgcagttttctttttagagtttatatagggcaagtggttctttttctctgaattacaggatggaaaaaggtcatatcctttgtcaggaaatataaacttgaaagtatgtagtcagctcttgtaatactcatatttatgattgtcctatatgaaaaacaacttcagttaaaactataatgtgtgattctgtataacaaggtgatgtctgtttcccagggctcagacctaatccagttataataaaatcaattaaatgaaatattctatagaatcgatctatgcccttgttaatctccatccatataggagtcacgttctttaagacagatggtggtagttatttttgtggcatggttagatttgactggttttgcagaagattacagttatgtactgcataatgacatatacaatagtggtcccataaaattataatggagcagaaaatctattgcctcatgatgttttagccgttttaatgtcatagcctagtgcattactcacgtgtctgtggagatgctggtgtaaacaaacctactacactgccagttgtataaaagtacagcacattcagttatgtacagtatgtaatactgataatgacaataaatgacaccggtttgtgtatttactttttataaaaaaaaaaaaagaaaaaaaaaaaaaaaa

SEQ ID NO: 3256 - DNA, 3298 bp, Homo sapiens
gtcgggggccgaagcgcctcccgcagggagtccccgtgaggccgcgctgccgcgttacccgcagcggccgggggtccggggagtgcggggctccgagacagagccaggcgccccccagcggtcggcgcgggccccatggctgggccgggcggagcggaaccggtgaggtgaagccccggggccggcagccggaggcgcgtggccggggcgccggctccatgggcagcggcacacggcggcgcgatgatggacgttaacagcagcggccgcccggacctctacgggcacctccgctctttccttctgccagaagtggggcgcgggctgcccgacttgagccccgacggtggcgccgacccggtcgcgggctcctgggcgccgcacctgctgagcgaggtgacagccagcccggcgcccacctgggacgcgcccccggacaatgcctccggctgtggggaacagatcaactacggcagagtcgagaaagttgtgatcggctccatcctgacgctcatcacgctgctgacgatcgcgggcaactgcctggtggtgatctccgtgtgcttcgtcaagaagctccgccagccctccaactacctgatcgtgtccctggcgctggccgacctctcggtggctgtggcggtcatgcccttcgtcagcgtcaccgacctcatcgggggcaagtggatctttggacactttttctgtaatgtcttcatcgccatggacgtcatgtgctgcacggcctcgatcatgaccctgtgcgtgatcagcattgacaggtaccttgggatcacaaggcccctcacataccctgtgaggcagaatgggaaatgcatggcgaagatgattctctccgtctggcttctctccgcctccatcaccttacctccactctttggatgggctcagaatgtaaatgatgataaggtgtgcttgatcagccaggactttggctatacgatttactctaccgcagtggcattttatatccccatgtccgtcatgcttttcatgtactaccagatttacaaggctgccaggaagagtgctgccaaacacaagtttcctggcttccctcgagtggagccagacagcgtcatcgccctgaatggcatagtgaagctccagaaggaggtggaagagtgtgcaaacctttcgagactcctcaagcatgaaaggaaaaacatctccatctttaagcgagaacagaaagcagccaccaccctggggatcatcgtcggggcctttaccgtgtgctggctgccatttttcctcctctcgacagccagacccttcatctgtggcacttcctgcagctgcatcccactgtgggtggagaggacatttctgtggctaggctatgcaaactctctcattaacccttttatatatgccttcttcaaccgggacctgaggaccacctatcgcagcctgctccagtgccagtaccggaatatcaaccggaagctctcagctgcaggcatgcatgaagccctgaagcttgctgagaggccagagagacctgagtttgtgctacaaaatgctgactactgtagaaaaaaaggtcatgattcatgattgaaagcagaacaatggagatgaaataaacaaggcaaaatagaggtggaaacagaaggaagtcatttgctgagtctgcagaatggaatgcagcttctgtcctttcttgggatgtctaaaacatgacaaacagggtgatctgttgtacacactatcttatgagggagatgatgacttctcctttttttctgtggatcagtgctattgtgtgttctcagtttaagatagcagatcatctcagcagtaagcacaccaacagaactgagttccagaaaggaagcagtttctggtgctttgcatatgtccaaatccatgcaagtgggagaaagttccagtgcacacttcccatgcttctgagtctaggcgttgtggtgaatatgcaggaatcattcatgagacagaatgtattttgttgtatgacagaaggcttttccaagcaaactgcggtgagcgtagtgttgaatatgttgcatgtccatgttagaaaacagaatccagtcatcagctaatacaaatgatttcccagagcagtgtttgtttcaagcttctgtcaaatagtttggcttttctgcagggtctctgtgatttccccacctatgtacttttctgtgttaactcacttattatggtataactcaggaacaggtctcaggatggagagaagcatacaacatgagcaaagctttttctcgtgctctgaagggtcttgagaggggagtgggatgccttctgtgaggatttttatcgcagtgaagctcaagtggtacccaactgcgttgtaattaacatgattattggcatgtttttgactctcattttctacaaggctgcagtgggcccacccatgggctggcccataactgtatgttatgtggaagaagtgtgggaatgatgggttttccatgaaatgtgatgcttctggagatggggcataaacatgttcattcttgttgagctgcattgtgttaaaccaaattgtgtgaagcgaggtcacctggaccactcttgggaaatgcttcagaacaccagtctgttccttctagagaatttgtttttgtgttctatgtatcttaaatcaaatgtgtgcctaagcaattctgtcctctgattcccacccctacccaccaaaaaatggtagacatgaaaggcaggtgaggaaacagaaaaggtctctttgcagatatatattttttaaatggcactatgtagtaattaagagctaaggagacagaaagacagtagatgagaatagaagagtacctgtacctacaaggggaaaaatgaatgcaattctttatttgataagagtgaactgaaagagaatattattttcctacaataaagcaagctgtcctctcacaggataaagtggaattctgacatggattatggacttcttctaactcccattgacattgcttcttaccagacatggggaaaagctacctttcctgaaaggggaggagggcactgtcctttcagacaaagcttgtacaaattcctgaaccgcaaatttgctgaagtgaccgtatatattatattcataatttaaatgattatttatggtcagatacatattgttaaacttgaaaatgttttattacattacatcaaataaagtttatttgtagctgaaataaagcaacgtaagtaacaatttttaattaaaaaaaaaaaaaaaaaaaaaaaaaaaaaaaaaagaaaaaaaaaaaaaaaa

SEQ ID NO: 3257 - DNA, 2718 bp, Homo sapiens; identical to SEQ ID NO: 649

SEQ ID NO: 3258 - DNA, 1116 bp, Homo sapiens
atggggaccaccgaagccacgctctggatggaaaacgtggacgtgaaggaggaatggcaggacgaagatcttcccaggccactcccagaagagacgggggtggaactgcttggcagcccggtggaagacacatcctctcctcccaacacgctaaatttcaacggagcgcatcgtaagaggaagacgctggtggccccagagatcaacatttctctggatcagagtgaggggtccctgctgtccgatgacttcttggatacccctgatgacctggatattaacgtggatgacatcgagacccccgatgagaccgactcgctggagttcctggggaatggcaacgaactggagtgggaagacgacacccccgtggccaccgccaagaacatgcccggggacagcgcggatctatttggggacggcacgacggaggacggcagcgccgccaacgggcgcctgtggcggacagtgatcatcggggagcaagagcaccgtatagacctgcacatgatccggccttacatgaaagtggtcacccacggagggtactacggcgaaggcctcaacgccatcatcgtcttcgcagcctgcttccttccagacagcagcctccccgactaccactacatcatggagaacctcttcctgtacgtcatcagcagcttagagctcctggtggctgaggactacatgatcgtgtacctgaacggtgccacgccccggcggaggatgcctggaatcggctggctgaagaagtgctaccagatgatcgaccggaggttgcggaaaaacctgaagtccttgatcatcgtccacccctcgtggttcattcggactgtgctggccatctctcgccctttcatcagcgtcaagttcatcaacaagatccagtacgtgcacagcttggaagacctggagcaactcatccctatggaacacgtccagatcccagactgcgtcctgcaatacgaagaggaaagactgaaggccaggagggagagcgcgaggccccagccggagtttgtgctgcccaggtctgaagagaagccagaggtggcaccagtggaaaacaggtctgctctggtctcagaagatcaggaaacaagcatgtcctga

SEQ ID NO: 3259 - DNA, 2327 bp, Homo sapiens
gggtgtgcgggcggcgcgctcgccctccagctgcagcccgcgccgagcgcgcagggccagcgagcgccggcgcctccagcatggagtgggaactcaacttgctgctctacctggcgctcttcttcttcctgctcttcttacttttcctcctgctcttcgtggtcatcaagcagctgaagaactccgtggccaacacggccggggcgctccagcccgggcgcctctcggtgcaccacgagccttggggcttctcccgagagcaagcggtgtgacccgagtgcgggcactggcgggagggcaccgagctgcgcgggcgctgggctgggtctccgcctcgattctccgtcctcgcggcctcccagcttccagagccgagctgctgcccttgactggtgctcaggggaccacagctgcaatgacagtttgggcctgcaaaaagaaggctggaacaacgggagatggaagctttctgcaaatgcagcaccactggtatccatgaatttaacctgcccatcattcttcctagacaagagactattgaaaagtcagggtgttcaaaatggcttcagatcttatcaggacaatcttggttgttgcactaatttccaaacttggcacagctgtagatgcagaactgatgccatctggtgcgattctacagaataagagagaaaatttacccagagtgtgccatgcactggcttttctgggaatggcaaggtgccaggatttgtttttggttcgcttgcaggggtggaaacttggaactaggttccaagatggtccccgcagcaccccacaagaagaaggaggaagcccacagagaaaacggggcatgccagttcaaatccacttccttttaaagagcttcctcagcagcccaataacttttgccttcatctcattggccagaactgtgtcattggctactgctatctgcaagattgtctgagaaatgtagtttttgtagctggatatataactgcctttgacaaaaatccagtttctcttgatgaagaagaagatggtggtggatcttgggaggacaactaacattttatgccctggctacagaatacagttgcagaggagcataaagttcaaaaagatcaaaactctagttccttcacaactgtcaaagctccaagcagcactgctcccctctgacagagtgagcagagtgaaggcatgtcaggtgttctcacaaaactcttgacagggctgacctctctcagtcaatatccttgtcccacatcaggattttctagagggccctgggtacctgtgcacttccttggtggccgtaacctctttgtggagggttggtgtaggataaagaatgttctattacgctgctccctcatctgtatcatttctctcctctctaattttcctgtcagttatattttggtggagtctgggtttgtgtatttgattcctatagaaagaccatcgctttcatgcatggaggaggggaatctacgcaaagaaaggctaccttactcctttctgtgactccaccaccagtctaggaatatcctgggagaagaattgcctctcaaagctgcttctataagcagcctacatcctagctaagcaaagaagaaacacttcccacatctagggctgtctaaaagaactttctgtgatgacagaaatgttctatatctgcagtgtccaatatggtaaccatataggcactgtggctagtgaacacttgaaatgtggctagtgtgactgaggaaggaaaatttaaattttgtttaattgtaattaatttaaattcagatagccaaatggggctactagctattgtgttagatagcacggtatactttattctctttcttgtgttgtagaaccagctgggagaggtgtgggtcagtcatgggcttggtatcccctggtcttcactattctagcttgccattgaatttgtctcccagaggaaaagaaagaatggtatttggaattaaattcaagatgttaacttgacatctatatattgcacatattcctgtatagtgaatggatgacctcctgggaatagttcctgtgactgattttagtgataattgatcatgaagaaatggcagtactgctccacttcaccttcctagtgactattatgtgttcctagtcagagtgactcagcagagattattttgttctcttgtgcaatttattctgtgtcattttatttttgtaatattgtggcagctaaatgattattctgtgtatgtttttcaaaatattaggtggcttatattttttaaaaggctatgaaataaaaataaactatacgtaacacaaaaaaaaaaaaaaaa

SEQ ID NO: 3260 - DNA, 4076 bp, Homo sapiens
taaatgtggagggagccacagagaggggtccaggcttttctgagaagagaggcagcctcttccaggaagaaagtggtgtctactggctgcccggcctggagaaccttctttgaatgaaaacggacaaaatgcaaagcagtgtgttggcacagtgatttggaaaggggaaacagaagagaagggtctcaccttccgcgcaaggctgagctgttggcaccctgctgcggccgtcggtgctgctgctcctgcagctgccttttctgccatcagctttgttacctaacagcttggctcttttgggaaatatagacaagctggaacccaggagcagttgggagttttaaagaatgccagcctttttaaagctttgatgtccagtgctatagaatcaagttactgtggaggtcaaaacaatttgagatacataagctggccttagaaaataaattgcctctaacttacagtgaggagctcaacataacagggaaaaggagcacaggatgcagctacttggagggtgttgattgaaaacttcgatctccccaccccattcacggttgatttgacggatttctcaccttgttcacagagaaaatttcaattaaggcccctttagatggaatataatacagcagaagccttttcatcaaaaggattaatgcctgcatcatcatttctgcaataaaacaagaagctaagtggtggaggccacagacacctcaaacctggattccacaattctacgttaagtgttggagtttttattactctgctgtaggaaagcctttgccaatgcttacaaggaactgtttatccctgcttctctgggttctgtttgatggaggtctcctaacaccactacaaccacagccacagcagactttagccacagagccaagagaaaatgttatccatctgccaggacaacggtcacatttccaacgtgttaaacgtggctgggtatggaatcaattttttgtgctggaagaatacgtgggctccgagcctcagtatgtgggaaagctccattccgacttagacaagggagagggcactgtgaaatacaccctctcaggagatggcgctggcaccgtttttaccattgatgaaaccacaggggacattcatgcaataaggagcctagatagagaagagaaacctttctacactcttcgtgctcaggctgtggacatagaaaccagaaagcccctggagcctgaatcagaattcatcatcaaagtgcaggatattaatgataatgagccaaagtttttggatggaccttatgttgctactgttccagaaatgtctcctgtgggtgcatatgtactccaggtcaaggccacagatgcagatgacccgacctatggaaacagtgccagagtcgtttacagcattcttcagggacaaccttatttctctattgatcccaagacaggtgttattagaacagctttgccaaacatggacagagaagtcaaagaacaatatcaagtactcatccaagccaaggatatgggaggacagcttggaggattagccggaacaacaatagtcaacatcactctcaccgatgtcaatgacaatccacctcgattccccaaaagcatcttccacttgaaagttcctgagtcttcccctattggttcagctattggaagaataagagctgtggatcctgattttggacaaaatgcagaaattgaatacaatattgttccaggagatgggggaaatttgtttgacatcgtcacagatgaggatacacaagagggagtcatcaaattgaaaaagcctttagattttgaaacaaagaaggcatacactttcaaagttgaggcttccaaccttcaccttgaccaccggtttcactcggcgggccctttcaaagacacagctacggtgaagatcagcgtgctggacgtagatgagccaccggttttcagcaagccgctctacaccatggaggtttatgaagacactccggtagggaccatcattggcgctgtcactgctcaagacctggatgtaggcagcagtgctgttaggtacttcatagattggaagagtgatggggacagctactttacaatagatggaaatgaaggaaccatcgccactaatgaattactagacagagaaagcactgcgcagtataatttctccataattgcgagtaaagttagtaaccctttattgaccagcaaagtcaatatactgattaatgtcttagatgtaaatgaatttcctccagaaatatctgtgccatatgagacagccgtgtgtgaaaatgccaagccaggacagataattcagatagtcagtgctgcagaccgagatctttcacctgctgggcaacaattctcctttagattatcacctgaggctgctatcaaaccaaattttacagttcgtgacttcagaaacaacacagcggggattgaaacccgaagaaatggatacagccgcaggcagcaagagttgtatttcctccctgttgtaatagaagacagcagctaccctgtccagagcagcacaaacacaatgactattcgagtctgtagatgtgactctgatggcaccatcctgtcttgtaatgtggaagcaatttttctacctgtaggacttagcactggggcgttgattgcaattctactatgcattgttatactcttagccatagttgtactgtatgtagcactgcgaaggcagaagaaaaaagacaccctgatgacctctaaagaagacatcagagacaacgtcatccattacgatgatgaaggaggtggggaggaagatacccaggctttcgacatcggggctctgagaaacccaaaagtgattgaggagaacaaaattcgcagggatataaaaccagactctctctgtttacctcgtcagagaccacccatggaagataacacagacataagggatttcattcatcaaaggctacaggaaaatgatgtggatccaactgccccaccatacgattcactggccacatatgcctacgaagggagtgggtccgtggcagagtccctcagctctatagactctctcaccacagaagccgaccaggactatgactatctgacagactggggaccccgctttaaagtcttggcagacatgtttggcgaagaagagagttataaccctgataaagtcacttaagggagtcgtggaggctaaaatacaaccgagaggggagatttttaaaaaagaaaaagaaacacaaatattaatagaaatctctctcacacacacacacacacacaaacacacacacacacacactctgggacaagattcctttgattacctggtttctagtaagttactaaattaatcatattgtcagttttggtttattctgccaacaagagatacatcctataatgtgtacttgctttgttttgttgttttgttttttcacaatcacactgagacaagctcaggcctattcaatacaatttactgacatgacaacctagaacgaagatagctatgtggcatcacggtggaagagtgttagatttttcttaatttcactaaagtgcctattgaaactcttatcatttaaagtggtgtacagtacactctgctgtgatggtattgcgggattcagagataaagacataaaacaaagacaccgtctttatgtcaagaagcaatagcgacactctgactctcctcattccttttgagaacaaaagaagaacactttctgatctccaccttcttctaattcaaaaggttttctttttcttttttaaactgtatgctaaaacgtatttgtttatcctatcctttcagaaaattgaaataaatatgaaaatatcaagttcaatatgtaagtcccaaattctagaaacaatgtttgatcttaacattagttcacattaaagctgttcattaaaatgttactttcttttccaaaaaaaaaagaaagaaaaaaaagaaaaaatattcctctttataaagagaggcctcagggctcaaattacacattaaaataaatattggttttgcttaatattgcaaaaaaaaaaaaaaaaaaaaaaaaaaaaaaa

SEQ ID NO: 3261 - DNA, 3697 bp, Homo sapiens
agggggaatgagtcaggctccggctccacactggcacgtagtgggcggatcgcgccggcgctgagtaggaaggagcttcagccgccagcccggaacgcagtgagtacagccactcaaaggaaagccaagtcgctttgcaggggagcgtctcatgatttttcagaaacgtgctcatggttaaaaagaaaaatcaaggctcggaataaatacattcaagcactgttaattttagcccaaagacaggcggtacttgcctggagatttgggaaaatcaacatgaaactaaaaatgaaattttagttggagtggagcaagcagtattgatcagaacataccaaatacgaattttttcaaagtctgcgtagaagtttaaattactaggaaaaatgtaaaggagaagtatttactaataaatgaaacaaaagtaataaaataaaaatgaattaatatagtttgacaaaatatcagcgaacgctgaaaagaaaacattaaaataatgtttgagactttttaggttttgtgcaggaagaattgggaaaaatgtgctggatggagtgatactgcttttcttttccacaaaaatttcattattttagagagcggtagagcctttttaaagacagtaagttattgccaattcacaatgaaataagatcacatgctctgaaatgtacaagagctgcatgcaataaacttcatttatctataggtaataactgattgatgtttattcagtagtcgaaatgcacctcatgcactctaattagcacgtcaaattagtctctccgtttcagaggtgtagggcctttgtggagccttctcaataaaataatttgccactcttgaaggttagacattctcttctatcaatgtacacataaaggttttgttttgctttgcttgttgtgaattaaaatggggagaaaatgatgtgttagctattacctagtcatgtgtctttttagtcataggttagcttttcaagacacttcctgcatctctgacctgttgcacctctgttatcttggcacctctgttatcttagcagcaagcacctgcctcagctgacgcttgagccataacccatgtaagtcactgcagggctgaacctctctttgagcctaacagtagaataataattatttttattgaatagtgttaatgtgtcaatgttgaaatgtgcctcagtgtgtgttcctcaaccacatccctatagaggatgttttcttaatagcaatgtgtttttgttttaagaaagtccacacaatttcaaatacacattttctttactaaagtttattgaccagttttgaagtgatccttgttttcagttaaactatctttaataatggtaaataacatattttgtaggttgttgtatatttaatattctctgcaagaacacataaggaacaatacatggacctttaaatatttgtcattgtgaaataaaataacaaggaaaggtgatttcaggtgtactttattcaatacatatatacaagaagttattactataacattaaatttgcaggaaaaaagaaaccactggattattctgcttctattccagagggcttattccaaagggccagtgtgcaaaatatgaatccaagatggcattgtggaaagacgctgtacctcctgtgataaaattactttggtggtgcttttttctcatgtatctcgggaaactaaaaatctgaattgtattcagtggccttttccaaatgaagctcctgaaaagtacatcaagtctaaagtgaaccagctaactcattaagactggaatcatgagcaacaatggagcagacctaacctttggttacatctcctgttttgtagctatccttttgtttggctcaaattttgtgccacttaaaaaatttgatactggtgatggaatgtttctccagtgggttctttgtgctgccatatggttggttgccttggttgtcaatctgatattacattgtccaaagttttggccttttgcaatgcttgggggctgcatttgggcaacagggaacattgctgttgtcccaattatcaaaaccattggtttaggccttggaatcttaatctggggatcatttaatgccttaactggctgggcaagctcaaggtttggctggtttggattggatgcagaagaagtatcaaatccgctgctaaattacattggagctgggctatcagtagtaagtgctttcatatttttgttcatcaaaagtgaaataccaaataacacgtgttccatggataccactccattaataacagagcatgtgagtatagtatgagagacaacttgatttgaaacataaaattaagataaatggataatacataaattttaaacacagatgaaaaagtggtgtttgctcatcactcctggctatgtaaaatatcttagcttatttattatgggtaggtctatgtagcaatcaatcaatatttccgcagttgagcttctcagcaagcacacgggtttatttattttgattaacagatctctactaggtgatatatatataaccccatttttgtaatgatttaaagattcctacaatagaggaaccctaaatactgtagaggaatgtgaaaataactttagaaagtcagaggaaggaggttttgaagttggtccaggggagaatagaccataggaggccaagaaaggtaagtgaagtcctatgagaataggaactggtatcccattctacccgaagtgaaaaacagaaaatatgataggagtcactgttttgatcttgaagaatctaaatcagtctggaatagtaaatctgaatgaaacaggagcaacttttaaaagggacctgataaagcgcaagtgtcagtagctacatatacaaaagtgacttcagggcaaagcctcattgtcatgaacccaggctctaatccttctcatctcaagaaatctctcctgtctgccctgggccagtgctatccagctgccctctgaatccagcgctcctcacccccagtggggtattgccccttggcagggtgcttatttaccccttacttcaaaattaatcttttctcctttccttcttcccctatccaaacttttatcaactaaaaccttagttaaattgacactaaagttgaatagtaattagcttaagtgtaaagagaagaggtttattaatccacaggcatctctaatcagggaaatgtttcagggagaagggaggagttggctttgggaaagggttccttgcctgcttcagggatccagacacctcctgcccaaccatcctccaaaacaatggaacaaaataataaaataaatgcagcttggtaaaagatacacagtaggctaactgcctgagatttttctaggcaataagtttaaagatccataaacagcatgattgatgggtacagaaccatcatcatgagctccttatgatgaaagaaaccgttattgccaaaggaaaacttgacttagcacatgacaaagaattcaaatctactttcttgtctcttacaaaaataataggattataacatcaagaacacttcagttggccaggcgtgatggctcatgcccgtaatcccagcactgtgggaggtcaaggtgggcagatcacctgagttcaggagttcaagaccagcctgtccaacatggtgaaactctatctctactaagaatacaaaaaaaaaaaaaaaa

SEQ ID NO: 3262 - DNA, 67 bp, Homo sapiens; identical to SEQ ID NO: 467

SEQ ID NO: 3263 - DNA, 921 bp, Homo sapiens; identical to SEQ ID NO: 2507

SEQ ID NO: 3264 - DNA, 2347 bp, Homo sapiens
gggactgtgttaagaaccaagggcatataaagacagatgggaggagaccctggccggggagaggaagaagcatctacataggtactaagtaccattcgctaattcagcttagagaactatcaacacaggacaatgcaagcccatgagctgttccggtattttcgaatgccagaactggttgacttccgacagtacgtgcgtactcttccgaccaacacgcttatgggcttcggagcttttgcagcactcaccaccttctggtacgccacgagacccaaacccctgaagccgccatgcgacctctccatgcagtcagtggaagtggcgggtagtggtggtgcacgaagatccgcactacttgacagcgacgagcccttggtgtatttctatgatgatgtcacaacattatacgaaggtttccagaggggaatacaggtgtcaaataatggcccttgtttaggctctcggaaaccagaccaaccctatgaatggctttcatataaacaggttgcagaattgtcggagtgcataggctcagcactgatccagaagggcttcaagactgccccagatcagttcattggcatctttgctcaaaatagacctgagtgggtgattattgaacaaggatgctttgcttattcgatggtgatcgttccactttatgatacccttggaaatgaagccatcacgtacatagtcaacaaagctgaactctctctggtttttgttgacaagccagagaaggccaaactcttattagagggtgtagaaaataagttaataccaggccttaaaatcatagttgtcatggatgcctacggcagtgaactggtggaacgaggccagaggtgtggggtggaagtcaccagcatgaaggcgatggaggacctgggaagagccaacagacggaagcccaagcctccagcacctgaagatcttgcagtaatttgtttcacaagtggaactacaggcaaccccaaaggagcaatggtcactcaccgaaacatagtgagcgattgttcagcttttgtgaaagcaacagagaatacagtcaatccttgcccagatgatactttgatatctttcttgcctctcgcccatatgtttgagagagttgtagagtgtgtaatgctgtgtcatggagctaaaatcggatttttccaaggagatatcaggctgctcatggatgacctcaaggtgcttcaacccactgtcttccccgtggttccaagactgctgaaccggatgtttgaccgaattttcggacaagcaaacaccacgctgaagcgatggctcttggactttgcctccaagaggaaagaagcagagcttcgcagcggcatcatcagaaacaacagcctgtgggaccggctgatcttccacaaagtacagtcgagcctgggcggaagagtccggctgatggtgacaggagccgccccggtgtctgccactgtgctgacgttcctcagagcagccctgggctgtcagttttatgaaggatacggacagacagagtgcactgccgggtgctgcctaaccatgcctggagactggaccgcaggccatgttggggccccgatgccgtgcaatttgataaaacttgttgatgtggaagaaatgaattacatggctgccgagggcgagggcgaggtgtgtgtgaaagggccaaatgtatttcagggctacttgaaggacccagcgaaaacagcagaagctttggacaaagacggctggttacacacaggggacattggaaaatggttaccaaatggcaccttgaaaattatcgaccggaaaaagcacatatttaagctggcacaaggagaatacatagcccctgaaaagattgaaaatatctacatgcgaagtgagcctgttgctcaggtgtttgtccacggagaaagcctgcaggcatttctcattgcaattgtggtaccagatgttgagacattatgttcctgggcccaaaagagaggatttgaagggtcgtttgaggaactgtgcagaaataaggatgtcaaaaaagctatcctcgaagatatggtgagacttgggaaggattctggtctgaaaccatttgaacaggtcaaaggcatcacattgcaccctgaattattttctatcgacaatggccttctgactccaacaatgaaggcgaaaaggccagagctgcggaactatttcaggtcgcagatagatgacctctattccactatcaaggtttagtgtgaagaagaaagctcagaggaaatggcacagttccacaatctcttctcctgctgatggccttcatgttgttaattttgaatacagcaagtgtagggaaggaaaaaaaaaaaaaaaa

SEQ ID NO: 3265 - DNA, 2329 bp, Homo sapiens
ataggctcagacacaaggagaggcttggagagagcagacgccttctggattcaagaagacgaggctcacctgttactcggcctcccagaaagatggataggagaaatgactacggatatagggtgcctctatttcagggccctctgcctcccccggggagcctggggcttcccttccctccagatatacagactgagaccacagaagaggacagtgtcctgctgatgcataccctgttggcggcaaccaaggactccctggccatggacccaccagttgtcaaccggcctaagaaaagcaagaccaagaaggcccctataaagactattactaaggctgcacctgctgcccctccagtcccagctgccaatgagattgccaccaacaagcccaaaataacttggcaggctttaaacctgccagtcattacccagatcagccaggctttacctaccactgaggtaaccaatactcaggcttcttcagtcactgctcagcctaagaaagccaacaagatgaagagagttactgccaaggcagcccaaggctcccaatccccaactggccatgagggtggcactatacagctgaagtcacccttgcaggtcctaaagctaccagtcatctcacagaatattcacgctccaattgccaatgagtcagccagttcccaagccttgataacctctatcaagcctaagaaagcttccaaggctaagaaggctgcaaataaggccatagctagtgccaccgaggtctcgctggctgcaactgccacccatacagctaccacccaaggccaaattaccaatgagacagccagtatccacaccacagcagcctccatccgaaccaagaaagcctccaaagccaggaagacaattgctaaggtcataaatactgacactgagcatatagaggctctaaatgtcactgacgcagctaccaggcagattgaggcctcagtagtggctatcaggcccaaaaaatccaagggcaagaaggctgccagcaggggcccaaattctgtctctgagatctctgaggccccacttgccactcagatagtcacaaaccaagccctggcagccaccctgcgggtcaagagagggtctagggctcggaaggctgccactaaggctcgggcaactgaaagccagactccaaatgctgaccaaggggcccaggccaagatagcctctgctcagaccaacgtaagtgcccttgagactcaggttgctgctgctgtccaggccctggcagatgactatctggctcagttgagcctggagcccacaaccaggacccggggcaaaagaaaccgaaagtccaagcatctgaatggggatgagagaagtggcagtaattacaggcggatcccatggggccggaggcctgcaccaccgcgagatgtggccattttacaagaaagggctaataagttggtgaaatacctgttggttaaggaccagacaaagatccccatcaaacgctcagacatgctgagggatgtcatccaagaatatgatgaatatttcccagaaatcattgaacgagcaagctacactctggagaagatgtttcgagtcaatctgaaagaaattgataagcaaagtagcttgtatattctcatcagcactcaggaatcctctgcaggcatactgggaacgaccaaggacacacccaagctgggtctcctcatggtgattctgagtgtcatttttatgaatggcaacaaggccagtgaggctgtcatctgggaggtgctgcgcaagttggggctgcgccctggggtgaggcattcactctttggggaagtgaggaagctcatcacagacgagtttgtgaagcagaagtacctggagtacaagagggtccctaacagcagaccacctgaatatgagttcttctggggcttgcgctcctaccacgagactagcaagatgaaagtcctcaagtttgcatgcagggtgcagaagaaagaccccaaggactgggctgtgcagtaccgcgaggcagtggagatggaagtccaagctgcagctgtggctgtggctgaggctgaagccagggctgagatttattccccatgtttacagataccgctaataaattgcagtagtccttcccatggagccaaagtacatccttggaatctttgtccacacagcagtcaaggcagttatggccaatcagctgagggtgtcatgtgatggaaaaatctgtttgctgttcctgctttattgtttgctttctgtgtgctgtcatattttggtatcagagttacattaaatttgcaaaatgaaaaaaaaaaaaaaaaaaaaaaaaa

SEQ ID NO: 3266 - DNA, 2321 bp, Homo sapiens
ataggctcagacacaaggagaggcttggagagagcagacgccttctggattcaagaagacgaggcccattcccctcaggctcacctgttactcggcctcccagaaagatggataggagaaatgactacggatatagggtgcctctatttcagggccctctgcctcccccggggagcctggggcttcccttccctccagatatacagactgagaccacagaagaggacagtgtcctgctgatgcataccctgttggcggcaaccaaggactccctggccatggacccaccagttgtcaaccggcctaagaaaagcaagaccaagaaggcccctataaagactattactaaggctgcacctgctgcccctccagtcccagctgccaatgagattgccaccaacaagcccaaaataacttggcaggctttaaacctgccagtcattacccagatcagccaggctttacctaccactgaggtaaccaatactcaggcttcttcagtcactgctcagcctaagaaagccaacaagatgaagagagttactgccaaggcagcccaaggctcccaatccccaactggccatgagggtggcactatacagctgaagtcacccttgcaggtcctaaagctaccagtcatctcacagaatattcacgctccaattgccaatgagtcagccagttcccaagccttgataacctctatcaagcctaagaaagcttccaaggctaagaaggctgcaaataaggccatagctagtgccaccgaggtctcgctggctgcaactgccacccatacagctaccacccaaggccaaattaccaatgagacagccagtatccacaccacagcagcctccatccgaaccaagaaagcctccaaagccaggaagacaattgctaaggtcataaatactgacactgagcatatagaggctctaaatgtcactgacgcagctaccaggcagattgaggcctcagtagtggctatcaggcccaaaaaatccaagggcaagaaggctgccagcaggggcccaaattctgtctctgagatctctgaggccccacttgccactcagatagtcacaaaccaagccctggcagccaccctgcgggtcaagagagggtctagggctcggaaggctgccactaaggctcgggcaactgaaagccagactccaaatgctgaccaaggggcccaggccaagatagcctctgctcagaccaacgtaagtgcccttgagactcaggttgctgctgctgtccaggccctggcagatgactatctggctcagttgagcctggagcccacaaccaggacccggggcaaaagaaaccgaaagtccaagcatctgaatggggatgagagaagtggcagtaattacaggcggatcccatggggccggaggcctgcaccaccgcgagatgtggccattttacaagaaagggctaataagttggtgaaatacctgttggttaaggaccagacaaagatccccatcaaacgctcagacatgctgagggatgtcatccaagaatatgatgaatatttcccagaaatcattgaacgagcaagctacactctggagaagatgtttcgagtcaatctgaaagaaattgataagcaaagtagcttgtatattctcatcagcactcaggaatcctctgcaggcatactgggaacgaccaaggacacacccaagctgggtctcctcatggtgattctgagtgtcatttttatgaatggcaacaaggccagtgaggctgtcatctgggaggtgctgcgcaagttggggctgcgccctggggtgaggcattcactctttggggaagtgaggaagctcatcacagacgagtttgtgaagcagaagtacctggagtacaagagggtccctaacagcagaccacctgaatatgagttcttctggggcttgcgctcctaccacgagactagcaagatgaaagtcctcaagtttgcatgcagggtgcagaagaaagaccccaaggactgggctgtgcagtaccgcgaggcagtggagatggaagtccaagctgcagctgtggctgtggctgaggctgaagccagggctgagatttattccccatgtttacagataccgctaataaattgcagtagtccttcccatggagccaaagtacatccttggaatctttgtccacacagcagtcaaggcagttatggccaatcagctgagggtgtcatgtgatggaaaaatctgtttgctgttcctgctttattgtttgctttctgtgtgctgtcatattttggtatcagagttacattaaatttgcaaaatgaa

SEQ ID NO: 3267 - DNA, 4879 bp, Homo sapiens
gataatacataaattttaaacacagatgaaaaagtggtgtttgctcatcactcctggctatgtaaaatatcttagcttatttattatgggtaggtctatgtagcaatcaatcaatatttccgcagttgagcttctcagcaagcacacgggtttatttattttgattaacagatctctactaggtgatatatatataaccccatttttgtaatgatttaaagattcctacaatagaggaaccctaaatactgtagaggaatgtgaaaataactttagaaagtcagaggaaggaggttttgaagttggtccagtggagaatagaccataggaggccaagaaaggtaagtgaagtcctatgagaataggaactggtatcccattctacccgaagtgaaaaacagaaaatatgataggagtcactgttttgatcttgaagaatctaaatcagtctggaatagtaaatctgaatgaaacaggagcaacttttaaaagggacctgataaagcgcaagtgtcagtagctacatatacaaaagtgacttcagggcaaagcctcattgtcatgaacccaggctctaatccttctcatctcaagaaatctctcctgtctgccctgggccagtgctatccagctgccctctgaatccagcgctcctcacccccagtggggtattgccccttggcagggtgcttatttaccccttacttcaaaattaatcttttctcctttccttcttcccctatccaaacttttatcaactaaaaccttagttaaattgacactaaagttgaatagtaattagcttaagtgtaaagagaagaggtttattaatccacaggcatctctaatcagggaaatgtttcagggagaagggaggagttggctttgggaaagggttccttgcctgcttcagggatccagacacctcctgcccaaccatcctccaaaacaatggaacaaaataataaaataaatgcagcttggtaaaagatacacagtaggctaactgcctgagatttttctaggcaataagtttaaagatccataaacagcatgattgatgggtacagaaccatgcatcatgagctccttatgatgaaagaaacggttattgccaaaggaaaacttgacttagcacatgacaaagaattcaaatctactttcttgtctcttacaaaaataataggattataacatcaagaacacttcagttggccaggcgtgatggctcatgcccgtaatcccagcactgtgggaggtcaaggtgggcagatcacctgagttcaggagttcaagaccagcctgtccaacatggtgaaactctatctctactaagaatacaaaaaaaaaaaaaatgagctgggtgtggtggcacacacctgtaatcccagctacttgggaggctgaggcaggagaatcacttgaacctgggaggaggaggttgcagtgaatcaagatcacaccactgcactccagcctggacagcaagaatgaaactccatctcaaaaaaaaaaaaccaaaaaaacacttcggctatagtattataatataccccccttatccacagggaatatgttccaagacacccaaggaatgcctgaaaccacagatagtaccaaacctatatatagtatgtctttgtatctgatcactaagacagctactaagtgactcgggggcaggcagtgtatacgatatgaataggctggacatagggatcattcacgttccaggtgagatggagaaggacgatgcagggtttcatcacactattcagaacagtgtgaaattgaaaacttatgaattattcatttccagaatttttcatttaatgtctttggactactgttgacagtgagtaactgaaaccacagaaagtgaaagtacagataagggaggggtactgtaactccatagtagaaatatgaatttgctcataatttttcctggcttagaatatcagcctaatattgaaacatggcttggaatgttttattaactaatttagtaaaaaaaacaaatcagtataagaaatgctcattgatcttaagcattcgataggaggagagtctaatttccttacagattatgcagaccattaaaatatgcaaatgaaacatgagataataagttttattagtttttataggtgtatcacaatagccacatattaaatgtgagaatttgaaatggaagacttgccaactgccaagtcatcctaaatgaaagaggaaacaattagaaacagttgagtttagagatatcagaatgcataggtgacatgtttattatattttaaagcatgtttgaaagagaagagaaaagcactagaaatattgtcaccagtgtgattatcaattgaatgttcttttgttttaatttgggccaatgttttcaataggtgatcaacacaacccaagacccctgttcctgggtggataaactttctacagtacaccaccgcatagtgtaaggagaggttacttctttgctctattactctgtttcatatttggttaaagcagggattaccagcatgaagtaatgttcatctgagttcaagaagaaaattgtaatgcaagctttgacttctatctccatgcggcgaggtttttttgtccccagctgaattttaggggctgcagtcttgcagtgatatctggagtactctatggatctacatttgtgccaatcatctacatcaaggactacagcaaaagaaatgatagtatatatgcaggggcaagccaatatgatttagactatgtgtttgcgcacttcagtggcatctttcttacaagtactgtctactttctggcctactgcatagccatgaaaaatagtcctaaactatatcctgaagcagtcctaccaggattcctgtcaggagtactttgggctatagctacctgctgttggttcatagcaaatcactctctgagtgctgtggtcagttttccaataatcactgctggtccaggatttatagctgcaatgtggggtatcttcatgtttaaggaaataaagggtctacaaaactacctattaatgatacttgcattttgcatcatcttgactggagccttatgcactgctttttctaaaatctaacaatgacaaaaccagcaggtggcagcagtagttaagagaacgcgtctatcggacagcggagagatcatgctgagaaaagagtgcattttcatatagcaaatggatctcagccactgttggagtgggtaaatgatttttttccccaaaaatgtgagaatgaaggaagattgagtttcattcaagtataaaaatgaaaatttcttctgatgaactgtttatgaaggtagtactttactgggtgactaaaatgtctacattattatagcattacatacgaggatgctctttttaccacagtatgtacctagtgttgcataatctagagcacagtatagagtccatatacaaagaagttacagtccatatttctcacctattaccccagtgaagtgaggcagaaataccttgggcgaggagggagagccttaccttctaatggaattagattccaaagatatttggatcctttgtttcataaagtaaatgcatagttggtaactaaatgttaaaaaggccattttattattgttagccaaaacttctgtttatttcaagttaatatcgcccaactctacatcatctacccattttagctcataatgcttttgattatcgccagataaagtccattctcagagaacaaaaatttttaatcattgagaaaatgtgcataacataatacatacatacacaagtatattcacgtacataaatacacacagatatgttgctaaagtgagattgtaggttatcagtaacaatttaaaggaaacaaccactcttttgaatgtacaacttttttttctgaaatacacttttctaaaaccatcttaactggaggtttcctgttttcttcttgttttaactggtggtttccagtaggcaaaataaaatgacaggcatgctagtttttttttttttttttttttttaagaaaactgaaattaagccaggcagggtggcgcactactataatcccagctgctggggcggctgaagtaggagggtcacttagcccaagagtgcaaatctgccagcctaggcaacatagcaaggtcccatctctaaaaaagaaatttaatttaaatttgtaagaaaaaagaaaactgaaacagaactgccagtacaatgtttgttgcaattgtttccaaaactttgaaataacgaaacccctattcaaatgtaaattttacccattcccacctgatagtactgtttattactttgctatgcaggagaaacaaaacagctttttatttgtgtgtatactctgaagtcaatgtgcatgggttaaatcccacctctgcttcattttatttgtgtggctttggacaagttcctaagccctctgtgtcaggcccctcattaacaaaatggagtttatgatggcatctacctcacatggttattgtgtggttgaaattagttcaaatctgtaaagtatgttgatgagtatctggtacttggcaaacactatataattgttagctttattattatgtgttgtttgaaggggaaaaaagtttttgtagattggagaacaccatgtaagagctactaagctcaccaccttcccatccaaacaattattactcctctaaatgaatactacttaaaagtgatggagcttctgtttgtttattgaattgctaatacaaataaatatttgactataacttcttatactcattttaattttaacctgaaatgtcattaaattatgctgataaactttgaataaattgtgatacaaaaaaaaaaaaaaaa

SEQ ID NO: 3268 - DNA, 1700 bp, Homo sapiens
cttctgggaggagaagaggcctgaccttggcgctggggtccagtgggcgctgctctggtccgaggctgctgctcttgacctctgctctgcggctgttttccattggagtagaggctcctcctgtcctgtcctgcctgtggagggaagcaaaccttcccctggaccagagagaggagaaagcggagacaggtagcaacgctgtggactggtgatgacaggctcttcagctccctgcaagtgaccgggcctggggaacagggcatggcacaggcacacaggaccccccagcccagggctgcccccagccagccccgtgtgttcaagctggttctcctgggaagtggctccgtgggtaagtccagcttggctcttcggtacgtgaagaacgacttcaagagtatcctgcctacggtgggctgtgcgttcttcacaaaggtggtggatgtgggtgccacctctctgaagcttgagatctgggacacagctggccaggagaagtaccacagcgtctgccacctctacttcaggggtgccaacgctgcgcttctggtgtacgacatcaccaggaaggattccttcctcaaggctcagcagtggctgaaggacctggaggaggagctgcacccaggagaagtcctggtgatgctggtgggcaacaagacggacctcagccaggagcgggaggtgaccttccaggaagggaaggagtttgccgacagccagaagttgctgttcatggaaacttcggccaaactgaaccaccaggtgtcggaggtgttcaatacagtggcccaagagctactgcagagaagcgacgaggagggccaggctctacggggggatgcagctgtggctctgaacaaggggcccgcgaggcaggccaaatgctgcgcccactaggtgcagccactcctgggggctgtggggaagacaccccctgcctgggccatggccagctctaggtggattctgattcactgtcaatgctgggttgctcccgagccctagatgttcctggaagttggccccctttatgaaaaccacttcccacagccagtgggaactgccagaggaagatctggcgtcacatggctcccaggaaagtgctgtgccctatccccactgataccatctgattccccgatgcctgtgcctgttccacctggacggtggccccctcagcctggcagcctctggacagagaggaaggaaggattggaaaagtccccgcagcacagcgacggtgggaagatgccttacgtctgatcttgatgggggcactggcctggagcctgggcccacctgcttctggggggttggggagcaggccagatggaggtggtggtgccaggaagaaatggagcgatgactgactgtggggtgggcccaggatttccacatcttggtgaagttgcccctgggaagggcagctgggggcagtggcgccagttcccttccatggtctcccggctggcaatgtggtgaagctgagtttctgtccaatgagcaggaagattctgagacatttcgcctgagatataagttgtactgcgtatgcagtttttcctccaaaaattaaattgcttttgacaaaaaaaaaaaaaaaaaaaaaaaaaaaaaaaaaaaaaaaaaaaaaaaaaaaaaaaaaaaaaaaaaaaaaaaaaaaaaaaaaaaaaaaaaaaaaaaaaaaaaaaaaaaaa

SEQ ID NO: 3269 - DNA, 2373 bp, Homo sapiens
tggggtgtgatgcgagcgtcacggtggggatgctgctggctgcgcggcgctgagggccagcgagagcgagagcccgcccggggcggaggacggactcatccggatctggctgcagcgtgggctcggagctcccccttcctctcggtctccctctcggcccccctttatttccttcttgctttgcgtctttaacacctctcgaccctgtcctccccccgccactggaagtcttcccgtctctaaatggaattagtggagcccggagcctctggtgtaacgcacagacatgatccatgggcgcagcgtgcttcacattgtagcaagtttaatcatcctccatttgtctggggcaaccaagaaaggaacagaaaagcaaaccacctcagaaacacagaagtcagtgcagtgtggaacttggacaaaacatgcagagggaggtatctttacctctcccaactatcccagcaagtatccccctgaccgggaatgcatctacatcatagaagccgctccaagacagtgcattgaactttactttgatgaaaagtactctattgaaccgtcttgggagtgcaaatttgatcatattgaagttcgagatggaccttttggcttttctccaataattggacgtttctgtggacaacaaaatccacctgtcataaaatccagtggaagatttctatggattaaattttttgctgctggagagctggaatctatgggattttcagctcgatacaatttcacacctgatcctgactttaaggaccttggagctttgaaaccattaccagcgtgtgagtttgagatgggcggttccgaaggaattgtggagtctatacaaattatgaaggaaggcaaagctactgctagcgaggctgttgattgcaagtggtacatccgagcacctccacggtccaagatttacttacgattcttggactatgagatgcagaattcaaatgagtgcaagaggaattttgtggctgtgtatgatggaagcagttccgtggaggatttgaaagctaagttctgtagcactgtggctaatgatgtcatgctacgcacgggtcttggggtgatccgcatgtgggcagatgagggcagtcgaaacagccgatttcagatgctcttcacatcctttcaagaacctccttgtgaaggcaacacattcttctgccatagtaacatgtgtattaataatactttggtctgcaatggactccagaactgtgtgtatccttgggatgaaaatcactgtaaagagaagaggaaaaccagcctgctggaccagctgaccaacaccagtgggactgtcattggcgtgacttcctgcatcgtgatcatcctcattatcatctctgtcatcgtacagatcaaacagcctcgtaaaaagtatgtccaaaggaaatcagactttgaccagacagttttccaggaggtatttgaacctcctcattatgagttatgcactctcagagggacaggagctacagctgactttgcagatgtggcagatgactttgaaaattaccataaactgcggaggtcatcttccaaatgcattcatgaccatcactgtggatcacagctgtccagcactaaaggcagccgcagtaacctcagcacaagagatgcttctatcttgacagagatgcccacacagccaggaaaacccctcatcccacccatgaacagaagaaatatccttgtcatgaaacacaactactcgcaagatgctgcagatgcctgtgacatagatgaaatcgaagaggtgccgaccaccagtcacaggctgtccagacacgataaagccgtccagcggttctgcctcattgggtctctaagcaaacatgaatctgaatacaacacaactagggtctagaaagaaaattcaagatgaggaaactgaagagttttagtaacttttttaagattacacaataaacaatgatgaatcaagctttgaagccaacctcaccaaccacaagatcaaccaacactcttcaccaatgtgtaatataaccacgttaatattcaacatagtacgtactgctgaaagaagttgatacttattcatattaaccccgtagttttgtgtttcctcatctgtaaaagtatgtattataacaccttctctccaccttacagcgtgtgaggttcaaatgaccattcattggaagatattttttatatcctataatgcattataaaaataaatcatttttcctaaatcatgtgtagacttcattttatgatcgacatggaacaaaagtatcatctataaagagtaacaatgtagagtaacccccctcggaacttgtccaccataaaatatatgactttccaaatccaaaaaaaaaaaaaaaa

SEQ ID NO: 3270 - DNA, 4207 bp, Homo sapiens
gaatgagttgtggcgcccacaatgctcccatgacaaggagctgacaagttccattttccgtcgcgggcatcttggaatcatgactcccacaatgccttgggcacttggtcgacagtggggccgcctctgaaaaaaaaatgtgagagcagtcactcaggaaatgttgtttaaggggaaccttctggatccttttcatggcaccatggcaagaagaagctgtatcttatctatggaagataaagcatggagttggctaatggatgctgataggaccatctagttgcaggaaaacaagctcagggctcccactgattctacattatgggccgttgctccagggagaactgcaaatatcttcatccacccccacatttaaaaacgcagttggagataaatggacgcaataacttgattcagcagaagaacatggccatgttggcccagcaaatgcaactagccaatgccatgatgcctggtgccccattacaacccgtgccaatgttttcagttgcaccaagcttagccaccaatgcatcagcagccgcctttaatccctatctgggacctgtttctccaagcctggtcccggcagagatcttgccgactgcaccaatgttggttacagggaatccgggtgtccctgtacctgcagctgctgcagctgctgcacagaaattaatgcgaacagacagacttgaggtatgtcgagagtaccaacgtggcaattgcaaccgaggagaaaatgattgtcggtttgctcatcctgctgacagcacaatgattgacaccaatgacaacacagtcactgtgtgtatggattacatcaaagggagatgctctcgggaaaagtgcaaatactttcatccccctgcacatttgcaagccaagatcaaggctgcccaataccaggtcaaccaggctgcagctgcacaggctgcagccaccgcagctgccatgactcagtcggctgtcaaatcactgaagcgacccctcgaggcaacctttgacctgggaattcctcaagctgtacttcccccattaccaaagaggcctgctcttgaaaaaaccaacggtgccaccgcagtctttaacactggtattttccaataccaacaggctctagccaacatgcagttacaacagcatacagcatttctcccaccaggctcaatattgtgcatgacacccgctacaagtgttgttcccatggtgcacggtgctacgccagccactgtgtccgcagcaacaacatctgccacaagtgttcccttcgctgcaacagccacagccaaccagatacccataatatctgccgaacatctgactagccacaagtatgttacccagatgtagaattttcatcactaaacaatcatgctaaagaggaaaggacagtgtgcttggttagagtaaaggacgaggtcattagccatattgtatatatcgtcaagcaacacacacaaaagttcctcagccacaagacatccacatattgcatgttaaccagaagaaaagacaacattttccggaaatccactgcacactgttgcctatacactttgtacatttaattgatatttgtgctgaggtgatattcctgtctaaaagaacaacattgtctttcttttctagcacagagttatgcattcaaagatgcatacctagttagtttcctatatattcatgccatcttgaaaagacagactatggtgtaaccatgattctattatgtattggtacgtctgtagaccaagatataattttttaaaaataagtttatttctttcaaggtttacaaataacaaaggtgcaccttgtatttaaaattgccattatagatgagagcgtgcatgcacagtcatttttgtttaagagtaatatttttaatgtaatagattgtaagacgtggtgagggagggatctgacagagatgaatgtgccaagcaaaaccacaactgtgtatattttaaagcacatcatggctttaagtaccatgttgttaaggattctcatgaagtgccatagactgtacatcaaattagagtattatttcttcagtgttattgttttcagagccacattttgttgcatatttgctagtactaatcagtcaaagggcaccattcttttttttttttttgaaaccaaagctgtctcagaaatggccaatttaactttacagtaacaatagacagcacaacacaaactctctcaatacagataaactcacacatactggagatatatatataatagatatatataaaattattttaatgcattgtagtgtaatatttatgcatactatactgtataacatgttattcaaaagggattgccatttctgagacacagtaacaaaaaaatgaggaaattattttgcttctatttatagcctctgtcaaaagtcaaaagactataaatgctttgcaaaaatggtttcacgtttgcttaaatgcttcatcacagtcacattcaaaatagtgactctaaacaaagaagaaagcagcactgtcatcagatgcatgataaaccaaaatatgaaaatgggaaatgtttaattaacctagtaattgggtgggttaagtacatgggtgaattttatatgtgatttttgttttgttttgttttgttcagattaactgcttatagccttagaaagccttttacaaaattaaaaaaaaaaaaatagatgtgcattcagtttttaagaatggaatcatccaaaggaattcctttttttgaggtttggatgttgcagctagtaaaggatatttttgctctgttcagcagttctaaaaattgctgaagtaggggccaggtcactggtagttatagtatggaatgggagaagtgaaagttcagttatagaactttccatacttccaagtttactgcaagtttttatgcttgagagagatgctttctaatataagactgatgtgttgattttactgattgtactgtacatctattaaagccttagattattacattacgggttggaacccataccaatgtaatttcaatcgtgttaagaaagtaatggtgacttcacatgttattgtagttagttacattatagaatattacttatttttcttgttaaaatgtagtttttcatttcctacatttattagattttcattttctattaacaattgaataccatttcagtttatagacttgttttattagattttaccaatgaatttttcaaaatacaaaaaaaagtagtttttccttcataacatactcagttttgaattacatgtagtgtcacatgaatattcgtattgttaactaaatgatttatattttactgatttaatattacagtgtaagaatgtcagtcattgttagttcttgtctagttttcattaaaagaacaaagatcttttatatggatatcttataaatatataatcattgctaagtaagaagttaagttgttgctatcgcaacaatcctggcagacaattgagtaatattttgatgatttattttgtttgtaattagttattataagaagatctagatcctagatattagaataaaatttattttctactgtatccatttcaaatgttaaaatattgtttaatatttttgaaatccctgagtatcaggccttgttataaataagctgcataatcaataaatagaacaagggactttttgttgataatccaaatactcaaagtttacgtaatgaaaattatagcgtgtgtgcaaactcttgagggttgattatgctgcaatttagcatgttggaacgtctagggagaaggttgactttttgcacttctgtatatagtcaaaagagagaaacctgtataatagtaagatcttattttgaataaaaacgtctataattacaaggagttttgttaaggctaatacaatgacagactgagcaaaattgcttgcaaaagtggcacagagttagcactccataccccttcaaacatgttgctttgctttcttgtggacagcttgtagtttgccaggattttttcagctggaaagatacgccatcctttcaaaccctcatgactgacaaaaactccatggggccaaatctgcctgaagatcattaccaaaaatagcaggtacttctaccattaaggtgaaatcatggatcagatattccttacatttttcaaaactactgcatgtttaaaacttcaacaaaaaaaaaaaaaaa

SEQ ID NO: 3271 - DNA, 3365 bp, Homo sapiens
ctggtccgtccaggctccttcccatcctcacacccgcgcctttctccctgcggccccggctcgctgctccagctgcccagctcttcccccgcccggccgcaccataaagcgcccggccgctgccgcggagcccagcagccagctccccagcaccgcgcggcggggacgcgagcgcgcccccgacggcagcccggacgccgagcacgggtcacctgcggcgccggcccgggcgccgaccgaggttcaacgcacggcccggggacccccaggcggggccaacgccgccgtcgcccccggcctcgcggggagcaggaagagccaacatgctggccccgcgcggagccgccgtcctcctgctgcacctggtcctgcagcggtggctagcggcaggcgcccaggccaccccccaggtctttgaccttctcccatcttccagtcagaggctaaacccaggcgctctgctgccagtcctgacagaccccgccctgaatgatctctatgtgatttccaccttcaagctgcagactaaaagttcagccaccatcttcggtctttactcttcaactgacaacagtaaatattttgaatttactgtgatgggacgcttaaacaaagccatcctccgttacctgaagaacgatgggaaggtgcatttggtggttttcaacaacctgcagctggcagacggaaggcggcacaggatcctcctgaggctgagcaatttgcagcgaggggccggctccctagagctctacctggactgcatccaggtggattccgttcacaatctccccagggcctttgctggcccctcccagaaacctgagaccattgaattgaggactttccagaggaagccacaggacttcttggaagagctgaagctggtggtgagaggctcactgttccaggtggccagcctgcaagactgcttcctgcagcagagtgagccactggctgccacaggcacaggggactttaaccggcagttcttgggtcaaatgacacaattaaaccaactcctgggagaggtgaaggaccttctgagacagcaggttaaggaaacatcatttttgcgaaacaccatagctgaatgccaggcttgcggtcctctcaagtttcagtctccgaccccaagcacggtggtgcccccggctccccctgcaccgccaacacgcccacctcgtcggtgtgactccaacccatgtttccgaggtgtccaatgtaccgacagtagagatggcttccagtgtgggccctgccccgagggctacacaggaaacgggatcacctgtattgatgttgatgagtgcaaataccatccctgctacccgggcgtgcactgcataaatttgtctcctggcttcagatgtgacgcctgcccagtgggcttcacagggcccatggtgcagggtgttgggatcagttttgccaagtcaaacaagcaggtctgcactgacattgatgagtgtcgaaatggagcgtgcgttcccaactcgatctgcgttaatactttgggatcttaccgctgtgggccttgtaagccggggtatactggtgatcagataaggggatgcaaagcggaaagaaactgcagaaacccagagctgaacccttgcagtgtgaatgcccagtgcattgaagagaggcagggggatgtgacatgtgtgtgtggagtcggttgggctggagatggctatatctgtggaaaggatgtggacatcgacagttaccccgacgaagaactgccatgctctgccaggaactgtaaaaaggacaactgcaaatatgtgccaaattctggccaagaagatgcagacagagatggcattggcgacgcttgtgacgaggatgctgacggagatgggatcctgaatgagcaggataactgtgtcctgattcataatgtggaccaaaggaacagcgataaagatatctttggggatgcctgtgataactgcctgagtgtcttaaataacgaccagaaagacaccgatggggatggaagaggagatgcctgtgatgatgacatggatggagatggaataaaaaacattctggacaactgcccaaaatttcccaatcgtgaccaacgggacaaggatggtgatggtgtgggggatgcctgtgacagttgtcctgatgtcagcaaccctaaccagtctgatgtggataatgatctggttggggactcctgtgacaccaatcaggacagtgatggagatgggcaccaggacagcacagacaactgccccaccgtcattaacagtgcccagctggacaccgataaggatggaattggtgacgagtgtgatgatgatgatgacaatgatggtatcccagacctggtgccccctggaccagacaactgccggctggtccccaacccagcccaggaggatagcaacagcgacggagtgggagacatctgtgagtctgactttgaccaggaccaggtcatcgatcggatcgacgtctgcccagagaacgcagaggtcaccctgaccgacttcagggcttaccagaccgtggtcctggatcctgaaggggatgcccagatcgatcccaactgggtggtcctgaaccagggcatggagattgtacagaccatgaacagtgatcctggcctggcagtggggtacacagcttttaatggagttgacttcgaagggaccttccatgtgaatacccagacagatgatgactatgcaggctttatctttggctaccaagatagctccagcttctacgtggtcatgtggaagcagacggagcagacatattggcaagccaccccattccgagcagttgcagaacctggcattcagctcaaggctgtgaagtctaagacaggtccaggggagcatctccggaactccctgtggcacacgggggacaccagtgaccaggtcaggctgctgtggaaggactccaggaatgtgggctggaaggacaaggtgtcctaccgctggttcctacagcacaggccccaggtgggctacatcagggtacgattttatgaaggctctgagttggtggctgactctggcgtcaccatagacaccacaatgcgtggaggccgacttggcgttttctgcttctctcaagaaaacatcatctggtccaacctcaagtatcgctgcaatgacaccatccctgaggacttccaagagtttcaaacccagaatttcgaccgcttcgataattaaaccaaggaagcaatctgtaactgcttttcggaacactaaaaccatatatattttaacttcaattttctttagcttttaccaacccaaatatatcaaaacgttttatgtgaatgtggcaataaaggagaagagatcatttttaaaaaaaaaaaaaaa

SEQ ID NO: 3272 - DNA, 2376 bp, Homo sapiens
gtctaacgtggcaccttcctggattcccctctatctcctgttcttcctaccttctactccttccctcctcttctcctccgaagaccctggcgcccactccactgcggacccctgaacacttaaggaataacccttggcagctgcacgactacgctctccgaaacctcatgggcagtttctcccgccggcgatgatggagaacctaataaggggaaggaatcccccgcaataccagagaagtccttgtaaagaggttcgtgcagcacttcggaagaggcctgaagaggagttgcagtgcctggagatgaccaccaaacggaaaatcatcggccgtctggtgccatgccgatgtttccgaggtgaagaagaaatcatctcagttttagattactcccactgcagtcttcagcaggtgccaaaggaggtctttaacttcgaacgaacattagaggagctttatctagatgccaatcaaattgaagaactacccaagcaattgttcaactgtcaagctctacgaaaactaagtattcctgataacgacctttcaaatctgccaaccactattgctagtttagttaatcttaaagaactcgacatcagtaaaaatggtgtacaagaatttccagaaaacataaagtgctgtaagtgtttaacaattattgaagccagtgtcaatcccatttctaaactacctgatggcttcacacagctcctaaacctgacccagctctacctgaatgacgcctttcttgaatttcttccagccaattttggaagacttgtcaaattgcggatcttggagttaagagaaaatcacttgaaaactctaccaaacatctgaagatccagagtgtgccccttgcccaatcgcctgagactatacagtgacacctacaacagaggatgtggagggagcagcttttcgggcaccagaaatggcagcatcaggagcatcagcacgaatagactttgtagaggtagttctcccaaactatattatgaaaccaaacatttttggtgcgctacctgctgatgggggctgccttcttactgcctagtatctacaaaatgtttggtctttgttaaagtttaacgatgacatttctgactaatatagagagacctgatttttttccaaatgtgttcagttgccataactttcaatgaatatgaaattttatcagtctcagaaaaacattaatacccatatttttatctaattgatttcactatttgttatgttaaggtgcttttgtgtataatttttgtatatatttttaaatgggatcaaactaagccataatttaaaagtcatcctaatgcagtaaataagataatttctctagtttgttaaattcttcagagaccgaatataattgctcgtttttctgtcatactccctgatgatgttccattgtggacttattttgcaaagttcccagatggcacaagtcaaaatatgaaatgctgatgattgattgattttatgtatcctttcatcttatgtaatttaatgtggaacagttattttgtagctctaaaatacatttgttaattaaccatattggcttttcatgcagttcaatggcttatagcatttcaatttgcatagaaaatgaatctctgtaatgatacttttgctaaataaataacaatcgacataatgggttcatttgcttttaacattttatacatacaatttagaagtaggatatatttcatattgaaattttgaaaagcttgaaattcaacatacaaggtcaccatcttgctgatgcctaatgcagtacagcaaattcattcttcatcccatgttaactcctttttggaacaagtcaaaatacaaataatttacaatgattgtgttggagctattgcttgattaaatacaattcaaaggttctttttataaaacaggtgtgagcaggacacattgcacttacgggcttttcctatttttttggttctatttcattttactgcctaggaaagaaacatttttttgtaaaacctatgctatggaactgaaatgtactttattgaatatttctattctgttttatgaatatcaattatgtgaaatatataaatataaaattgccttagaatgcctaactctttgtataaaacagatatctgaaagtagatgttggttttttgttcaaattgtgtaaatgctgatttttccatgagtacttatgaagatctatatgtaaaaattttaagtctgcttactgtgtttgtaccaccttgttcttagctgtgtatactctatgctaattgacttctgtcattgtcacatatattgcatatgtctctcaaaaattaaaaggtatattgctattctaaaaataaaaaatgtaaattcctgag

SEQ ID NO: 3273 - DNA, 1815 bp, Homo sapiens
gaattcctggagagttgcctttgtgagaagctggaaatatttctttcaattccatctcttagttttccataggaacatcaagaaatcatgaacaactttggtaatgaagagtttgactgccacttcctcgatgaaggttttactgccaaggacattctggaccagaaaattaatgaagtttcttcttctgatgataaggatgccttctatgtggcagacctgggagacattctaaagaaacatctgaggtggttaaaagctctccctcgtgtcacccccttttatgcagtcaaatgtaatgatagcaaagccatcgtgaagacccttgctgctaccgggacaggatttgactgtgctagcaagactgaaatacagttggtgcagagtctgggggtgcctccagagaggattatctatgcaaatccttgtaaacaagtatctcaaattaagtatgctgctaataatggagtccagatgatgacttttgatagtgaagttgagttgatgaaagttgccagagcacatcccaaagcaaagttggttttgcggattgccactgatgattccaaagcagtctgtcgtctcagtgtgaaattcggtgccacgctcagaaccagcaggctccttttggaacgggcgaaagagctaaatatcgatgttgttggtgtcagcttccatgtaggaagcggctgtaccgatcctgagaccttcgtgcaggcaatctctgatgcccgctgtgtttttgacatgggggctgaggttggtttcagcatgtatctgcttgatattggcggtggctttcctggatctgaggatgtgaaacttaaatttgaagagatcaccggcgtaatcaacccagcgttggacaaatactttccgtcagactctggagtgagaatcatagctgagcccggcagatactatgttgcatcagctttcacgcttgcagttaatatcattgccaagaaaattgtattaaaggaacagacgggctctgatgacgaagatgagtcgagtgagcagacctttatgtattatgtgaatgatggcgtctatggatcatttaattgcatactctatgaccacgcacatgtaaagccccttctgcaaaagagacctaaaccagatgagaagtattattcatccagcatatggggaccaacatgtgatggcctcgatcggattgttgagcgctgtgacctgcctgaaatgcatgtgggtgattggatgctctttgaaaacatgggcgcttacactgttgctgctgcctctacgttcaatggcttccagaggccgacgatctactatgtgatgtcagggcctgcgtggcaactcatgcagcaattccagaaccccgacttcccacccgaagtagaggaacaggatgccagcaccctgcctgtgtcttgtgcctgggagagtgggatgaaacgccacagagcagcctgtgcttcggctagtattaatgtgtagatagcactctggtagctgttaactgcaagtttagcttgaattaagggatttggggggaccatgtaacttaattactgctagttttgaaatgtctttgtaagagtagggtcgccatgatgcagccatatggaagactagcatatgggtcacacttatctgtgttcctatggaaactatttgaatatttgttttatatggatttttattcactcttcagacacgctactcaagagtgcccctcagctgctgaacaagcatttgtagcttgtacaatggcagaatgggccaaaagcttagtgttgtgacctgtttttaaaataaagtatcttgaaataattaggc

SEQ ID NO: 3274 - DNA, 67 bp, Homo sapiens; identical to SEQ ID NO: 467

SEQ ID NO: 3275 - DNA, 2339 bp, Homo sapiens
gaggccacctgtttgtgatgtgcaggcacagaagaaaggcacagctccccatcagtttcatggaaaataactcagtgcctgctgggaaccagctgctggagatccctacagagagcttccactgggggcaacccttccaggaaggagttggggagagagaaccctcactgtggggaatgctgataaaccagtcacacagctgctctattctcacacaaatctaccccttgcgtggctggaactgacgtttccctggaggtgtccagaaagctgatgtaacacagagcctataaaagctgtcggtccttaaggctgcccagcgccttgccaaaatggagcttgtaagaaggctcatgccattgaccctcttaattctctcctgtttggcggagctgacaatggcggaggctgaaggcaatgcaagctgcacagtcagtctagggggtgccaatatggcagagacccacaaagccatgatcctgcaactcaatcccagtgagaactgcacctggacaatagaaagaccagaaaacaaaagcatcagaattatcttttcctatgtccagcttgatccagatggaagctgtgaaagtgaaaacattaaagtctttgacggaacctccagcaatgggcctctgctagggcaagtctgcagtaaaaacgactatgttcctgtatttgaatcatcatccagtacattgacgtttcaaatagttactgactcagcaagaattcaaagaactgtctttgtcttctactacttcttctctcctaacatctctattccaaactgtggcggttacctggataccttggaaggatccttcaccagccccaattacccaaagccgcatcctgagctggcttattgtgtgtggcacatacaagtggagaaagattacaagataaaactaaacttcaaagagattttcctagaaatagacaaacagtgcaaatttgattttcttgccatctatgatggcccctccaccaactctggcctgattggacaagtctgtggccgtgtgactcccaccttcgaatcgtcatcaaactctctgactgtcgtgttgtctacagattatgccaattcttaccggggattttctgcttcctacacctcaatttatgcagaaaacatcaacactacatctttaacttgctcttctgacaggatgagagttattataagcaaatcctacctagaggcttttaactctaatgggaataacttgcaactaaaagacccaacttgcagaccaaaattatcaaatgttgtggaattttctgtccctcttaatggatgtggtacaatcagaaaggtagaagatcagtcaattacttacaccaatataatcaccttttctgcatcctcaacttctgaagtgatcacccgtcagaaacaactccagattattgtgaagtgtgaaatgggacataattctacagtggagataatatacataacagaagatgatgtaatacaaagtcaaaatgcactgggcaaatataacaccagcatggctctttttgaatccaattcatttgaaaagactatacttgaatcaccatattatgtggatttgaaccaaactctttttgttcaagttagtctgcacacctcagatccaaatttggtggtgtttcttgatacctgtagagcctctcccacctctgactttgcatctccaacctacgacctaatcaagagtggatgtagtcgagatgaaacttgtaaggtgtatcccttatttggacactatgggagattccagtttaatgcctttaaattcttgagaagtatgagctctgtgtatctgcagtgtaaagttttgatatgtgatagcagtgaccaccagtctcgctgcaatcaaggttgtgtctccagaagcaaacgagacatttcttcatataaatggaaaacagattccatcataggacccattcgtctgaaaagggatcgaagtgcaagtggcaattcaggatttcagcatgaaacacatgcggaagaaactccaaaccagcctttcaacagtgtgcatctgttttccttcatggttctagctctgaatgtggtgactgtagcgacaatcacagtgaggcattttgtaaatcaacgggcagactacaaataccagaagctgcagaactattaactaacaggtccaaccctaagtgagacatgtttctccaggatgccaaaggaaatgctacctcgtggctacacatattatgaataaatgaggaagggcctgaaagtgacacacaggcctgcaaaaaaaaaaaaaaaaaaaaaaaaaaaaaaaaaaaaaaaaaaaaaaaaaaaaaaaaaaaaaaaa

SEQ ID NO: 3276 - DNA, 4606 bp, Homo sapiens
gagaagaaagccagtgcgtctctgggcgcaggggccagtggggctcggaggcacaggcaccccgcgacactccaggttccccgacccacgtccctggcagccccgattatttacagcctcagcagagcacggggcgggggcagaggggcccgcccgggagggctgctacttcttaaaacctctgcgggctgcttagtcacagccccccttgcttgggtgtgtccttcgctcgctccctccctccgtcttaggtcactgttttcaacctcgaataaaaactgcagccaacttccgaggcagcctcattgcccagcggaccccagcctctgccaggttcggtccgccatcctcgtcccgtcctccgccggcccctgccccgcgcccagggatcctccagctcctttcgcccgcgccctccgttcgctccggacaccatggacaagttttggtggcacgcagcctggggactctgcctcgtgccgctgagcctggcgcagatcgatttgaatataacctgccgctttgcaggtgtattccacgtggagaaaaatggtcgctacagcatctctcggacggaggccgctgacctctgcaaggctttcaatagcaccttgcccacaatggcccagatggagaaagctctgagcatcggatttgagacctgcaggtatgggttcatagaagggcacgtggtgattccccggatccaccccaactccatctgtgcagcaaacaacacaggggtgtacatcctcacatccaacacctcccagtatgacacatattgcttcaatgcttcagctccacctgaagaagattgtacatcagtcacagacctgcccaatgcctttgatggaccaattaccataactattgttaaccgtgatggcacccgctatgtccagaaaggagaatacagaacgaatcctgaagacatctaccccagcaaccctactgatgatgacgtgagcagcggctcctccagtgaaaggagcagcacttcaggaggttacatcttttacaccttttctactgtacaccccatcccagacgaagacagtccctggatcaccgacagcacagacagaatccctgctaccagagaccaagacacattccaccccagtggggggtcccataccactcatggatctgaatcagatggacactcacatgggagtcaagaaggtggagcaaacacaacctctggtcctataaggacaccccaaattccagaatggctgatcatcttggcatccctcttggccttggctttgattcttgcagtttgcattgcagtcaacagtcgaagaaggtgtgggcagaagaaaaagctagtgatcaacagtggcaatggagctgtggaggacagaaagccaagtggactcaacggagaggccagcaagtctcaggaaatggtgcatttggcgaacaaggagtcgtcagaaactccagaccagtttatgacagctgatgagacaaggaacctgcagaatgtggacatgaagattggggtgtaacacctacaccattatcttggaaggaaacaaccgttggaaacataaccattacagggagctgggacacttaacagatgcaatgtgctactgattgtttcattgcgaatcttttttagcataaaattttctactctttttgttttttgtgttttgttctttaaagtcaggtccaatttgtaaaaacagcattgctttctgaaattagggcccaattaataatcagcaagaatttgatcgttccagttcccacttggaggcctttcatccctcgggtgtgctatggatggcttctaacaaaaactacacatatgtattcctgatcgccaacctttcccccaccagctaaggacatttcccagggttaatagggcctggtccctgggaggaaatttgaatgggtccattttgcccttccatagcctaatccctgggcattgctttccactgaggttgggggttggggtgtactagttacacatcttcaacagaccccctctagaaatttttcagatgcttctgggagacacccaaagggtgaagctatttatctgtagtaaactatttatctgtgtttttgaaatattaaaccctggatcagtcctttgatcagtataattttttaaagttactttgtcagaggcacaaaagggtttaaactgattcataataaatatctgtacttcttcgatcttcaccttttgtgctgtgattcttcagtttctaaaccagcactgtctgggtccctacaatgtatcaggaagagctgagaatggtaaggagactcttctaagtcttcatctcagagaccctgagttcccactcagacccactcagccaaatctcatggaagaccaaggagggcagcactgtttttgttttttgttttttgtttttttttttttgacactgtccaaaggttttccatcctgtcctggaatcagagttggaagctgaggagcttcagcctcttttatggtttaatggccacctgttctctcctgtgaaaggctttgcaaagtcacattaagtttgcatgacctgttatccctggggccctatttcatagaggctggccctattagtgatttccaaaaacaatatggaagtgccttttgatgtcttacaataagagaagaagccaatggaaatgaaagagattggcaaaggggaaggatgatgccatgtagatcctgtttgacatttttatggctgtatttgtaaacttaaacacaccagtgtctgttcttgatgcagttgctatttaggatgagttaagtgcctggggagtccctcaaaaggttaaagggattcccatcattggaatcttatcaccagataggcaagtttatgaccaaacaagagagtactggctttatcctctaacctcatattttctcccacttggcaagtcctttgtggcatttattcatcagtcagggtgtccgattggtcctagaacttccaaaggctgcttgtcatagaagccattgcatctataaagcaacggctcctgttaaatggtatctcctttctgaggctcctactaaaagtcatttgttacctaaacttatgtgcttaacaggcaatgcttctcagaccacaaagcagaaagaagaagaaaagctcctgactaaatcagggctgggcttagacagagttgatctgtagaatatctttaaaggagagatgtcaactttctgcactattcccagcctctgctcctccctgcctaccctctcccctccctctctccctccacttcaccccacaatcttgaaaaacttcctttctcttctgtgaacatcattggccagatccattttcagtggtctggatttctttttattttcttttcaacttgaaagaaactggacattaggccactatgtgttgttactgccactagtgttcaagtgcctcttgttttcccagagatttcctgggtctgccagaggcccagacaggctcactcaagctctttaactgaaaagcaacaagccactccaggacaaggttcaaaatggttacaacagcctctacctgtcgccccagggagaaaggggtagtgatacaagtctcatagccagagatggttttccactccttctagatattcccaaaaagaggctgagacaggaggttattttcaattttattttggaattaaatacttttttccctttattactgttgtagtccctcacttggatatacctctgttttcacgatagaaataagggaggtctagagcttctattccttggccattgtcaacggagagctggccaagtcttcacaaacccttgcaacattgcctgaagtttatggaataagatgtattctcactcccttgatctcaagggcgtaactctggaagcacagcttgactacacgtcatttttaccaatgattttcaggtgacctgggctaagtcatttaaactgggtctttataaaagtaaaaggccaacatttaattattttgcaaagcaacctaagagctaaagatgtaatttttcttgcaattgtaaatcttttgcgtctcctgaagacttcccttaaaattagctctgagtgaaaaatcaaaagagacaaaagacatcttcgaatccatatttcaagcctggtagaattggcttttctagcagaacctttccaaaagttttatattgagattcataacaacaccaagaattgattttgtagccaacattcattcaatactgttatatcagaggagtaggagagaggaaacatttgacttatctggaaaagcaaaatgtacttaagaataagaataacatggtccattcacctttatgttatagatatgtctttgtgtaaatcatttgttttgagttttcaaagaatagcccattgttcattcttgtgctgtacaatgaccactgttattgttactttgacttttcagagcacacccttcctctggtttttgcatatttattgatggatcaataataatgaggaaagcatgatatgtatattgctgagttgaaagcacttattggaaaatattaaaaggctaacattaaaagactaaaggaaacagaaaaaaaaaaaaaaaaa

SEQ ID NO: 3277 - DNA, 1785 bp, Homo sapiens
gcggaccccagcctctgccaggttcggtccgccatcctcgtcccgtcctccgccggcccctgccccgcgcccagggatcctccagctcctttcgcccgcgccctccgttcgctccggacaccatggacaagttttggtggcacgcagcctggggactctgcctcgtgccgctgagcctggcgcagatcgatttgaatataacctgccgctttgcaggtgtattccacgtggagaaaaatggtcgctacagcatctctcggacggaggccgctgacctctgcaaggctttcaatagcaccttgcccacaatggcccagatggagaaagctctgagcatcggatttgagacctgcagctccacctgaagaagattgtacatcagtcacagacctgcccaatgcctttgatggaccaattaccataactattgttaaccgtgatggcacccgctatgtccagaaaggagaatacagaacgaatcctgaagacatctaccccagcaaccctactgatgatgacgtgagcagcggctcctccagtgaaaggagcagcacttcaggaggttacatcttttacaccttttctactgtacaccccatcccagacgaagacagtccctggatcaccgacagcacagacagaatccctgctaccagagaccaagacacattccaccccagtggggggtcccataccactcatggatctgaatcagatggacactcacatgggagtcaagaaggtggagcaaacacaacctctggtcctataaggacaccccaaattccagaatggctgatcatcttggcatccctcttggccttggctttgattcttgcagtttgcattgcagtcaacagtcgaagaaggtgtgggcagaagaaaaagctagtgatcaacagtggcaatggagctgtggaggacagaaagccaagtggactcaacggagaggccagcaagtctcaggaaatggtgcatttggtgaacaaggagtcgtcagaaactccagaccagtttatgacagctgatgagacaaggaacctgcagaatgtggacatgaagattggggtgtaacacctacaccattatcttggaaagaaacaaccgttggaaacataaccattacagggagctgggacacttaacagatgcaatgtgctactgattgtttcattgcgaatcttttttagcataaaattttctactctttttgttttttgtgttttgttctttaaagtcaggtccaatttgtaaaaacagcattgctttctgaaattagggcccaattaataatcagcaagaatttgatcgttccagttcccacttggaggcctttcatccctcgggtgtgctatggatggcttctaacaaaaactacacatatgtattcctgatcgccaacctttcccccaccagctaaggacatttcccagggttaatagggcctggtccctgggaggaaatttgaatgggtccattttgcccttccatagcctaatccctgggcattgttttccactgaggttgggggttggggtgtactagttacacatcttcaacagaccccctctagaaatttttcagatgcttctgggagacacccaaagggtgaagctatttatctgtagtaaactatttatctgtgtttttgaaatattaaaccctggatcagtcctttgatcagtataattttttaaagttactttgtcagaggcacaaaagggtttaaactgattcataataaatatctgtacttcttcgatcttcaaaaaaaaaaaaaaaaaa

SEQ ID NO: 3278 - DNA, 3580 bp, Homo sapiens
gccccagcagccccagccccagccccaggcccagcagcagcagcagcagcccctgctctcccgccgcccggagaggctctgcagccatgaagccaaccgtcccgaggcaccgccggtaagcagggagcctccgcggagctcccgccgccgctcccccttggtgagtcctgccgcagcgagaggcatggagaaggccgcccccgcggggcgctgatcccctcgccgcgcccgcgcgcacacgccccccgccgccgccgccgctgccgccgccgcgcgcccccagtacctcgctccccacccaggccccaccatgaccggctccgcggccgacactcaccgctgcccccaccccaaaggcgccaaaggcacccggtcccggagcagccacgcgcggcccgtgagcctcgccaccagcgggggctcagaggaggaggacaaagacggcggggtgctgttccacgtcaacaagagcggcttccccatcgacagccacacctgggagcgcatgtggatgcacgtggccaaggtgcaccctaaggggggagaaatggtgggcgccatcaggaacgccgccttcttggcaaagccttcaataccccaggtcccaaactacaggctgtcgatgacgatcccagactggctccaggcgatccagaattacatgaagaccctacactacttaaccaatgggcagccttccattgagcggttccccatcagctttaaaacctacttctcaggaaactactttcaccacgttgtgctggggatttactgcaatggccgctatggctcattgggcatgagccgcagggctgagctgatggacaagccattgacttttcggactctgagtgacctcatctttgactttgaggactcttacaagaaatacctgcacacagtcaagaaggtcaagattgggctgtacgtcccccatgagcctcatagcttccagcccattgagtggaagcagctggtcctcaacgtctcaaagatgctgagggctgacataaggaaggagctggagaaatatgccagggacatgagaatgaagatcctgaaacctgcaagtgcccactctccgacccaagtgagaagccggggaaaatccctgtcccccagaaggagacaggcaagccccccgaggaggctcggccggcgagagaagtcgcctgcactgcctgaaaagaaggtggctgatctgagcactctgaatgaagtgggctatcaaatccgaatttagccaagccataccggccagcaagagggtttctgtggtgcttctctctgcactttacccagcatcttcaggaggaactgcaactatttattaagaacttgtgaattttatttttaaggattcacctggaaatagaatctgagtgggtggtaaccattagctttaaaaaattcactaaaaggcaccatgaaaaggctgaagtaataagccccactggggttgaactatgtccctcactcaagatcttaaggataaccgtaactgaagttttatatttttccatttacctactttcttttacttgctttgaacattatgcctcaccaatagtaaatgttcatgaaataatctcttgaacttttggtatagtaaggtaactctaacagtattactgtctttttcagcaataacagaaagcaaaaatgggtgggttttttttaagcagttattacctcagcattttgacatcagatatgcaaacttaatggcgttttgtttttttatattctatttgtattctttccccagtatttcccatggggatctccacaagtttggagttttttcctggtgcacacacgtgaggagatttaaggtactatatgcaagtgttttactaaaaagcactgaaattcttctggcaatacaagaaccattttcaggatcttggagttacttccttcttaatctttcttaaagcattcactgatgtttttgttttttcaaaatgaaacaaaaatatcacattgagaagctagtctatgttctgtcactaacatttaaactttgcagactctaacaaaaagcacaagaggtcacgtactattatacaaatttagcggtactggatttacctctgacattaacacactcaggcagagaccaggagtgatcagcaggtcttcagaaccaaaaaacctttctgttcacatttcatctgatttttaaactgaggcaggctttgattcttctgaaggatgccaagaatcaaactaagggaggactcactgttaaagatgtgttctgatgtcttatattaagaccaaatgtgacatgatgtgattatcttccagtactttgcttttaggtaccatttcatgacattttaggaatgagtattggaaaatataaagaattagaaaagcagcactttttttttaatggaaaagtcttcggtccagtgttacaccttatagtgtaattcagtccctaagcacagaatgaatgtctggcctgcatatggtagttacagtgtaacctctggctgcagaccacacaggacaaccctaacagcctagtcttgtatggtgtaaatatcaagagtacagcttcaatttcatttgctttatcttagcaacaatgccaactcaggagagcagacggccgatttcagtgaagtctggtagtcaacagatgttatttcagtctcagtgcatctcctctggctttctttgactgaaggtgtttataggaaggaagttaaaaaaaaaaaagctcattgagattctttaccaattctttacaagatttctgggggtgacagggaaagcaaaaggacttcaaagcaaaagggtgcacaagagcttacttcaccctgaaaatcagtattattaatgaaaagtactgttttcttaaagaagtcgaatgtcctttagatgaacaagaccaagtatacatctccattagattaaaatgtagcacagggttaaaaattatcagtttaatctctttaagaacagtattatcagagtttaaaatgagttagctctgtttatctacacacagcaaacccattcgcagcctcttggccacatgtattcagatgtttgaaatagtgaatcatttcattttcattctaaaacaatactgacttagccatataccttctgtttgtcaatctgaaacttgcttacatctaataagtagacctcttataacactgcaaccattctaagagttggaatttatttttgccaagtattaagtactgttacatctaaaatacagaatgtcaaatggttgcatagcttgtttcccacaacaaggaggaaaagaacaggaatacaaactctgtaatatgctgataaagaagccttagaactgccaactggcttgatggttcaattagtaagctaatttctcccacacccgctccttgatttttagactaattttcccaaagcaaggtttagtcacacaaacttgaaagtacatttaaaatgttcttagttgtcatcctacttttattgcctatggaatatgctaatttctaaaaaaaatacgggagaggcaccaaacccctaaattctagtgcaataatttaaaaaaaaaaaaaaa

SEQ ID NO: 3279 - DNA, 2065 bp, Homo sapiens
ggcttcagccctgcagggaaagaaaagtgcaatgattctggactgagacgcgcttgggcagaggctatgtaatcgtgtctgtgttgaggacttcgcttcgaggagggaagaggagggatcggctcgctcctccggcggcggcggcggcggcgactctgcaggcggagtttcgcggcggcggcaccagggttacgccagccccgcggggaggtctctccatccagcttctgcagcggcgaaagccccagcgcccgagcgcctgagccggcggggagcaagtaaagctagaccgatctccggggagccccggagtaggcgagcggcggccgccagctagttgagcgcaccccccgcccgccccagcggcgccgcggcgggcggcgtccaggcggcatggagaaggacggcctgtgccgcgctgaccagcagtacgaatgcgtggcggagatcggggagggcgcctatgggaaggtgttcaaggcccgcgacttgaagaacggaggccgtttcgtggcgttgaagcgcgtgcgggtgcagaccggcgaggagggcatgccgctctccaccatccgcgaggtggcggtgctgaggcacctggagaccttcgagcaccccaacgtggtcaggttgtttgatgtgtgcacagtgtcacgaacagacagagaaaccaaactaactttagtgtttgaacatgtcgatcaagacttgaccacttacttggataaagttccagagcctggagtgcccactgaaaccataaaggatatgatgtttcagcttctccgaggtctggactttcttcattcacaccgagtagtgcatcgcgatctaaaaccacagaacattctggtgaccagcagcggacaaataaaactcgctgacttcggccttgcccgcatctatagtttccagatggctctaacctcagtggtcgtcacgctgtggtacagagcacccgaagtcttgctccagtccagctacgccacccccgtggatctctggagtgttggctgcatatttgcagaaatgtttcgtagaaagcctctttttcgtggaagttcagatgttgatcaactaggaaaaatcttggacgtgattggactcccaggagaagaagactggcctagagatgttgcccttcccaggcaggcttttcattcaaaatctgcccaaccaattgagaagtttgtaacagatatcgatgaactaggcaaagacctacttctgaagtgtttgacatttaacccagccaaaagaatatctgcctacagtgccctgtctcacccatacttccaggacctggaaaggtgcaaagaaaacctggattcccacctgccgcccagccagaacacctcggagctgaatacagcctgaggcctcagcagccgccttaagctgatcctgcggagaacacccttggtggcttatgggtccccctcagcaagccctacagagctgtggaggattgctatctggaggccttccagctgctgtcttctggacaggctctgcttctccaaggaaaccgcctagtttactgttttgaaatcaatgcaagagtgattgcagctttatgttcatttgtttgtttgtttgtctgtttgtttcaagaacctggaaaaattccagaagaagagaagctgctgaccaattgtgctgccatttgatttttctaaccttgaatgctgccagtgtggagtgggtaatccaggcacagctgagttatgatgtaatctctctgcagctgccgggcctgatttggtacttttgagtgtgtgtgtgcatgtgtgtgtgtgtgtgtgtgtgtgtgtgtgtgtatgtgagagattctgtgatcttttaaagtgttactttttgtaaacgacaagaataattcaattttaaagactcaaggtggtcagtaaataacaggcatttgttcactgaaggtgattcaccaaaatagtcttctcaaattagaaagttaaccccatgtcctcagcatttcttttctggccaaaagcagtaaatttgctagcagtaaaagatgaagttttatacacacagcaaaaaaaaaaaaaaaaaa

SEQ ID NO: 3280 - DNA, 1992 bp, Homo sapiens; identical to SEQ ID NO: 124

SEQ ID NO: 3281 - DNA, 805 bp, Homo sapiens; identical to SEQ ID NO: 1585

SEQ ID NO: 3282 - DNA, 1443 bp, Homo sapiens
atgtctgctgaagtcatccatcaggttgaagaagcacttgatacagatgagaaggagatgctgctctttttgtgccgggatgttgctatagatgtggttccacctaatgtcagggaccttctggatattttacgggaaagaggtaagctgtctgtcggggacttggctgaactgctctacagagtgaggcgatttgacctgctcaaacgtatcttgaagatggacagaaaagctgtggagacccacctgctcaggaaccctcaccttgtttcggactatagagtgctgatggcagagattggtgaggatttggataaatctgatgtgtcctcattaattttcctcatgaaggattacatgggccgaggcaagataagcaaggagaagagtttcttggaccttgtggttgagttggagaaactaaatctggttgccccagatcaactggatttattagaaaaatgcctaaagaacatccacagaatagacctgaagacaaaaatccagaagtacaagcagtctgttcaaggagcagggacaagttacaggaatgttctccaagcagcaatccaaaagagtctcaaggatccttcaaataacttcaggctccataatgggagaagtaaagaacaaagacttaaggaacagcttggcgctcaacaagaaccagtgaagaaatccattcaggaatcagaagcttttttgcctcagagcatacctgaagagagatacaagatgaagagcaagcccctaggaatctgcctgataatcgattgcattggcaatgagacagagcttcttcgagacaccttcacttccctgggctatgaagtccagaaattcttgcatctcagtatgcatggtatatcccagattcttggccaatttgcctgtatgcccgagcaccgagactacgacagctttgtgtgtgtcctggtgagccgaggaggctcccagagtgtgtatggtgtggatcagactcactcagggctccccctgcatcacatcaggaggatgttcatgggagattcatgcccttatctagcagggaagccaaagatgttttttattcagaactatgtggtgtcagagggccagctggaggacagcagcctcttggaggtggatgggccagcgatgaagaatgtggaattcaaggctcagaagcgagggctgtgcacagttcaccgagaagctgacttcttctggagcctgtgtactgcggacatgtccctgctggagcagtctcacagctcaccatccctgtacctgcagtgcctctcccagaaactgagacaagaaagaaaacgcccactcctggatcttcacattgaactcaatggctacatgtatgattggaacagcagagtttctgccaaggagaaatattatgtctggctgcagcacactctgagaaagaaacttatcctctcctacacatag

SEQ ID NO: 3283 - DNA, 735 bp, Homo sapiens
atgaaggagagaagagccagccagaaattatccagcaaatctatcatggatcctaatcagaacgtgaaatgcaagatagttgtggtgggagacagtcagtgtggaaaaactgcgctgctccatgtcttcgccaaggactgcttccccgagaattacgttcctacagtgtttgagaattacacggccagttttgaaatcgacacacaaagaatagagttgagcctgtgggacacttcgggttctccttactatgacaatgtccgccccctctcttaccctgattcggatgctgtgctgatttgctttgacatcagtagaccagagaccctggacagtgtcctcaaaaagtggaaaggtgaaatccaggaattttgtccaaataccaaaatgctcttggtcggctgcaagtctgatctgcggacagatgttagtacattagtagagctctccaatcacaggcagacgccagtgtcctatgaccagggggcaaatatggccaaacagattggagcagctacttatatcgaatgctcagctttacagtcggaaaatagcgtcagagacatttttcacgttgccaccttggcatgtgtaaataagacaaataaaaacgttaagcggaacaaatcacagagagccacaaagcggatttcacacatgcctagcagaccagaactctcggcagttgctacggacttacgaaaggacaaagcgaagagctgcactgtgatgtag

SEQ ID NO: 3284 - DNA, 492 bp, Homo sapiens
atgtctgaatcaggctttaaactgttgtgccagtgcttaggctttggaagtggtcatttcagatgtgattcatctagatggtgccatgacaatggtgtgaactacaagattggagagaagtgggaccgtcagggagaaaatggccagatgatgagctgcacatgtcttgggaacggaaaaggagaattcaagtgtgaccctcatgaggcaacgtgttatgatgatgggaagacataccacgtaggagaacagtggcagaaggaatatctcggtgccatttgctcctgcacatgctttggaggccagcggggctggcgctgtgacaactgccgcagacctgggggtgaacccagtcccgaaggcactactggccagtcctacaaccagtattctcagagataccatcagagaacaaacactaatgttaattgcccaattgagtgcttcatgcctttagatgtacaggctgacagagaagattcccgagagtag

SEQ ID NO: 3285 - DNA, 1263 bp, Homo sapiens
atgatgtattctcccatctgtctcactcaggatgaatttcacccattcatcgaggcacttcttccacatgtccgtgcaattgcctatacttggttcaacctgcaggctcgaaaacgcaagtactttaaaaagcatgagaagcgaatgtcaaaggatgaagaaagagcagtcaaagatgagcttctcagtgaaaagcctgaaatcaaacagaagtgggcatccaggctccttgccaaactgcgcaaagatattcgccaggagtatcgagaggactttgtgctcaccgtgactggcaagaagcacccgtgctgtgtcttatccaatcccgaccagaagggtaagattaggagaatcgactgcctgcgacaggcagacaaagtctggcgtctggatctagtcatggtgatcctgttcaaaggcatccccttggaaagtaccgatggagagcggctcatgaaatccccacattgcacaaacccagcactttgtgtccagccacatcatatcacagtatcagttaaggagcttgatttgtttttggcatactacgtgcaggagcaagattctggacaatcaggaagtccaagccacaatgatcctgccaagaatcctccaggttaccttgaggatagttttgtaaaatctggagtcttcaatgtatcagaacttgtaagagtatccagaacgcccataacccagggaactggagtcaacttcccaattggagaaatcccaagccaaccatactatcatgacatgaactcgggggtcaatcttcagaggtctctgtcttctccaccaagcagcaaaagacccaaaactatatccatagatgaaaatatggaaccaagtcctacaggagacttttacccctctccaagttcaccagctgctggaagtcgaacatggcacgaaagagatcaagatatgtcttctccgactactatgaagaagcctgaaaagccattgttcagctctgcatctccacaggattcttccccaagactgagcactttcccccagcaccaccatcccggaatacctggagttgcacacagtgtcatctcaactcgaactccacctccaccttcaccgttgccatttccaacacaagctatccttcctccagccccatcgagctacttttctcatccaacaatcagatatcctccccacctgaatcctcaggatactctgaagaactatgtaccttcttatgacccatccagtccacaaaccagccagtcctggtacctgggctag

SEQ ID NO: 3286 - DNA, 537 bp, Homo sapiens
atgtcgccctctggccgcctgtgtcttcttaccatcgttggcctgattctccccaccagaggacagacgttgaaagataccacgtccagttcttcagcagactcaactatcatggacattcaggtcccgacacgagccccagatgcagtctacacagaactccagcccacctctccaaccccaacctggcctgctgatgaaacaccacaaccccagacccagacccagcaactggaaggaacggatgggcctctagtgacagatccagagacacacaagagcaccaaagcagctcatcccactgatgacaccacgacgctctctgagagaccatccccaagcacagacgtccagacagacccccagaccctcaagccatctggttttcatgaggatgaccccttcttctatgatgaacacaccctccggaaacgggggctgttggtcgcagctgtgctgttcatcacaggcatcatcatcctcaccagtggcaagtgcaggcagctgtcccggttatgccggaatcattgcaggtag

SEQ ID NO: 3287 - DNA, 1475 bp, Homo sapiens
ctgcctgcggcatggcccggggctcggcgctcccgcggcggccgctgctgtgcatcccggccgtctgggcggccgccgcgcttctgctctcagtgtcccggacttcaggtgaagtggaggttctggatccgaacgaccctttaggaccccttgatgggcaggacggcccgattccaactctgaaaggttactttctgaattttctggagccagtaaacaatatcaccattgtccaaggccagacggcaattctgcactgcaaggtggcaggaaacccaccccctaacgtgcggtggctaaagaatgatgccccggtggtgcaggagccgcggcggatcatcatccggaagacagaatatggttcacgactgcgaatccaggacctggacacgacagacactggctactaccagtgcgtggccaccaacgggatgaagaccattaccgccactggcgtcctgtttgtgcggctgggtccaacgcacagcccaaatcataactttcaggatgattaccacgaggatgggttctgccagccttaccggggaattgcctgtgcacgcttcattggcaaccggaccatttatgtggactcgcttcagatgcagggggagattgaaaaccgaatcacagcggccttcaccatgatcggcacgtctacgcacctgtcggaccagtgctcacagttcgccatcccatccttctgccacttcgtgtttcctctgtgcgacgcgcgctcccgggcacccaagccgcgtgagctgtgccgcgacgagtgcgaggtgctggagagcgacctgtgccgccaggagtacaccatcgcccgctccaacccgctcatcctcatgcggcttcagctgcccaagtgtgaggcgctgcccatgcctgagagccccgacgctgccaactgcatgcgcattggcatcccagccgagaggctgggccgctaccatcagtgctataacggctcaggcatggattacagaggaacggcaagcaccaccaagtcaggccaccagtgccagccgtgggccctgcagcacccccacagccaccacctgtccagcacagacttccctgagcttggaggggggcacgcctactgccggaaccccggaggccagatggagggcccctggtgctttacgcagaataaaaacgtccccgagacagcagcaagatggggattctgtacatcttggtccccagcatcgcaattccactggtcatcgcttgccttttcttcttggtttgcatgtgccggaataagcagaaggcatctgcgtccacaccgcagcggcgacagctgatggcctcgcccagccaagacatggaaatgcccctcattaaccagcacaaacaggtctccatgccttacattttctacccgggtggctcttccaggtttaatcctcaggggttgtttcccccaacattaaatgtcttaatttacttgaaaaaaaaaaaaaaaaaaa

SEQ ID NO: 3288 - DNA, 765 bp, Homo sapiens
atgtgcgacgaagacgagaccaccgccctcgtgtgcgacaatggctccggcctggtgaaagccggcttcgccggggatgacgcccctagggccgtgttcccgtccatcgtgggccgcccccgacaccagggcgtcatggtcggtatgggtcagaaagattcctacgtgggcgacgaggctcagagcaagagaggtatcctgaccctgaagtaccctatcgagcacggcatcatcaccaactgggatgacatggagaagatctggcaccacaccttctacaacgagcttcgcgtggctcccgaggagcaccccaccctgctcaccgaggcccccctcaatcccaaggccaaccgcgagaagatgacccagatcatgtttgagaccttcaacgtgcccgccatgtacgtggccatccaggccgtgctgtccctatacgcctccggcaggaccaccggcatcgtgctggactccggcgacggcgtcatgaagtgtgacatcgacatcaggaaggacctgtatgccaacaacgtcatgtcggggggcaccacgatgtaccctgggatcgctgaccgcatgcagaaagagatcaccgcgctggcacccagcaccatgaagatcaagatcatcgccccgccggagcgcaaatactcggtgtggatcggcggctccatcctggcctcgctgtccaccttccagcagatgtggatcaccaagcaggagtacgacgaggccggcccttccatcgtccaccgcaaatgcttctaa

SEQ ID NO: 3289 - DNA, 1395 bp, Homo sapiens
agccctttgtttatggcctgatctagctaaggcttctagacttcaggagcttaagaatcgtccggagggctgggcgtggcggtgcaggcctgtagtcccacccactccgaaggctgcggagggaggatcaacttgagtctgggaactcagccaggaattcaagaccagcctgggcaacacagtgaggccccctacccacatcctctccgtccccgcaatctccttgccttccccagggtgttgctgaaaatgtcagatgcaaatttggatagcagcaagaagaatttcttggagggggaagtagatgatgaggaaagtgtgattttgacactggtgccagttaaagatgacgcaaatatggaacaaatggaaccaagcgtttcttcaacttctgatgtcaaactggagaagcctaagaaatacaatccaggtcatctacttcaaacaaatgagcaatttacagctccacaaaaagctagatgcaaaataccagcccttcccttgccgaccatttcgcctcccattaataaggtgtgtcgggacactttgcgggactggtgtcaacaactcggtttgagtactaatggcaagaaaatcgaagtttatctgaggcttcataggcatgcttaccctgaacaacggcaagatatgcctgaaatgtcacaagagaccagattacagcgatgttcgaggaaacgcaaggcagtgaccaagagagcaaggcttcagagaagttatgagatgaatgagagagcagaagagaccaatacagtcgaagtgataacttcagcaccgggagccatgttggcatcatgggcaagaattgctgcaagagctgttcagcctaaggctttgaattcatgttccattcccgtttctgttgaggcctttttgatgcaagcctctggcgtcaggtggtgtgtggtccatggcagacttctctcggcagacacaaagggttgggtacgcctgcagtttcatgcaggtcaggcctgggtgcctaccactcacaggaggatgatttctctcttcttgttacctgcctgcattttcccatccccaggcatagaagataatatgttatgccccgactgtgctaagaggaataagaagatgatgaaaagattaatgacagtagagaagtagcagcaacctgtttgaatacaatgtactaaaggagggatgtactttcagatcatgtaacctattacgaaggagtggaagaggagacaatttgaatgaatcctcatgatctacaaaacaaaatcatagtgactaggactccacagtgaagatggttgactagtgacacagccccatctaaagaatccctttctgtatgtctgaaaacccattaaaataaagtcactgcaattggcaaaaaaaaaaaaaaaa

SEQ ID NO: 3290 - DNA, 5229 bp, Homo sapiens
agcggaggctatctccagccgtggccgatggccgtgccgggggcagagcccgctcccctccgcgcgttgctacgtgcggggatgacatggatccagacgccgtcaactacgggaaggaggaggcgagagttggagcgcgtgggagcgcagaggccggaggagggaaacaccctcccggatccagagcccggcggcggcgaagcagcagctgcggccgcgcccttgccagagccggtgcgtccgcctagccccgctccgcctgaggccgtcagggctcccgaggatggaagattcccaggagacatcgccgtcctccaacaactcctcggaggagctcagctctgctctgcacctgtccaagggcatgtcgatcttcctcgacatactgaggagagcagacaaaaatgatgatggaaaattatcctttgaagaattcaaagcatattttgcagatggtgttctcagtggagaagaattacacgagcttttccataccattgatacacataatactaataatcttgacacagaagagctatgtgaatatttttctcagcacttgggcgagtatgagaatgtactagcagcacttgaagacctgaatctttccatcctgaaggcaatgggcaaaacaaagaaagactaccaagaagcctccaatttggaacaattcgtaactagatttttattgaaggaaaccctgaatcagctgcagtctctccagaattccctggaatgtgccatggaaactactgaggagcaaacccgtcaagaaaggcaagggccagccaagccagaagtcctgtcgattcaatggcctggaaaacgatcaagccgccgagtccagagacacaacagcttctccccaaacagccctcagtttaatgtcagcggtccaggcttattagaagaagacaaccagtggatgacccagataaatagactccagaaattaattgatagactggaaaagaaggatctcaaactcgaaccaccagaagaagaaattattgaagggaatactaaatctcacatcatgcttgtgcagcggcagatgtctgtgatagaagaggacctggaagaattccagctcgctctgaaacactacgtggagagtgcttcctcccaaagtggatgcttgcgtatttctatacagaagctttcaaatgaatctcgctacatgatctatgagttctgggagaatagtagtgtatggaatagccaccttcagacaaattatagcaagacattccaaagaagtaatgtggatttcttggaaactccagaactcacatctacaatgctagttcctgcttcgtggtggatcctgaacaactagatgttcctagacattttctttatggttccaagtgcaaaacaggtgttcttatctaaaacgtcaattagaaaattatctgcggttgttaatctactgtatatttttgtttggtatatttactaagtgcactctttcaaaacttattctataactttatcaattcatgtgaattttagctcaattttcaaagttcactaatattctcaatatttaatgctaaatgctttgctacattgtaactcacctaaaaccttttagtgacaaaatcctaatatgtggaaaaaagcatatgcataaaggaataatattgtgaaaatgaatctgttatgataaagaaaaaataaagtggaaacttttagagtattacttcatagggcagattttgtaaactgtcgtatactgtaaagggttaaatcagcgttttgtgatttttaagtaactgtgagtgaagtttattcttcaacaatgtctactccatccccaacccaactcacagccctatgactactatctttgcattagttaaaaagttagtatataggcatcaaacaaccttggctgtaacctatagaatctctatccacgtatcaggttatagactggtttttcaaaagtgaacaatcctgtgataagttggagtaccatttagtaatacagcaacattgtgtcatttattagcatcataattctttgttatgtaagttaaatatatcaagaaagaagagactgtttggaaaaatgtggttcaagttttatgctatatagttttggtatgcgatacagacagctaacttttcttatgaaaaatacatatttgcatgtaaacaatgatttcaaaatacttgaaaaataaaattttaacccaaatgaataactaagaaatataaaacaagcacaaaatcttagggaagtcataaaatagtagtgaaagtattagacagaagacatctgttttcgaatttcaacactagaatgactaaaactatctacctatagaactatctgtagatagtatactatctacactctgctcaacaagctcagaaattaaatatttttaataataaaaatctgttctggttataaaccttgctaatgaaaatacaatacatataaaaatgtatagccatgttattttctagtataaattcctttgaaactataagtctttgaggaaaattataaggtaaaattttcctgtttttccccctttgaaaaactcaggaaaaaaggaagattgaactaataaaattttatttcttaaatataaatttgacctaaaatattttctcaaactaattcatgaaacagcaacttttaccaatacctttgtatactctcagttctcattcagtataaataaaattttaaaatcctttcatagttctattagaaataagtagtaaattttgatatattgtacatacacacgtgtgtgtgtgtgtgtgtgtgtgtgtgtgtgtgtgtgtgtgtatttgtgtgcctctggtcaactctaaggatgacagacactgtgtaacaacacctgggtcaactcttttaatttatatacaaagcaaagaacaacattaatggagatgcacaatgattattcaaacaagctatatatatgtacaaaggcaaacagacacataacagtctctgcagactgattgtatatagtaagaaaagatcaaaagactttaaaacctaaatgacttttgacatacaaactcttcttgagaatgtttgttgtaaatggtttcaaaaatacaaattatagccaatcaaaacattgctttggttggtgcatttaagtatccaactcaaaaagcatatcaaatattttgggtactaggcagtttccaaagtagcatggtagtattacttgttaaaagggttctgttttcattaacagtactaagtggaagggatctgcagattccaaactggaataagctctatcatattctgaaacaagaattagaatgacttgagaacgggcaaataacaaagcaaaccaatataattatatggtcattctgaccccagctcttatacaaattatacatgtatttttgtgtatgtttgtgagagttgtatgtatgtgaatgtgtgtgagtgtgtattcacatacacatatatactggaacctatagtagaaaaggaaactagtagggccaaaaaaaaaaagaaaaagaaaaagaaaaaagaaaaaaaaagaaaaaactgggacctaagtataaatatctcatcctaaagtaaacaataagtttatagttaacgaagatttttttctatttaaaaccccattttcctaaagaacaaagtagtaaaataaaaaaaaatttaaaaaattaaaaaataaaaaaaagaggtcactaaaagaccaagatgggaaacgtaacatggaatacaagcttgaatctgggaaacaagctcaaaaaacagtgaaaaaaaaagtactggtttaggagttcaaaattcagtgaaacaaactttttgccaatagacctagggatctaagaaatagaattagggagagtttacacttacttacctatatatcagcagatttttctggaagaaaccctttttttttttttttttaaacagtaacatccagagtgacaaattgcaggagatttaatgtataaaatttctaggaattaaaagcttaaacccaaaaattgttcatccatatataagaaattatcgaattaaaacttaatgtatgtcaattattttcaaatgtctaaattcctttggaaataaaaatatcagttttactttgaaattgctcaacttctgctattcatatggtctgattagtgacataagtagcagccgtttttcaacttcagtttcattcactaccattgtttccaaattatcaatctctgctagtaattatgaatttaagaccatattattatcaaaaacctagagaccaatcatatatctgaaaagaaatacccattaaaaattctgcctcctgtttattgagaactatgcattgaacattctgaatcattctaagcctctggagagactgtaatgatccattcatgagctggtatgaaatcagtgggaagcagaacaacagaaggaactttaaaagcaacaagcaattatgtaccatatatacactgtagcaaatattttatatttgagagtctttacagcttacatttccattccattattacaagtgatgaaaaacaaaaaattgcaagtagtatgcaaattataaatatacagtcttcccacttcactaaccaaattcctactttccagtgttacttcccaatttatgcaggaaacctcctgcaaagctgaaactgattagaaaattctttatattttaaaatagctctttctcatttttagagaagtcaaatagccaaccatcaaaattaagaataaattgaattgtcacagtccattacagttattgttgctagatccacctcatttgcagatgtccaaacttaaattcatctgttcttaaaatgctacttaaaactttggttgttttcctgtaatataaaagaaaaagttaatttatcaattgattgaatacagtttttactaattagtttatcaaaccaaatactgtgaacgtaccaggtgtttacagatttaaatgcatgttaccatagaaactattaaagtaactagaactgtcaaataacaaaacggctcatgtttttaaaatatatgtaactcattttaaaatatattaaattgtattccaaacctgttcttctgtttctgtggcacctaggtttaaaatatgtattaatgtgtaaatcacaagtaaaatgaattctaatgtacaagtttgttttaaaaagtgtatgtcaagcttttatttacacaataaaatgttattaaagatggaaagtcta

SEQ ID NO: 3291 - DNA, 860 bp, Homo sapiens
cccgcccggcacccggggtgcgccctcctcggtcccgcgccctccgggctcgcagggacgtctcctccctcccggctcgcggccccgcccggcccggcccccgcccagagccccagcgcgccgaggatgtgagtcctgctcgcctctggcggagcagcagccactcgcgcgcggagccggagcgcagcgcagcgcagccgcgggcgctctccgggccgctcgcgcgagtgccgcgctcttgccctagcggcgtcccccggcctctcgccggcgccaccgccgcagcagcccgcgggccgtccccggccggccgcccccggccccagcgccgctgaccctgtccgccgcgggcggggacgcgggcggaggaggcgccgcggcggagcccccggacgcgaccatgtcggaggtgctgccctacggcgacgagaagctgagcccctacggcgacggcggcgacgtgggccagatcttctcctgccgcctgcaggacaccaacaacttcttcggcgccgggcagaacaagcggccgcccaagctgggccagatcggccggagcaagcgggttgttattgaagatgataggattgatgacgtgctgaaaaatatgaccgacaaggcacctcctggtgtctaactcccccaaagacaatgagttaagggagagaataagaacggcggtaacagttattggcaaaaagcatgaaaagagaaagcactttgaaatttattactagcttgctacccacgatgaaatcaacaacctgtatctggtatcaggccgggagacagatgaggcgagaggaggaggaggaggaggagaaggctctgggctcctctgcaaaaaaaaaaaaaaaaaa

SEQ ID NO: 3292 - DNA, 3239 bp, Homo sapiens; identical to SEQ ID NO: 1986

SEQ ID NO: 3293 - DNA, 3209 bp, Homo sapiens
gggaggaggcagtgggagggcggagggcgggggccttcggggtgggcgcccagggtagggcaggtggccgcggcgtggaggcagggagaatgcgactctccaaaaccctcgtcgacatggacatggccgactacagtgctgcactggacccagcctacaccaccctggaatttgagaatgtgcaggtgttgacgatgggcaatgacacgtccccatcagaaggcaccaacctcaacgcgcccaacagcctgggtgtcagcgccctgtgtgccatctgcggggaccgggccacgggcaaacactacggtgcctcgagctgtgacggctgcaagggcttcttccggaggagcgtgcggaagaaccacatgtactcctgcagatttagccggcagtgcgtggtggacaaagacaagaggaaccagtgccgctactgcaggctcaagaaatgcttccgggctggcatgaagaaggaagccgtccagaatgagcgggaccggatcagcactcgaaggtcaagctatgaggacagcagcctgccctccatcaatgcgctcctgcaggcggaggtcctgtcccgacagatcacctcccccgtctccgggatcaacggcgacattcgggcgaagaagattgccagcatcgcagatgtgtgtgagtccatgaaggagcagctgctggttctcgttgagtgggccaagtacatcccagctttctgcgagctccccctggacgaccaggtggccctgctcagagcccatgctggcgagcacctgctgctcggagccaccaagagatccatggtgttcaaggacgtgctgctcctaggcaatgactacattgtccctcggcactgcccggagctggcggagatgagccgggtgtccatacgcatccttgacgagctggtgctgcccttccaggagctgcagatcgatgacaatgagtatgcctacctcaaagccatcatcttctttgacccagatgccaaggggctgagcgatccagggaagatcaagcggctgcgttcccaggtgcaggtgagcttggaggactacatcaacgaccgccagtatgactcgcgtggccgctttggagagctgctgctgctgctgcccaccttgcagagcatcacctggcagatgatcgagcagatccagttcatcaagctcttcggcatggccaagattgacaacctgttgcaggagatgctgctgggagggtcccccagcgatgcaccccatgcccaccaccccctgcaccctcacctgatgcaggaacatatgggaaccaacgtcatcgttgccaacacaatgcccactcacctcagcaacggacagatgtccacccctgagaccccacagccctcaccgccaggtggctcagggtctgagccctataagctcctgccgggagccgtcgccacaatcgtcaagcccctctctgccatcccccagccgaccatcaccaagcaggaagttatctagcaagccgctggggcttgggggctccactggctccccccagccccctaagagagcacctggtgatcacgtggtcacggcaaaggaagacgtgatgccaggaccagtcccagagcaggaatgggaaggatgaagggcccgagaacatggcctaagggccacatcccactgccacccttgacgccctgctctggataacaagactttgacttggggagacctctactgccttggacaacttttctcatgttgaagccactgccttcaccttcaccttcatccatgtccaacccccgacttcatcccaaaggacagccgcctggagatgacttgaggccttacttaaacccagctcccttcttccctagcctggtgcttctcctctcctagcccctgtcatggtgtccagacagagccctgtgaggctgggtccaattgtggcacttggggcaccttgctcctccttctgctgctgcccccacctctgctgcctccctctgctgtcaccttgctcagccatcccgtcttctccaacaccacctctccagaggccaaggaggccttggaaacgattcccccagtcattctgggaacatgttgtaagcactgactgggaccaggcaccaggcagggtctagaaggctgtggtgagggaagacgcctttctcctccaacccaacctcatcctccttcttcagggacttgggtgggtacttgggtgaggatccctgaaggccttcaacccgagaaaacaaacccaggttggcgactgcaacaggaacttggagtggagaggaaaagcatcagaaagaggcagaccatccaccaggcctttgagaaagggtagaattctggctggtagagcaggtgagatgggacattccaaagaacagcctgagccaaggcctagtggtagtaagaatctagcaagaattgaggaagaatggtgtgggagagggatgatgaagagagagagggcctgctggagagcatagggtctggaacaccaggctgaggtcctgatcagcttcaaggagtatgcagggagctgggcttccagaaaatgaacacagcagttctgcagaggacgggaggctggaagctgggaggtcaggtggggtggatgatataatgcgggtgagagtaatgaggcttggggctggagaggacaagatgggtaaaccctcacatcagagtgacatccaggaggaataagctcccagggcctgtctcaagctcttccttactcccaggcactgtcttaaggcatctgacatgcatcatctcatttaatcctcccttcctccctattaacctagagattgtttttgttttttattctcctcctccctccccgccctcacccgccccactccctcctaacctagagattgttacagaagctgaaattgcgttctaagaggtgaagtgattttttttctgaaactcacacaactaggaagtggctgagtcaggacttgaacccaggtctccctggatcagaacaggagctcttaactacagtggctgaatagcttctccaaaggctccctgtgttctcaccgtgatcaagttgaggggcttccggctcccttctacagcctcagaaaccagactcgttcttctgggaaccctgcccactcccaggaccaagattggcctgaggctgcactaaaattcacttagggtcgagcatcctgtttgctgataaatattaaggagaattca

SEQ ID NO: 3294 - DNA, 1600 bp, Homo sapiens
gggaggaggcagtgggagggcggagggcgggggccttcggggtgggcgcccagggtagggcaggtggccgcggcgtggaggcagggagaatgcgactctccaaaaccctcgtcgacatggacatggccgactacagtgctgcactggacccagcctacaccaccctggaatttgagaatgtgcaggtgttgacgatgggcaatgacacgtccccatcagaaggcaccaacctcaacgcgcccaacagcctgggtgtcagcgccctgtgtgccatctgcggggaccgggccacgggcaaacactacggtgcctcgagctgtgacggctgcaagggcttcttccggaggagcgtgcggaagaaccacatgtactcctgcagatttagccggcagtgcgtggtggacaaagacaagaggaaccagtgccgctactgcaggctcaagaaatgcttccgggctggcatgaagaaggaagccgtccagaatgagcgggaccggatcagcactcgaaggtcaagctatgaggacagcagcctgccctccatcaatgcgctcctgcaggcggaggtcctgtcccgacagatcacctcccccgtctccgggatcaacggcgacattcgggcgaagaagattgccagcatcgcagatgtgtgtgagtccatgaaggagcagctgctggttctcgttgagtgggccaagtacatcccagctttctgcgagctccccctggacgaccaggtggccctgctcagagcccatgctggcgagcacctgctgctcggagccaccaagagatccatggtgttcaaggacgtgctgctcctaggcaatgactacattgtccctcggcactgcccggagctggcggagatgagccgggtgtccatacgcatccttgacgagctggtgctgcccttccaggagctgcagatcgatgacaatgagtatgcctacctcaaagccatcatcttctttgacccagatgccaaggggctgagcgatccagggaagatcaagcggctgcgttcccaggtgcaggtgagcttggaggactacatcaacgaccgccagtatgactcgcgtggccgctttggagagctgctgctgctgctgcccaccttgcagagcatcacctggcagatgatcgagcagatccagttcatcaagctcttcggcatggccaagattgacaacctgttgcaggagatgctgctgggaggtccgtgccaagcccaggaggggcggggttggagtggggactccccaggagacaggcctcacacagtgagctcacccctcagctccttggcttccccactgtgccgctttgggcaagttgcttaacctgtctgtgcctcagtttcctcaccagaaaaatgggaacaaggcaatggtctatttgttcaggcaccgagaacctagcacgtgccagtcactgttctaagtgctggcaattcagcaaagaacaagatctttgccctcggggaggctgtgtgtgtgtgagtatgtatggatgcgtggatatctgtgtatatgcccgtatgtgcgtgcatgtgtatataaagcctcacattttatgattttgaaataaacaggtaata

SEQ ID NO: 3295 - DNA, 2974 bp, Homo sapiens; identical to SEQ ID NO: 680

SEQ ID NO: 3296 - DNA, 3136 bp, Homo sapiens; identical to SEQ ID NO: 865

SEQ ID NO: 3297 - DNA, 4918 bp, Homo sapiens; identical to SEQ ID NO: 2309

SEQ ID NO: 3298 - DNA, 4004 bp, Homo sapiens
gcaagatgctgcccgtgtaccaggaggtgaagcccaacccgctgcaggacgcgaacctctgctcacgcgtgttcttctggtggctcaatcccttgtttaaaattggccataaacggagattagaggaagatgatatgtattcagtgctgccagaagaccgctcacagcaccttggagaggagttgcaagggttctgggataaagaagttttaagagctgagaatgacgcacagaagccttctttaacaagagcaatcataaagtgttactggaaatcttatttagttttgggaatttttacgttaattgaggaaagtgccaaagtaatccagcccatatttttgggaaaaattattaattattttgaaaattatgatcccatggattctgtggctttgaacacagcgtacgcctatgccacggtgctgactttttgcacgctcattttggctatactgcatcacttatatttttatcacgttcagtgtgctgggatgaggttacgagtagccatgtgccatatgatttatcggaaggcacttcgtcttagtaacatggccatggggaagacaaccacaggccagatagtcaatctgctgtccaatgatgtgaacaagtttgatcaggtgacagtgttcttacacttcctgtgggcaggaccactgcaggcgatcgcagtgactgccctactctggatggagataggaatatcgtgccttgctgggatggcagttctaatcattctcctgcccttgcaaagctgttttgggaagttgttctcatcactgaggagtaaaactgcaactttcacggatgccaggatcaggaccatgaatgaagttataactggtataaggataataaaaatgtacgcctgggaaaagtcattttcaaatcttattaccaatttgagaaagaaggagatttccaagattctgagaagttcctgcctcagagggatgaatttggcttcatttttcagtgcaagcaaaatcatcgtgtttgtgaccttcaccacctacgtgctcctcggcagtgtgatcacagccagccgcgtgttcgtggcagtgacgctgtatggggctgtgcggctgacggttaccctcttcttcccctcagccattgagagggtgtcagaggcaatcgtcagcatccgaagaatccagacctttttgctacttgatgagatatcacagcgcaaccgtcagctgccgtcagatggtaaaaagatggtgcatgtgcaggattttactgctttttgggataaggcatcagagaccccaactctacaaggcctttcctttactgtcagacctggcgaattgttagctgtggtcggccccgtgggagcagggaagtcatcactgttaagtgccgtgctcggggaattggccccaagtcacgggctggtcagcgtgcatggaagaattgcctatgtgtctcagcagccctgggtgttctcgggaactctgaggagtaatattttatttgggaagaaatacgaaaaggaacgatatgaaaaagtcataaaggcttgtgctctgaaaaaggatttacagctgttggaggatggtgatctgactgtgataggagatcggggaaccacgctgagtggagggcagaaagcacgggtaaaccttgcaagagcagtgtatcaagatgctgacatctatctcctggacgatcctctcagtgcagtagatgcggaagttagcagacacttgttcgaactgtgtatttgtcaaattttgcatgagaagatcacaattttagtgactcatcagttgcagtacctcaaagctgcaagtcagattctgatattgaaagatggtaaaatggtgcagaaggggacttacactgagttcctaaaatctggtatagattttggctcccttttaaagaaggataatgaggaaagtgaacaacctccagttccaggaactcccacactaaggaatcgtaccttctcagagtcttcggtttggtctcaacaatcttctagaccctccttgaaagatggtgctctggagagccaagatacagagaatgtcccagttacactatcagaggagaaccgttctgaaggaaaagttggttttcaggcctataagaattacttcagagctggtgctcactggattgtcttcattttccttattctcctaaacactgcagctcaggttgcctatgtgcttcaagattggtggctttcatactgggcaaacaaacaaagtatgctaaatgtcactgtaaatggaggaggaaatgtaaccgagaagctagatcttaactggtacttaggaatttattcaggtttaactgtagctaccgttctttttggcatagcaagatctctattggtattctacgtccttgttaactcttcacaaactttgcacaacaaaatgtttgagtcaattctgaaagctccggtattattctttgatagaaatccaataggaagaattttaaatcgtttctccaaagacattggacacttggatgatttgctgccgctgacgtttttagatttcatccagacattgctacaagtggttggtgtggtctctgtggctgtggccgtgattccttggatcgcaatacccttggttccccttggaatcattttcatttttcttcggcgatattttttggaaacgtcaagagatgtgaagcgcctggaatctacaactcggagtccagtgttttcccacttgtcatcttctctccaggggctctggaccatccgggcatacaaagcagaagagaggtgtcaggaactgtttgatgcacaccaggatttacattcagaggcttggttcttgtttttgacaacgtcccgctggttcgccgtccgtctggatgccatctgtgccatgtttgtcatcatcgttgcctttgggtccctgattctggcaaaaactctggatgccgggcaggttggtttggcactgtcctatgccctcacgctcatggggatgtttcagtggtgtgttcgacaaagtgctgaagttgagaatatgatgatctcagtagaaagggtcattgaatacacagaccttgaaaaagaagcaccttgggaatatcagaaacgcccaccaccagcctggccccatgaaggagtgataatctttgacaatgtgaacttcatgtacagtccaggtgggcctctggtactgaagcatctgacagcactcattaaatcacaagaaaaggttggcattgtgggaagaaccggagctggaaaaagttccctcatctcagccctttttagattgtcagaacccgaaggtaaaatttggattgataagatcttgacaactgaaattggacttcacgatttaaggaagaaaatgtcaatcatacctcaggaacctgttttgttcactggaacaatgaggaaaaacctggatccctttaatgagcacacggatgaggaactgtggaatgccttacaagaggtacaacttaaagaaaccattgaagatcttcctggtaaaatggatactgaattagcagaatcaggatccaattttagtgttggacaaagacaactggtgtgccttgccagggcaattctcaggaaaaatcagatattgattattgatgaagcgacggcaaatgtggatccaagaactgatgagttaatacaaaaaaaaatccgggagaaatttgcccactgcaccgtgctaaccattgcacacagattgaacaccattattgacagcgacaagataatggttttagattcaggaagactgaaagaatatgatgagccgtatgttttgctgcaaaataaagagagcctattttacaagatggtgcaacaactgggcaaggcagaagccgctgccctcactgaaacagcaaaacaggtatacttcaaaagaaattatccacatattggtcacactgaccacatggttacaaacacttccaatggacagccctcgaccttaactattttcgagacagcactgtgaatccaaccaaaatgtcaagtc

SEQ ID NO: 3299 - DNA, 2114 bp, Homo sapiens
attataaatctagagactccaggattttaacgttctgctggactgagctggttgcctcatgttattatgcaggcaactcactttatcccaatttcttgatacttttccttctggaggtcctatttctctaacatcttccagaaaagtcttaaagctgccttaaccttttttccagtccacctcttaaattttttcctcctcttcctctatactaacatgagtgtggatccagcttgtccccaaagcttgccttgctttgaagcatccgactgtaaagaatcttcacctatgcctgtgatttgtgggcctgaagaaaactatccatccttgcaaatgtcttctgctgagatgcctcacacggagactgtctctcctcttccctcctccatggatctgcttattcaggacagccctgattcttccaccagtcccaaaggcaaacaacccacttctgcagagaatagtgtcgcaaaaaaggaagacaaggtcccagtcaagaaacagaagaccagaactgtgttctcttccacccagctgtgtgtactcaatgatagatttcagagacagaaatacctcagcctccagcagatgcaagaactctccaacatcctgaacctcagctacaaacaggtgaagacctggttccagaaccagagaatgaaatctaagaggtggcagaaaaacaactggccgaagaatagcaatggtgtgacgcagaaggcctcagcacctacctaccccagcctctactcttcctaccaccagggatgcctggtgaacccgactgggaaccttccaatgtggagcaaccagacctggaacaattcaacctggagcaaccagacccagaacatccagtcctggagcaaccactcctggaacactcagacctggtgcacccaatcctggaacaatcaggcctggaacagtcccttctataactgtggagaggaatctctgcagtcctgcatgcagttccagccaaattctcctgccagtgacttggaggctgctttggaagctgctggggaaggccttaatgtaatacagcagaccactaggtattttagtactccacaaaccatggatttattcctaaactactccatgaacatgcaacctgaagacgtgtgaagatgagtgaaactgatattactcaatttcagtctggacactggctgaatccttcctctcccctcctcccatccctcataggatttttcttgtttggaaaccacgtgttctggtttccatgatgcctatccagtcaatctcatggagggtggagtatggttggagcctaatcagcgaggtttctttttttttttttcctattggatcttcctggagaaaatacttttttttttttttttgagacggagtcttgctctgtcgcccaggctggagtgcagtggcgcggtcttggctcactgcaagctccgcctcccgggttcacgccattctcctgcctcagcctcccgagcagctgggactacaggcgcccgccacctcgcccggctaatattttgtatttttagtagagacagggtttcactgtgttagccaggatggtctcgatctcctgaccttgtgatccgcccgcctcggcctccctaacagctgggattacaggcgtgagccaccgcgccctgcctagaaaagacattttaataaccttggctgctaaggacaacattgatagaagccgtctctggctatagataagtagatctaatactagtttggatatctttagggtttagaatctaacctcaagaataagaaatacaagtacgaattggtgatgaagatgtattcgtattgtttgggattgggaggctttgcttatttttttaaaactattgaggtaaagggttaagctgtaacatacttaattgatttcttaccgtttttggctctgttttgctatatcccctaatttgttggttgtgctaatctttgtagaaagaggtcttgtatttgctgcatcgtaatgacatgagtactactttagttggtttaagttcaaatgaatgaaacaaatatttttcctttagttgattttaccctgatttcaccgagtgtttcgatgagtaaatatacagcttaaacat

SEQ ID NO: 3300 - DNA, 5115 bp, Homo sapiens; identical to SEQ ID NO: 2316

SEQ ID NO: 3301 - DNA, 3058 bp, Homo sapiens; identical to SEQ ID NO: 1639

SEQ ID NO: 3302 - DNA, 3680 bp, Homo sapiens
gctgcagaagctgccgccacctccaatgcacaaggtgtctcatctggaaagaaacctgagccccagggaggcggcgcggagcgaccctggcagagctggcgcaaacagggcgagaggtcgctgggcagcgttcgaggaccagagggagctcggccacagaagaccccagtgatctgatcccgggatcccggctccaagctctcctcgcattttacagatttcacccccgcgactatctccccaaaacggagcctttatatcaagagaaggtgcgggagctggggcaaccaggactttctcgggcacccaagatgcgctccattaggaagaggtggacgatctgcacaataagtctgctcctgatcttttataagacaaaagaaatagcaagaactgaggagcaccaggagacgcaactcatcggagatggtgaattgtctttgagtcggtcacttgtcaatagctctgataaaatcattcgaaaggctggctcttcaatcttccagcacaatgtagaaggttggaaaatcaattcctctttggtcctagagataaggaagaacatacttcgtttcttagatgcagaacgagatgtgtcagtggtcaagagcagttttaagcctggtgatgtcatacactatgtgcttgacaggcgccggacactaaacatttctcatgatctacatagcctcctacctgaagtttcaccaatgaagaatcgcaggtttaagacctgtgcagttgttggaaattctggcattctgttagacagtgaatgtggaaaggagattgacagtcacaattttgtaataaggtgtaatctagctcctgtggtggagtttgctgcagatgtgggaactaaatcagattttattaccatgaatccatcagttgtacaaagagcatttggaggctttcgaaatgagagtgacagagaaaaatttgtgcatagactttccatgctgaatgacagtgtcctttggattcctgctttcatggtcaaaggaggagagaagcacgtggagtgggttaatgcattaatccttaagaataaactgaaagtgcgaactgcctatccgtcattgagacttattcatgctgtcagaggttactggctgaccaacaaagttcctatcaaaagacccagcacaggtcttctcatgtatacacttgccacaagattctgtgatgaaattcacctgtatggattctggcccttccctaaggatttaaatggaaaagcggtcaaatatcattattatgatgacttaaaatataggtacttttccaatgcaagccctcacagaatgccattagaattcaaaacattaaatgtgctacataatagaggagctctaaaactgacaacaggaaagtgtgtaaagcaataaagcacattttgaaacaaacaatatgcacttcttttctgaagatgcttccgaagatttgaaaataggatccaaaacacggctgggtttcagcatccaccaatgaactgaaaggtgaataaaggacgttcatgagaaatcgactaccagctgatgaaatacctgcaaagtgctctaaaaattaaatattttgactttaagggtcctagtaagtgccacttccactaagaatacagtttgaatgtataatcagtagtgtttacaagatccaacagtgcactcatcattagttaacaaagcaaatatgttcatcactgtcaggctgcccacagcaacaccaagcatattagaagaggaaccccaggaacgcaactcagaccttgggaaattaaaccatccttgtcagcagaagccaagatggaagcagtttgagcaatgaaatccgtaagattaaacaactcaagtaaatgcttcagtcaggactctgagtctgatcatgaattttatgttttaatttatgtttttttttttgtcttctggaatctcttttggtttggatattgggatgcttagaaatcctttctgagatgcatatgagtgaggaaataaactttaagtaattatttttaaagttcttatactttttaaaagctatcacacaaagacttttttttttttttttgtctcgctctgttgcccaggctggagtacagtggcgcgatctcagctcactgcaagctccgcctcccaagttcactccattctcctgcctcagcctccggagtagctgggactgcaggcgcctgccaccacgcctggctaattttttgtatttttagtggagacggattttcaccgtgttagccaggatggtctcaatctcctgacctcgtgatccacccgccttggcctcccaaagtgctgggattacaggcgtgagccaccgtgcctggccgacatttttaaaaaagttttattttgcacggctctaaacctccatgttattttccagtggtgtagaaggtaccagctaaagtgaaccactatgtaatattaggccattctaaaggaaagatgttccatgtcatcagagatggtaaaataggcagggaaaaaaaaatctttggtaccaaagattacacttgtgtttctacacagcaaaccatttttctttcatgaaaataatatattattaacatgaatatattattttgctattaatgtgaaagttgtctctaaatattttttaattttcaaactcatactttattttcatttgaaatgtttttcacaccttttgcattacataataattttgtggaagcattttgccctttagaataaatattagattgatatagctgaaatgtgacttccagttctttgatattccccttgttattcaaatagaaatatggaaatgctttatatattactgttaaatttcttagtgcagaaataacattattaatagagtattgttttcaaaacagatgattaatttcaagaggtttaacagtgaaattgtgtcaatattttgcatttaaaatgaatttaattgaccgatattttctgtagttaaatttagtcacaatatcacatatgttcttcaagaaacacatgaaattattaataaagtaattaaaaaatttttaatgtataacagaattgaccaataggccagttttctggtaacttatgatagtagattgtttctttagaaactgggcagaagctctgcattctcacttgtactttgatttcttatttcttggtcaggcaatttgaggaaagaagaaatggcatggggaatatatatgttttgtttcttagggaaaacagtctgagaaatgaataaaaagcatgaagtacgtgtgtgtgtgtgtgtgtgtgttaccatggaaaaggatattcacagtagtacagttctcaatatttttaattagatgtcatatttttttaatatagtaaaaccttgggatatagaatattacatcttttgagaatgtatgtgtctctaagtaagtaaaatctaatgcgtataggagactgatagctaaaaatgaatggaacattaatgtacttttataattaaacctcttatctatcagaaattgtaagagaatagatacatgttttgaatgtaaagttgaaaagtctggtttactgaataaattgaaagtgatttataaaatctaaaaaaaaaaaaaaaaaaaaaaaaaaaaaaaaaaaaaaaaaaaaaaaaaaaaaaaaaaaaaaaaaaaaaaaaaaaaaaaaaaaaaaaaaaaaaaa

SEQ ID NO: 3303 - DNA, 3291 bp, Homo sapiens
ggcgacggccccagcaagccccagcagccccagccccagccccaggcccagcagcagcagcagcagcccctgctctcccgccgcccggagaggctctgcagccatgaagccaaccgtcccgaggcaccgccgtaagcagggagcctccgcggagctcccgccgccgctcccccttggtgagtcctgccgcagcgagaggcatggagaaggccgcccccgcggggcgctgatcccctcgccgcgcccgcgcgcacacgccccccgccgccgccgccgctgccgccgccgcgcgcccccagtacctcgctccccgcccaggccccaccatgaccggctccgcggccgacactcaccgctgcccccaccccaaaggcgccaaaggcacccggtcccggagcagccacgcgcggcccgtgagcctcgccaccagcgggggctcagaggaggaggacaaagacggcggggtgctgttccacgtcaacaagagcggcttccccatcgacagccacacctgggagcgcatgtggatgcacgtggccaaggtgcaccctaaggggggagaaatggtgggcgccatcaggaacgccgccttcttggcaaagccttcaataccccaggtcccaaactacaggctgtcgatgacgatcccagactggctccaggcgatccagaattacatgaagaccctacaatataatcacacagggacccagttctttgaaattaggaaaatgagaccgctgagtgggttaatggaaacagcaaaagaaatgacccgagagtccttgcctatcaaatgccttgaagctgtcatcctgggcataacccacagctaaaacaagggtctagcttctcccacactttctgttccatttttcaccagactcccggctcttcagcctgagaggaatatggtgcagagaaactgtgatggcatcgacatattggtggtgatgaccacctcccttacacaatagtctcatccctgcacaattttatacattcgagcatcatgccattggaatcacccacaaccttttgaaattgtggggatagacccaggaacagcctttgagcctgatctgccacaatcagatagaagagcaaagatgctccgaagtcctatgggatggatggctgtaagggacagtggaaaaggaaacactgcaagacaggagcttgagagatggtcccaggcaagatcagttaggtccttgagcgctgtgctgagaaatgacttttttccaaaaggcaatgggcaacccagatgaaagctctgaagcagaggtgtggcatgcttaggtatatgctctagagaggtagttctccaaagcacaggctgaaggacagattgggaaaggctgggctggatcagcaaagcccgttgggagctgttacatgagggaatggtgaggctagactcatggccctggggatgggaatggatttcagggaatggttttaagagctatcaaggagatagaatgtataggacttgcaggccaaccagacgcaggagttaatgaggaaggagtcaacgtctccaggtttctgaattgggcaatcgactgcgggattagctggaggaatgagagtggcagagaaaggatatgcgtcaatgcagacctgaactaagacagtgccagtgaaggtggagggaagggatggaggcatacatcatcaccaccactaggggactgcttagatgggaggagttattggagaaaggcagtgactccacatttctggcttgcatgataatgccacaagggaagaacttcaaggagaggatcggatttagggaaagatgagctcagatttggacatgtgaaatttgaggtgccttgtgggatgtcggaatgaggtatttgcaatgtggagctcacaggggaatctgcactggaaatgcgaatttaggagctgtgattaggaggttgtgcttactgttcaataagtgaaaggagaaaaagatcaaagatgaaatcagtattttttggtctagtttggcacaaagagcccatgaaagagacttaagaaggaaagagaggtagaaagaaaaccaggagagaaaggggatggagaggtcagtggaaggacatgtggctcagaattagactggggacaggaggattggtctagtctgttttctgggtctcctggacatctttgtgggaaggagaatctctgtgcctctctgcagtctgtggaacacttgcagccctgatctgaaaccagattgaccacaggtgccttggctgacatttgaaaaatggaaacttgaaccttactgaggcccctccccaaccctcttgtcatcctcctccctgtttcccacaaaggagatgaaacatgtgcctggggaacccagcaggaagctgggaatgggggtcggggcagcagatggctcagggccccaactctttagtggcaggagtcagccacagctgttcagcgaagcctcctgcaagtttaatgggggcagatgattggctggggatttgctggtggaagagatcaacgaaggggaacacaagcccaggcccttcatggggtagacaagctaacttcagactctttgttgaggggtgtctgagtgcctctggatttaggtcattgaaatgaccacctcccttacacaatagtctcatccctgcacaattttatacatttgcgcatcatgccactggaatcacccacgaccttttggaattgtggggatagacccaggaacagcctttgagcctgtccaaatcagagacagtgtgctcgtggttttcctttgttcttatccttctgacatttcagaaaagtgcaggaaggtggagagcttcagttcacgctgctgaactcagggaaatttgactcttgcacacagacaggaaacacagatccgaattcttcttctttttttttttttttgagacggagtcttggtctgtcgcaccactgcactccagcctgggtgacagagtgagactgtgtctcaaaaaaatgaaaaaaaaaaaaaagaccaccattcctccccagaaatgaaaccccatacccgttaaaaagtactccccatttcccccctccagcccctgcccaccaccgttctactctctgtctgtatgcacttgctactccaggtaccgcagatgagtggaatcataccatatttgtccttttgtattaggctgatttcactcagcatgtcttcaaggctcattctgcacattgcagaatttccctcccttatgaggctgaataaattctattacatgtatacactaaaaaaaaaaaaaaaaaaaa

SEQ ID NO: 3304 - DNA, 2201 bp, Homo sapiens
gagcaagcggcgttgttcgcctgcggaagcagtgctgccggtctctggacaaatttctccgggaggtggagacaaggaagctccagcttcgctttcccttgtggcccagagtggaacatactgagctgcactgaatcatctggatgcactcgcaactttaggaactggtggcaatttgtaaaaagacagctctggaagttgaagagaccagtggcttcaagcaaaaagtaaattgaaaatgggagatatctttttgtgtaagaaagtggaatcaccaaagaagaatttgagagaatccaaacaaagggaggaggatgatgaagatccagatctgatctatgttggggtggagcatgtacatagagatgctgaagttctctttgtcgggatgatttcaaattcaaaaccagtcgtttcaaacattttgaacagagtcaccccaggctcaaattcaagaagaaagaaaggccacttccgtcaatatcctgctcacgtgtcgcagcctgcaaatcatgtgacctctatggcaaaagccatcatgccggtttctctgtctgaggggcgatcgacagatagtcctgtcactatgaagtcttcatctgaacctggttataaaatgagctcaccacaagttgtttctcccagttcctcagactcgctccccccagggactcagtgtctagttggagctatggtctctggaggaggcagaaatgagagttctcctgattcaaagcgactttccacttcagatataaacagcagagattccaaaagggttaaactcagggatggaatcccaggggtaccttctttagctgtggtcccttcagatatgtcttctacaataagcacaaatacaccctcacaggggatctgcaactcatcaaaccatgttcagaatggagtaacatttccttggcctgatgctaatggaaaggcacatttcaatcttacagatccagagagagcaagtgagtctgccctggcaatgacagacatttcaagtctagcaagtcaaaacaagacctttgatcccaagaaagaaaatcccatcgtgttacttagcgacttttactatggacagcataaaggagatgggcagccggaacagaagactcacaccacctttaaatgcctcagctgcgtgaaagttctaaaaaatattaagtttatgaatcacatgaagcatcatttggaatttgagaagcagaggaacgacagctgggaagaccacaccacctgccagcactgccaccggcagtttcccactcccttccagctacagtgtcacattgatagtgtacacatcgccatggggccctctgctgtctgtaaaatctgtgaattgtcatttgaaacagatcaggtcctcttacaacacatgaaggaccatcataagcctggcgaaatgccttatgtgtgccaggtttgccattacagatcgtcggtctttgctgatgtggaaacacattttagaacgtgccatgaaaacacaaagaatttgctttgtctgttttgtctcaaacttttcaaaactgcaataccatacatgaatcattgttggaggcacagcagaaggagggtccttcagtgttccaagtgccggctacagtttttgacgttgaaggaggaaatagagcacaaaaccaaggaccatcaaacatttaaaaagccggagcaactgcaagggttgcctagtgaaacaaaagttattattcaaacttcagttcagccaggatcaagtggtatggcttccgttattgttagcaacactgaccctcagtcttctcctgtaaaaactaaaaagaagacggctatgaacactagagattccagactcccttgcagcaaggattctagctgaaaatatgttcgactgacttccaggagttccgaaaggcagaagtgaggctaggccatatgtgcattgtggctgtagatgctagcaagcaatgtcatcaactgtcaggttgtttttttacagtgacatctcatcagctccctattgtcaagaagtagctccaaagtctttgagccctttcccagtcaaatgctcccaacagggcatcccttattctgacctcagaggtttttcttgttcatgaactttaaataaatggaatcacacaaaaaaaaaaaaaaaaaaaaaaaaaaaaaaaaaaaaaaaaaaaaaaaaaaaaaaaaaaaaaaaaaaaaaa

SEQ ID NO: 3305 - DNA, 2908 bp, Homo sapiens; identical to SEQ ID NO: 2464

SEQ ID NO: 3306 - DNA, 5683 bp, Homo sapiens
gagacagttttgaagttttcaaagactggctctgctgttaagaagttgtacttaaagcggaggagctaagccacctgccaaaatgtgcaaaggacttgcagctttgccccactcatgcctggaaagggccaaggagattaagatcaagttgggaattctcctccagaagccagactcagttggtgaccttgtcattccgtacaatgagaagccagagaaaccagccaagacccagaaaacctcgctggacgaggccctgcagtggcgtgattccctggacaaactcctgcagaacaactatggacttgccagtttcaaaagtttcctgaagtctgaattcagtgaggaaaaccttgagttctggattgcctgtgaggattacaagaagatcaagtcccctgccaagatggctgagaaggcaaagcaaatttatgaagaattcattcaaacggaggctcctaaagaggtgaatattgaccacttcactaaggacatcacaatgaagaacctggtggaaccttccctgagcagctttgacatggcccagaaaagaatccatgccctgatggaaaaggattctctgcctcgctttgtgcgctctgagttttatcaggagttaatcaagtagtaatttagccaggctatgaaatcatcctgtgagttatttcctccataataaccctgcatttcccattaatctacatatcttcccacagcagctttgctcagtgatacccacatgggaaaaatcccaggggatgttgcttactctttttgcccacactgctttggatacttatctactgtccgaaggccttctttccccactcaattcttcctgccctgttattaattaagatatcttcagcttgtagtcagacacaatcagaatcacagaaaaatcctgcctaaggcaaagaaatataagacaagactatgatatcaatgaatgtgggttaagtaatagatttccagctaaattggtctaaaaaagaatattaagtgtggacagacctatttcaaaggagcttaattgatctcacttgttttagttctgatccagggagatcacccctctaattatttctgaacttggttaataaaagtttataagatttttatgaagcagccactgtatgatattttaagcaaatatgttatttaaaatattgatccttcccttggaccaccttcatgttagttgggtattataaataagagatacaaccatgaatatattatgtttatacaaaatcaatctgaacacaattcataaagatttctcttttataccttcctcactggccccctccacctgcccatagtcaccaaattctgttttaaatcaatgacctaagatcaacaatgaagtattttataaatgtatttatgctgctagactgtgggtcaaatgtttccattttcaaattatttagaattcttatgagtttaaaatttgtaaatttctaaatccaatcatgtaaaatgaaactgttgctccattggagtagtctcccacctaaatatcaagatggctatatgctaaaaagagaaaatatggtcaagtctaaaatggctaattgtcctatgatgctattatcatagactaatgacatttatcttcaaaacaccaaattgtctttagaaaaattaatgtgattacaggtagaggccttctaggtgagacacttttaaggtacactgcattttgcaaaaaaaaaaaaaaaaagtaatcttttagcaaccccagtattccttcactatttcgcttcctgcattagcaaattttacttacagtcaaaagtgcagatttatactcctgacgtgtctcattcacagctaaataataggccataggacttttggtaggtttaaacttttaattctgtatttcatgattataagtcttgctagaattttttctaatctttagtagatttgattaaataatgattcacagaatttagtaacagaatcaaactaagccatgtatgagggtaatcgagatgaggatattaactcaaaagaaatagggtgatttttaaaggattaataaaattctgaaatgttaagtagaagattacattgtctagtcttgtatttcctccttctgttgctctctttcattcacacactctcagtttctcatatttgtagctcatttatttggttatttcctaagaatattgaaagtgaagcaactatgtgactgtattcttcaggtaaacactgactgcgcttgttggattttccctatttttgtgacttcaagaataatatgccctgctgaatacatgccatttcacattctgaaactgggtagagtggttgggtgttctgccaacaattgctagtggtgtgaattcattcatatttgccagtattgctcacttcaaagaaactccttcatcaagcagtccagtgctaggccagatcaatgctacaatcatgaagttctcattgcatgcaattgtgtaggattgacaaggaactcagataaaaatttccagggtgcacttccagaaccagcttcaacatatgtctacattgcccccaagttaataaagtgccaaccctttactctctcatacagccagaaatgttagaaatccaaaatcttggtgcattattttttcataaacgctaaaacatttgaagaaacaatttaattatttaaaattcaagtattttattcacattatttgcaatatccaaatgtttaaaaattcccagataattaactagctattacagatctcacctagagggttgatgttatgaagactccagtggactgtactcacaaattggctggacaccctatgaaagtgggtagacctctcagcggaaaataagaagggcttttacctacagggcaggacagggtcccatgagagcagttctgtggagatataaaaagaatggaagaaggaatgccttatagtgatattgtgacattatatctatatatctacatatatctatctatctatatctacatctatataatcttacatttaaaattgtattcctacacatattagaaactcttctaataaatgaagtaaaaaaattaaaaagaatacaaatattccagccccaaatgagaaatcaaacatattaaaattgttcaagaaaatttctttgaacacttttgaaagtttttggaaacttagaaaagagggaaaaaaatccagtgttactagtaatttccatggtaatacagataaaatacattcttttaattctgggaaattagaaaaagtggggtgatctttccaggaaaaacatgtgtaacatctgcttatcactccagctccctcctcctcctcctctccacgttcccttgagtaaatgtctgggaaagcatgaagcttgatgcaagaaccctgttgtactggcgttttcctcccctgtgaaaacgtaactactgttgggagtgaattgaggatgtagaaaggtggtggaaccaaattgtggtcaatggaaataggagaatatggttctcactcttgagaaaaaaacctaagattagcccaggtagttgcctgtaacttcagtttttctgcctgggtttgatatagtttagggttggggttagattaagatctaaattacattaggacaaagagacagactattaactccacagttaattaaggacgtatgttccatgtttatttgttaaagcagtgtgaatagccttcaagcatgtgaataatcttccatcttccccgccacacatacacacacacactttttgtttctttcaggtagacaccttttaaaatgcagaactaactgaggcatttcagtaactttgctttcaaatcaataaagtcaaatgtatggaaacattttgtgccctactctccataccccgtgtactcaaattctctactgtatgaattatgctttaagtagaattcagtgccaaggagaacttggtgaaataaattattttaattttttttttatcctttacaaagccatggattttatttggttgatgtgtgctctgtacacaagccatttcaataggatggagctgttaattattttccaaagagtaatagacatgcaaaagtttcaataaaaactgggccattaacaaataaattaataaactaataagcattcccttctaggtttttgccaaactgcctatccaataacaaatttgagaatcgttgaaaaagctagttatatttcagagaaatgattttcattattgaaactgttctccctagcaggccattttccctttttcctgggagtttagcaagtttaggagagaatagtcatgaaaagaaagggaagaaaggggagaagggaagaggttaaaaagtaagtgctcagacctatgaacgtaatccctttgctagaaatatttaagagcagctcagcttggttgaaactgagttttgtcatcttccatatttgcaggaaggtattttctgacttgcaatgcagctagatgtaaaattttattttatcatactagaaagccttgactagaaaaatgaataaatattgagggtttcctgtccatatctggcttgcatgtgccagaaagcagagaatagaaaatgtaatctccaacatccaagcatcgaaacccaaggggtaggcaattctatgtaggttttggacatgaagtttggtgcatcttggtttatgctggctcaactgctattaaacctctctggcttatagtctcttcattctattagacaagcacgtatcgaacacttgcttcgcacaaggctctttagttaacaatttagcagctactgtttgtgttaaacacacttttcaccaaataggttctgaggcaaacgagagcaatgactatttaaagaaaggctttcccagcatcacttacacatcccaaaactaaaaagatcaactcttccaactgagaaaagactcctggctttgaatggaaacttacagcagagagtcacaggccacggcaacaacaacgacaacaacaaacatttggaatattattctcaactcacgttttaataatacatcttattatttttctagtagagaaactacaaatcagcctcttcaacatttatatacagtttaataagcctcttgcaagttacttgttctctcacctgaggtatttttttcctccccaccttgcccctgttcctcccttcctcttctccctttgcaagaggaaatatttaacatatttgggtccaacttcaataatgtaataattaatacattaaaagcatttaacttcctttctagaaaaatgcacaggctaaggcatagacaaaacaaagagaaatgctgagaaatttgccactggagacaagcaatctgaataaatatttgccaaaagttctttttatgtcatatagtgtcaggatttgaaggagctatttttttttaatgttgcaactagcaactcatcttcggaagacacagccaggagaatgaagtagaagtgaaaggtttataaatccatttgtaagcatttatcccatatattttaaattcaagaaaaattgtgtttatctttagaattttgtattcaatactttatgtactatgtgactcatgcttctggataaataaagcaccaaatatgtatctgtaaccacaatcacacatattatattaaatatatatctataaaaaaaaaaaaaaaaaaaca

SEQ ID NO: 3307 - DNA, 1889 bp, Homo sapiens
cagacggacactgtgccggggcgagctgacaggagttcacggctgcgatagaacatggagatgtcatgggcgcgacagagcctggcggggataccagcagcgatgagttccacccgttcatcgaggcactgctgcctcacgtccgcgctttctcctacacctggttcaacctgcaggcgcggaagcgcaagtacttcaagaagcatgaaaagcggatgtcgaaggacgaggagcgggcggtgagggacgagctgctgggcgagaagcccgagatcaagcagaagtgggcatcccggctgctggccaagctgcgcaaggacatccggcccgagttccgcgaggacttcgtgctgaccatcacgggcaagaagcccccctgctgcgtgctctccaaccccgaccagaagggcaagatccggcggattgactgcctgcgccaggctgacaaggtgtggcggctggacctggtcatggtgattttgtttaaggggatccccctggaaagtactgatggggagcggctctacaagtcgcctcagtgctcgaaccccggcctgtgcgtccagccacatcacattggagtcacaatcaaagaactggatctttatctggcttactttgtccacactccggaatccggacaatcagatagttcaaaccagcaaggagatgcggacatcaaaccactgcccaacgggcacttaagtttccaggactgttttgtgacttccggggtctggaatgtgacggagctggtgagagtatcacagactcctgttgcaacagcatcagggcccaacttctccctggcggacccggagagtcccagctactacaacatcaaccaggtgaccctggggcggcggtccatcacctcccctccttccaccagcaccaccaagcgccccaagtccatcgatgacagtgagatggagagccctgttgatgacgtgttctatcccgggacaggccgttccccagcagctggcagcagccagtccagcgggtggcccaacgatgtggatgcagggagcccccgggccacagcatcagccctgcacttcccctccacgtccatcatccagcagtcgagcccgtatttcacgcacccgaccatccgctaccaccaccaccacgggcaggactcactgaaggagtttgtgcagtttgtgtgctcggatggctcgggccaggccaccggacagcattcgcaacgacaggcgcctcctctgccaaccggtttgtcagcatcggaccccgggacggcaactttctgaacatcccacagcagtctcagtcctggttcctctgataagatcgacaaaagaaacaacaaaatgagaagaagaggttcctcgaaaggggggagaagaaattttgagaatggaaaaatcccccagcccagcccagccccaccgaaaagcaaaaattacacgtcgtcagccactcagcccttctctcctccagcccggggacccccgcgggccccagaagcagcccagttctcagagagcccttggaaggggtctcggtggagctgtgcaccagcagccaagcagaaagaaacacgcgacatggactctgtcaagtagaggacagaaagcaagaaaggatgcagaactgccttcctccccctggccccgccccgcccccgtcactgcgcttctgttataccatctttgcctgactctctccggcttctccattgaatggctaatgtgtatgtgaaataaagaaataaagaaaaacaaacgcgaaaaaaaaaaaaaaaaaaaaaaaaaaaaaaaaaaaaaaaaaaaaaaaaaaaaaaaaaaaaaaaaaaaaaaaaaaaaaaaaaaaaaaaaaaaaaaaaaaaaaaaaaaaaaaaaagaaaaaaaaaaaaaaaaaaa

SEQ ID NO: 3308 - DNA, 4988 bp, Homo sapiens
acgcgtccgcccacgcgtccgtacggctgcgagaagacgacagaagggcaggctgaagggaaagagagacatgtaagtgaaaaatcaaagctgcaccaagcagagggtactgtttatccatttgttgatgatttcagtgatgtcactattaagaaagaaataagaaataattttggaaaacttggtagatcagaaaaggaaaatgtacaagaatgtgcccaaagtgactatttaccaaatattcactctgagagaatttctgacagttacaatacaaaagattcatctgccattgtatatgaagaatcccttggtgaagagatacactacccggggaaaaaggtgaagcatagaattatcgaatttgaaaaattacatgtagaaaaaggagttctagaaaaaagacctaccagaacatcaattgttaatcctcctcaaaagaagattgatgacaaagccttttcattaaagcaaagagaatcaagatcaagcaatctaaatgcaaatatgtatcaggcagagaaaatgtctccaaatactgaatcagattcatctaacattgcaataaatttaaagctgctttcctctcaaactcataaagaatttgacgcacaagaaagggaacaacaggaaaaaataagtcttatagataaacctgcaatttctaaaagagctgaacatgaatcacctattacatttgacttaaagcagttgcacactcaaataaaacacacagatgtgaaattccaagaattagatagtggtcaaccagaagaagcttattttaaaatccaacatcctgctgacactgagaacattgtatttgatctaaaacaaatgtattctcatataggagatccagctctggagttccaagggcaagaaactagggaacagcaggaaatacattataaagaaaaaattcctagccctgaaacgttacaacctgacacacacaatatctctaaaagtgtgcaaaataatgtatttgccagtcaagaaatttcttccagtcaagagctttcaaatagaactatggtggagaaaagtagtattgatgaaaattccatttctttagaaaaagaagtccgacatgtacaggaacaaaacttagacattttaaaaactgatctttctcttaaatccttttctgaagaaatctatagtgaatcatgtgccctacttccaacctcatctgcagatatagaagaaactggtctttctgagaaaagttgtcctctagaaaatggaggcagaagttccatctcacatttgaaaaaagcagcaagtgaggaaaagcctttaggggttggtgaaatggaagaagaatgcactctagaaccagagttggcagcatttccaaagcaggatggtgggacacaggaatgtacagatgccactttggaagaccacagaggtgatgttcaggaagctgacacactccatagacagctctccctgagtcagtgcttcccactcttgatgactgaagaacaacagaatccaggtgaacaaataagtacaaacattcatgcctctggagaagaaaaatgttatgaagaagttcaagttcagaatgaagcttctttctccactttagaaggagaaatgatagaaactagtttttctcaaaatattcctaaattagatgaggcacataccactgaggcagcagaatctgagacctccctaacacaatatttacttgctgctggaaagcgtgaggttcctgaaactaaagacaccagagaccaggcaaagcttgtccagagtgaatcaatcacttcaatggaggtggaagaagtaactttcaacactgtgtatgaatactacaaccagaaacaggaatcactaggtcgtccactttctcctgagtctgacatttccattggtgtgggaagtacaaccagtgaagaaatatctgagttagatcagttttataccccaccatcatctgttgaatattttgaatctccaaagtcccctgacttatattttaatccttcagatataactaaacaatcctcaatacattcaggaggtgagacagttgaaagatattccacacctttaggggaagttgctgaaagatattcaacaccttccgaaggtgaggtaggagaaagatactccacacccccaggggagacactagagagatactccacacctccaggagagactctagagagatactccacacccccaggagagactctagagagatattccacacccccaggagagactctggagagatactccacacccccaggagagactctagagcgatattccacacccccaggggaggcactagagagatattctattcctactggaggaccaaaccccactggtacttttaaaacatatccatcaaaaatagaaagggaagacggtacaccaaatgagcatttctacacacctacagaagagaggggttcagcttatgaaatatggcgttccgattcatttggtacacccaatgaagccattgagccaaaagacaatgaaatgcctccatcttttattgaacctctgaccaaaaggaaggtatatgaaaacacaacactaggcttcattgttgaagttgaaggtcttccagttcctggtgtgaaatggtatcgaaataaatctttactagagccagatgaaagaatcaaaatggaaagagtgggtaatgtgtgttcactggaaatttctaacattcaaaaaggagaagggggagagtacatgtgtcatgctgtaaacatcataggggaagcaaagagctttgcaaatgtagacataatgccccaggaagaaagagtggtggcactaccacctccagtaacacatcagcatgtcatggagtttgatttggaacacaccacatcatcaagaacaccttctcctcaagaaattgtcctggaagttgaattaagtgaaaaagacgttaaagaatttgagaagcaggtgaaaatagtgacagttcccgaatttactcctgaccataaaagtatgattgtgagtctagatgttcttccatttaattttgtagatccaaatatggattcaagggagggagaagacaaagaactaaaaattgatttagaagtatttgaaatgcctcctcgctttataatgcctatttgtgattttaaaattccagaaaattcagatgctgtattcaaatgttcagtcatagggatcccgactcccgaagttaagtggtataaagaatatatgtgtattgagccagataatattaaatacgtgattagcgaggagaagggaagttacactcttaaaattcgaaatgtctgtctttctgatagtgcaacatacaggtgcagagctgtgaattgtgtaggagaggctatctgtcggggattcctcaccatgggagattctgaaatatttgctgtgatagcaaagaaaagcaaagtgactttaagcagtttaatggaagaattggtcttaaagagcaactacacagacagtttttttgaatttcaggtggtggaagggcctcccaggtttatcaaaggtatttctgactgttatgcaccaataggtacagcagcatattttcagtgcttagttcgtggctctccaagacccacggtttactggtacaaagatggaaaattagtccaaggaagaaggttcactgttgaggaaagtggcacagggttccataacctgtttataacaagcttagtaaagagtgatgaaggagagtataggtgtgtagctacaaacaaatcaggaatggctgagagctttgcagcactcaccttaacttaaaatgtaatgttttagtgcctcagtaattattagcattgatctgagtgctttcatattttccaaattatgtggatctaataaacttccaaacaggtccaccatatttgaattcattaccttggagacccctaaagaaataatctctatgtagaaatctcatctttgtaatacatgtaaatattttgttatctgaactgtggaatcatcacttgtgtcaatcatgctgtgtaatatcaaacacaattaaatctctccttggctacctaattgtttgtacttctatttaccctcatgcctcctccacaaagtgtttcagtggaatggactctcttttagcagataaaccatatatgcaaaagtacaatgtaaaagtggagaccatatcagatgaccacgcagacaaattggtaagggcaaatctctctgctcccattctaagttatttttggaattttaacccctttgcatccaaactcatgtttatttactttgacttagaataggcaaaacaaacaacaaaaaccagcttctcccaattggcaactaactctataatctgtttgacatttcaatcttaatatattaacttcatctcttttaaaaatgttttcgttattaatattcctcttcataagtgctttaattctcactggcttcaagggaccaattgtgctctttgtgggcagggttcacctagacatttgcaaaataagcaaatagatctttccacttttggagataccttatttttctccatttttgagatgacatcaagtgtaaaatgcagcaataatttagtattggcctggggaaaaaagggaaactatcatattgtgtttacatatagattttaaaactgtattctgatttcagaatctttaaaatttaaaaaaaggtgggatatttttagaattgagacaatatggtaatttgtatttcagattatatataaataacaagataacaagctttcctatcagtttcactgaatttcatctttaaaacgaatatagcttaataagcattcaatttttattgtgatgtttatgtttctaaagtaactctttaattttgtcttttaaaattaaaataacagtaaattaacatactccttaatatcttacctatatactaatgtggacccaagtcttctcatataagactcgacaaatataaaaaaaaaaaaaaaaaaaaaa

SEQ ID NO: 3309 - DNA, 6240 bp, Homo sapiens
gggagccaggggggatagcttcgtcgagaacggaggacaccggcggtccagggtcctgggcagtcgcgccagagctgagcggagggcgcggcgcgaggacgaatctttgtgacattctctctcagcattctttatcccctgtttgctgaagacttcgaccaaagctggtcttagctgttggcattctcctgagaaaaggatagcttcagaaatcagaaaaacatttgggaggtgtctagcccagtggaccttctgaagagcaatgctaagaagacgtttggtttaaagaattaaaaggaagaacaacttaagagcttcttcaaagtttcccgcatgaaaattacttaaacgttgcacacaacgtttcacaaaatcttttgtgaaagaagaaaaggaaattcagtgtgtgagtctcagcaggagttaagctaatgcagcttaaaataatgccgaaaaagaagcgcttatctgcgggcagagtgcccctgattctcttcctgtgccagatgattagtgcactggaagtacctcttgatctggtacagcctccaaccatcacccaacagtctccaaaagattacattattgaccctcgggagaatattgtaatccagtgtgaagccaaagggaaaccgcccccaagcttttcctggacccgtaatgggactcattttgacatcgataaagaccctctggtcaccatgaagcctggcacaggaacgctcataattaacatcatgagcgaagggaaagctgagacctatgaaggggtctatcagtgtacagcaaggaacgaacgcggagctgcagtttctaataacattgttgtccgcccatccagatcaccattgtggaccaaagaaaaacttgaaccaatcacacttcaaagtggtcagtctttagtacttccctgcagacccccaattggattaccaccacctataatattttggatggataattcctttcaaagacttccacaaagtgagagagtttctcaaggtttgaatggggacctttatttttccaatgtcctcccagaggacacccgcgaagactatatctgttatgctagatttaatcatactcaaaccatacagcagaagcaacctatttctgtgaaggtgatttcagtggatgaattgaatgacactatagctgctaatttgagtgacactgagttttatggtgctaaatcaagtagagagaggccaccaacatttttaactccagaaggcaatgcaagtaacaaagaggaattaagaggaaatgtgctttcactggagtgcattgcagaaggactgcctaccccaattatttactgggcaaaggaagatggaatgctacccaaaaacaggacagtttataagaactttgagaaaaccttgcagatcattcatgtttcagaagcagactctggaaattaccaatgtatagcaaaaaacgcattaggagccatccaccataccatttctgttagagttaaagcggctccatactggatcacagcccctcaaaatcttgtgctgtccccaggagaggatgggaccttgatctgcagagctaatggcaaccccaaacccagaattagctggttaacaaatggagtcccaatagaaattgcccctgatgaccccagcagaaaaatagatggcgataccattattttttcaaatgttcaagaaagatcaagtgcagtctatcagtgcaatgcctctaatgaatatggatatttactggcaaacgcatttgtaaatgtgctggctgagccaccacgaatcctcacacctgcaaacacactctaccaggtcattgcaaacaggcctgctttactagactgtgccttctttgggtctcctctcccaaccatcgagtggtttaaaggagctaaaggaagtgctcttcatgaagatatttatgttttacatgaaaatggaactttggaaattcctgtggcccaaaaggacagtacaggaacttatacgtgtgttgcaaggaataaattagggatggcgaagaatgaagttcacttagaaatcaaagatcctacatggatcgttaaacagcccgaatatgcagttgtgcaaagagggagcatggtgtcctttgaatgcaaagtgaaacatgatcacaccttatccctcactgtcctgtggctgaaggacaacagggaactgcccagtgatgaaaggttcactgttgacaaggatcatctagtggtagctgatgtcagtgacgatgacagcgggacctacacgtgtgtggccaacaccactctggacagcgtctccgccagcgctgtgcttagcgttgttgatgtcccaaatcctccctttgacttagaactgacagatcaacttgacaaaagtgttcagctgtcatggaccccaggcgatgacaacaatagccccattacaaaattcatcatcgaatatgaagatgcaatgcacaagccagggctgtggcaccaccaaactgaagtttctggaacacagaccacagcccagctgaagctgtctccttacgtgaactactccttccgcgtgatggcagtgaacagcattgggaagagcttgcccagcgaggcgtctgagcagtatttgacgaaagcctcagaaccagataaaaaccccacagctgtggaaggactgggatcagagcctgataatttggtgattacgtggaagcccttgaatggtttcgaatctaatgggccaggccttcagtacaaagttagctggcgccagaaagatggtgatgatgaatggacatctgtggttgtggcaaatgtatccaaatatattgtctcaggcacgccaacctttgttccatacctgatcaaagttcaggccctgaatgacatggggtttgcccccgagccagctgtagtcatgggacattctggagaagacctcccaatggtggctcctgggaacgtgcgtgtgaatgtggtgaacagtaccttagccgaggtgcactgggacccagtacctctgaaaagcatccgaggacacctacaaggctatcggatttactattggaagacccagagttcatctaaaagaaacagacgtcacattgagaaaaagatcctcaccttccaaggcagcaagactcatggcatgttgccggggctagagcccttaagccactacacactgaatgtccgagtggtcaatgggaaaggggagggcccagccagccctgacagagtctttaatactccagaaggagtccccagtgctccctcgtctttgaagattgtgaatccaacactggactctctcactttggaatgggatccaccgagccacccgaatggcattttgacagagtacaccttaaagtatcagccaattaacagcacacatgaattaggccctctggtagatttgaaaattcctaccaacaagacacggtggactttaaaaaatttaaatttcagcactcgatataagttttatttctatgcacaaacatcagcaggatcaggaagtcaaattacagaggaagcagtaacaactgtggatgaagcgatggcaagccggcaggtggatattgcaactcagggctggttcattggtctgatgtgtgctgttgctctccttatcttaattttgctgattgtttgcttcatcagaagaaacaagggtggtaaatatccagttaaagaaaaggaagatgcccatgctgaccctgaaatccagcctatgaaggaagatgatgggacatttggagaatacagtgatgcagaagaccacaagcctttgaaaaaaggaagtcgaactccttcagacaggactgtgaaaaaagaagatagtgacgacagcctagttgactatggagaaggggttaatggccagttcaatgaggatggctcctttattggacaatacagtggtaagaaagagaaagagccggctgaaggaaacgaaagctcagaggcaccttctcctgtcaacgccatgaattcctttgtttaatttttaggctctttgccaatattccatttctctagaatgtttatcctaagcacttgtttgtcagccctctcatactatgaacatatgggtagagagtatattttctgctgtatgttagtattatgagaatagttacagcaaaaacataactcagtcaaatgatatgttaatatgaactggaatgcaaagtgcatactttttcattcaaaatgggtattcttgatttcctcagaactgataaaaaataatgcaacatcaccaacagatcctgttatttcctctgcaggatacagttcaatatgatgcatgaaaaatgctccacatttaaaggacatacccgtgtatgttatgaaaacatggtttgatactttgtttatactaccctcagctgaacccctatatatgaattccgttttcattgtcaagagtgttactgtagtattctctagaacttcaatgtctttgtggacattgttgtgaaattggtgactatgtatagctgtcgttagtctttttgggagactgttaggaacagtttgtacagtatatacttgctaaatgagttcattatgacagtcacattgctgatgcttactgagaactattacctactcttggctcctgttactccgtaggcttcttaatcttccaggcattacagcagcacagtgttctactttttacatcatttctatgttcggttgtttttaggcataaacaatgtgtattgcagtgcatttcggcatttgtgccatactggaagaatcaaaaacaaatcatccaaattaaatttcaaacattatttcagagaacacagggcaagacacatacagtgccttcagatattaagcattccacaacatcgtgcattctgtatcagctggtccagtccattctgggtcctagattactgtcattgtctaaaagtaacttttaaaaagcagagttcatgaaaactgcaatgctgggaaaagaaggaaacatgaaaataaaaataagacagtttattagaaatagcatttcctcataagcataaaaagaaaatctttgttgccaactgaagcacatgatgattttgtggtcctttatggtttctattacatgcagtaagaaagatgtcaacatgctagaaaattaattttaaaactaagttattccaacactaaaagcatacaacagcatgccaacagtaatatattattctccaagactttacctatgtaagtgttcaaaactctgcagcattaaacaacgtgtatgcaaattgttatggatacatttcagaatctaagaaatcaggcaagtgcttaaaaggccaacggtccaagggattacatctgcagtttaaaaagtaaatatatattctatcgtattcataaacaatatctatcaaatgggttacctccaaatatgaaaatctataacaacctatggttgaaggaatgctcagtttcatttgccaataaattggtttctcataacttgcatcaagtttaattttaagtaaagctttttatatgtagatattttgttgaatttgtaaatacacttaaaatgtagatgctatatgcttataggtgttacatacaaataaacatgcaatgtttatgttgtactgtataagaggtaagctaattaatgcagtgaatgggattggaaagcatctacttaaatatctattgggttcccccctccccccaccttttttgctgtgaaactgaaatagtgaacttttctacgtattgacagcagatttttcgatgaaatcttcagagctttgcctatggggcacagtaggcctagtaacctggcatgtttgatatatgtaggtaaagcataatttaaagtaatcccaggtaaagatggccctaaatactttcatgtctctatattcatttttcacagatccacctgtctcttgaaaatataaaaagacaaaacaggtttgccttggcatcagagagcacaaagattaaaagttactttaaatttgccaatattttgggagaacaataaaactacattttttcctcttccatactggtagatgcgaaatttatctgtgcatgaaagggtcacttctgtaatagtgcaacagatttggtattaaaaattaaatgtggttttaaaagttcctctctcttttgtaatttatgttcccaattgagtgtgaatgtccaagtaatggtgtatgtaatggtacaggcaaatgtgactggatttccctcaaaaaagtaactattaaacaagaaaaaaa

SEQ ID NO: 3310 - DNA, 4321 bp, Homo sapiens
aagcagtggtattaacgcagagggcccattatggccgggggcccgcgccggctgtgctgcacagggggaggagagggaaccccaggcgcgagcgggaagaggggacctgcagccacaacttctctggtcctctgcatcccttctgtccctccacccgtccccttccccaccctctggcccccaccttcttggaggcgacaacccccgggaggcattagaagggatttttcccgcaggttgcgaagggaagcaaacttggtggcaacttgcctcccggtgcgggcgtctctcccccaccgtctcaacatgcttaggggtccggggcccgggctgctgctgctggccgtcctgtgcctggggacagcggtgccctccacgggagcctcgaagagcaagaggcaggctcagcaaatggttcagccccagtccccggtggctgtcagtcaaagcaagcccggttgttatgacaatggaaaacactatcagataaatcaacagtgggagcggacctacctaggcaatgcgttggtttgtacttgttatggaggaagccgaggttttaactgcgagagtaaacctgaagctgaagagacttgctttgacaagtacactgggaacacttaccgagtgggtgacacttatgagcgtcctaaagactccatgatctgggactgtacctgcatcggggctgggcgagggagaataagctgtaccatcgcaaaccgctgccatgaagggggtcagtcctacaagattggtgacacctggaggagaccacatgagactggtggttacatgttagagtgtgtgtgtcttggtaatggaaaaggagaatggacctgcaagcccatagctgagaagtgttttgatcatgctgctgggacttcctatgtggtcggagaaacgtgggagaagccctaccaaggctggatgatggtagattgtacttgcctgggagaaggcagcggacgcatcacttgcacttctagaaatagatgcaacgatcaggacacaaggacatcctatagaattggagacacctggagcaagaaggataatcgaggaaacctgctccagtgcatctgcacaggcaacggccgaggagagtggaagtgtgagaggcacacctctgtgcagaccacatcgagcggatctggccccttcaccgatgttcgtgcagctgtttaccaaccgcagcctcacccccagcctcctccctatggccactgtgtcacagacagtggtgtggtctactctgtggggatgcagtggctgaagacacaaggaaataagcaaatgctttgcacgtgcctgggcaacggagtcagctgccaagagacagctgtaacccagacttacggtggcaactcaaatgaagagccatgtgtcttaccattcacctacaatggcaggacgttctactcctgcaccacagaagggcgacaggacggacatctttggtgcagcacaacttcgaattatgagcaggaccagaaatactctttctgcacagaccacactgttttggttcagactcgaggaggaaattccaatggtgccttgtgccacttccccttcctatacaacaaccacaattacactgattgcacttctgagggcagaagagacaacatgaagtggtgtgggaccacacagaactatgatgccgaccagaagtttgggttctgccccatggctgcccacgaggaaatctgcacaaccaatgaaggggtcatgtaccgcattggagatcagtgggataagcagcatgacatgggtcacatgatgaggtgcacgtgtgttgggaatggtcgtggggaatggacatgcattgcctactcgcagcttcgagatcagtgcattgttgatgacatcacttacaatgtgaacgacacattccacaagcgtcatgaagaggggcacatgctgaactgtacatgcttcggtcagggtcggggcaggtggaagtgtgatcccgtcgaccaatgccaggattcagagactgggacgttttatcaaattggagattcatgggagaagtatgtgcatggtgtcagataccagtgctactgctatggccgtggcattggggagtggcattgccaacctttacagacctatccaagctcaagtggtcctgtcgaagtatttatcactgagactccgagtcagcccaactcccaccccatccagtggaatgcaccacagccatctcacatttccaagtacattctcaggtggagacctgtgagtatcccacccagaaaccttggatactgagtctcctaatcttatcaattctgatggtttctttttttcccagcttttgagccaacaactctgattaactattcctatagcatttactatatttgtttagtgaacaaacaatatgtggtcaattaaattgacttgtagactgaggggattttggttttggttttgggttttgtttttttgcggtgggggggctggtatttggaagaatttagctctttatgttacagaaatcttttttgcaaggacttagaaatgataatgcttaagattgttcttgcccaatgtgggaagagaatctaaggtttttatatgtcttgcaacctcatcaaaggaaaattactggcatcattttcataatttgaaaaaaaaagccaaattaatatatttcttttttgattcactttttaagtgatcatttttaaaactttacttttgacccactgaatttatttagatagaaggaaaagagatgatgggagggaagtttagataaaggatggaagttggttttatttaaacaatagccctgtgatttcctaatgagaagtgactagaaattgaagaaaccaaataaggaggatattggtcaatttagctttagtttctcttactctctcaagcctgccctgtttaactccaaagttcatggctcataatttgagaaacactgttttaaacacaggagaaaaaaatgtccattttaaatcatagctattgaattctacaattacaaagaaacaaacaaacaaaacttgaccaacccaggcggttaaatttaaactcttcaggaaaaatttaagctgttaaaattattctttttctaaatttctaaagtggagggacagaatttttcagatttaaaagggcctcctaggtgcccagaaaattagtggaaagaaccacgtctagacgcatctttgatgtgccagagttccaaggataaaaagaaacttttaaagtcttctatactcagccaggttatcaatcaaatatgagggcaaaataatattttcagacagattttaggcagtgtatcttccatatatccttttctttaagggtatttgtagatacactccagaaaaacaagagtgaaatatgaaggaagttgtggggtccagcaaacagtgcttccaaatcagacccctgatagaggtggaaaactttgcaatgcaacaactgcgtagctggcttagaggacagccaatacagatggaacagaaagatgaggatgggattgagggatcagggattgaggtctccaagaataaaaagggacttcatggaaaaagtaggcttgtggataattaatcacaggggcaaataatgcagttaaaataacaacatgacaatcaggtggaggaatgtataataaacccaaatgtggctgggtagagtggctcacacctgtaatcccagcactttgggaggccaagccgggcagattacctgaggtcaggagttcgagaccagcttggccaacatggcgaaaccccgtctctactaaaaatacaaaaattagccaggcttgggggcgcacgcctgtagtcccagctcctcaggagctgaggtaggagaatcacttgaacccaggaggcaaagggtgcagggagttgagccaagatcgcgccattgcaccctagcctgggcaacagagcgagattctgtttcaaaaaacccccaagtgtattataaggcaataattcctatacgaagcaaactaaaatgcagcaatattaaggtataaaaacaaagaggaataattccattgaaccttgattctggaaactttgatccacccagcagtcatgatgttagactcattgaaaagaatgtatttctaatgcatgatgcgatcggtctatagatgtgtcatggaaacttggttgcaacttcaagacaaaataaaaagtaaacatttacatgaaaaatggtggatatggaaggtggagaagagaggagataacagctttatctttcaaaatagagaattgagagatggtaccaaaagctgatgaagtaaaaaaaaaaaaaaaaaaca

SEQ ID NO: 3311 - DNA, 8082 bp, Homo sapiens
ggacagcgctctcgacacggagcacccttctagcttcttcgtctccaggactgacgctcaggctcctctctcgccttagcccaacttgctttcccgcctcgcaaactccggtttccctccactcccaactcttttcactacacgtttcccctcctctatctcccacgccacgaaccccgatccccagactcctctctcccgccctcctccttcctctctcctcccttcaactcttcatccgcttccacctcagactctgcgcgcacccaattcagtcgcccgctcccgttcggctcctcgaagccatggcgggacctgggggctggagggacagggaggtcacggatctgggccacctgccggatccaactggaatattctcactagataaaaccattggccttggtacttatggcagaatctatttgggacttcatgagaagactggtgcatttacagctgttaaagtgatgaacgctcgtaagacccctttacctgaaataggaaggcgagtgagagtgaataaatatcaaaaatctgttgggtggagatacagtgatgaggaagaggatctcaggactgaactcaaccttctgaggaagtactctttccacaaaaacattgtgtccttctatggagcatttttcaagctgagtccccctggtcagcggcaccaactttggatggtgatggagttatgtgcagcaggttcggtcactgatgtagtgagaatgaccagtaatcagagtttaaaagaaggttggattgcttatatctgccgagaaatccttcagggcttagctcaccttcacgcacaccgagtaattcaccgggacatcaaaggtcagaatgtgctgctgactcataatgctgaagtaaaactggttgattttggagtgagtgcccaggtgagcagaactaatggaagaaggaatagtttcattgggacaccatactggatggcacctgaggtgattgactgtgatgaggacccaagacgctcctatgattacagaagtgatgtgtggtctgtgggaattactgccattgaaatggctgaaggagcccctcctctgtgtaaccttcaacccttggaagctctcttcgttattttgcgggaatctgctcccacagtcaaatccagcggatggtcccgtaagttccacaatttcatggaaaagtgtacgataaaaaatttcctgtttcgtcctacttctgcaaacatgcttcaacacccatttgttcgggatataaaaaatgaacgacatgttgttgagtcattaacaaggcatcttactggaatcattaaaaaaagacagaaaaaaggaatacctttgatctttgaaagagaagaagctattaaggaacagtacaccgtgagaagattcagaggaccctcttgcactcacgagcttctgagattgccaaccagcagcagatgcagaccacttagagtcctgcatggggaaccctctcagccaaggtggctacctgatcgagaagagccacaggtccaggcacttcagcagctacagggagcagccagggtattcatgccactgcaggctctggacagtgcacctaagcctctaaaggggcaggctcaggcacctcaacgactacaaggggcagctcgggtgttcatgccactacaggctcaggtgaaggctaaggcctctaaacctctacaaatgcagattaaggcacctccacgactacggagggcagccagggtgctcatgccactacaggcacaggttagggcacctaggcttctgcaggtacagtcccaggtatccaaaaagcagcaggcccagacccagacatcagaaccacaagatttggaccaggtaccagaggaatttcagagtcaagatcaggtacccgaacaacaaaggcagggccaggcccctgaacaacagcagaggcacaaccaggtgcctgaacaagagctggagcagaaccaggcacctgaacagccagaggtacaggaacaggctgccgagcctgcacaggcagggactgaggcagaggaacctgagtcattacgagtaaatgcccaggtatttctgcccctgctatcacaagatcaccatgtgctgttgccactacatttggatactcaggtgctcattccagtagaggggcaaactgaaggatcacctcaggcacaggcttggacactagagcccccacaggcaattggctcagttcaagcactgatagagggactatcaagagacttgcttcgggcgccaaactcaaataactcaaagccacttggtccgttgcaaaccctgatggaaaatctgtcatcaaataggttttactcacaaccagaacaggcacgggagaaaaaatcaaaagtttctactctgaggcaagcactggcaaaaagactatcaccaaagaggttcggggcaaagtcatcatggagacctgaaaagcttgaactctcggatttagaagcccgcaggcaaaggcgccaacgcagatgggaagatatctttaatcagcatgaggaagaattgagacaagttgataaagacaaagaagatgaatcatcagacaatgatgaagtatttcattcgattcaggctgaagtccagatagagccattgaagccatacatttcaaatcctaaaaaaattgaggttcaagagagatctccttctgtgcctaacaaccaggatcatgcacatcatgtcaagttctcttcaagcgttcctcagcggtctcttttggaacaagctcagaagcccattgacatcagacaaaggagttcgcaaaatcgtcaaaattggctggcagcatcagaatcttcttctgaggaagaaagtcctgtgactggaaggaggtctcagtcatcaccaccttattctactattgatcagaagttgctggttgacatccatgttccagatggatttaaagtaggaaaaatatcaccccctgtatacttgacaaacgaatgggtaggctataatgcactctctgaaatcttccggaatgattggttaactccggcacctgtcattcagccacctgaagaggatggtgattatgttgaactctatgatgccagtgctgatactgatggtgatgatgatgatgagtctaatgatacttttgaagatacctatgatcatgccaatggcaatgatgacttggataaccaggttgatcaggctaatgatgtttgtaaagaccatgatgatgacaacaataagtttgttgatgatgtaaataataattattatgaggcgcctagttgtccaagggcaagctatggcagagatggaagctgcaagcaagatggttatgatggaagtcgtggaaaagaggaagcctacagaggctatggaagccatacagccaatagaagccatggaggaagtgcagccagtgaggacaatgcagccattggagatcaggaagaacatgcagccaatataggcagtgaaagaagaggcagtgagggtgatggaggtaagggagtcgttcgaaccagtgaagagagtggagcccttggactcaatggagaagaaaattgctcagagacagatggtccaggattgaagagacctgcgtctcaggactttgaatatctacaggaggagccaggtggtggaaatgaggcctcaaatgccattgactcaggtgctgcaccgtcagcacctgatcatgagagtgacaataaggacatatcagaatcaccaacacaatcagatttttctgccaatcactcatctccttccaaaggttctgggatgtctgctgatgctaactttgccagtgccatcttatacgctggattcgtagaagtacctgaggaatcacctaagcaaccctctgaagtcaatgttaacccactctatgtctctcctgcatgtaaaaaaccactaatccacatgtatgaaaaggagttcacttctgagatctgctgcggttctttgtggggagtcaatttgctgttgggaacccgatctaatctatatctgatggacagaagtggaaaggctgacattactaaacttataaggcgaagaccattccgccagattcaagtcttagagccactcaatttgctgattaccatctcaggtcataagaacagacttcgggtgtatcatctgacctggttgaggaacaagattttgaataatgatccagaaagtaaaagaaggcaagaagaaatgctgaagacagaggaagcctgcaaagctattgataagttaacaggctgtgaacacttcagtgtcctccaacatgaagaaacaacatatattgcaattgctttgaaatcatcaattcacctttatgcatgggcaccaaagtcctttgatgaaagcactgctattaaagtatgcattgatcaatcagcagactctgaaggagactacatgtcctatcaagcctatatacgaatactggcaaaaatacaggcagctgatccagtgaaccggtttaagagaccagatgagctccttcatttgctgaagctcaaggtatttccaacacttgatcataagccagtgacagttgacctggctattggttctgaaaaaagactaaagattttcttcagctcagcagatggatatcacctcatcgatgcagaatctgaggttatgtctgatgtgaccctgccaaagaatcccctggaaatcattataccacagaatatcatcattttacctgattgcttgggaattggcatgatgctcaccttcaatgctgaagccctctctgtggaagcaaatgaacaactcttcaagaagatccttgaaatgtggaaagacataccatcttctatagcttttgaatgtacacagcgaaccacaggatggggccaaaaggccattgaagtgcgctctttgcaatccagggttctggaaagtgagctgaagcgcaggtcaattaagaagctgagattcctgtgcacccggggtgacaagctgttctttacctctaccctgcgcaatcaccacagccgggtttacttcatgacacttggaaaacttgaagagctccaaagcaattatgatgtctaaaagtttccagtgatttattaccacattataaacatcatgtataggcagtctgcatcttcagatttcagagattaaatgagtattcagttttatttttagtaaagattaaatccaaaactttacttttaatgtagcacagaatagttttaatgagaaatgcagctttatgtataaaattaactatagcaagctctaggtactccaatggtgtacaatgtcttttgcacaaactttgtaacttttgttactgtgaattcaaacattactctttggacagtttggacagtatctgtattcagattttacaacatggagtaaagaaacctgttatgaattagattacaagcagccttcaaaagaattggcactgggataagatttttcagaaaaagaaaaacatcggcaaactgtgtgtgatttttccaaagctatataaagaaccaaaggtttagtcaagaaacaaaaatcttaaagattattataacccagactaaggttgaacaacctgcatgcccagagaaaactatggcgacaaaggggaaaaggccaccactcgttttctcactgattcatgccaattaagcctacagttaaagaccagttttgttcttttcacccatttttaagctggttttctcctgataagaagaaaggaagaaagccccagacgcttggtttttctcagaacccccaaaagatgtgcaatagctgttgttacaaaccaccaaataatacagttgtgagcctgaatacaggactgaactcctatacacgtgtactgtagaatgagtattttttaataccttaaggtaggcgtcaaattctactccccaaagcagagatggattgatttatcaaaattattatctggccaacagtgtgactatcagacagcatcaaatatttgcccaatccaagattagactacacaaaagcttccttccagtattaaacaaaaagaattaaacataactatgaaaaaactttgctaatatctgtgtttttcagatttcattttttgtaaaatcagaaattaatctaaacatattcagtgataagttcatgtgtaacgacttaatgttaaaggttaaaaaaaagatttcacaaaatatacaactttcaccatatatataagcctgcaaaattagagtagtgaaagtcatgctagtccatcacccaaatatgttatagacgccatagacaggtgatgtttggtcacctatggtaactgctacctgatgaagagcataatttctgcatatccatcctcaataccatggtaaattctggggcaatagagaagcaacagaactgccacaaagtatacctcaatataattcctctagttctgcttctaaaatctgaggacagtgctagtgggaaaataattttcaaactacctggttaaccaaaatacaaaagcagctgactatgtgtgatttcataatagcacatttcttgacacttagtgctagaaatgaagatttggattttcctaacaacttacatcaagaatgtagtgtagctcattattgagaatttaggaaagcctgaatccattaattaaggaaataaatgtgactcacatttcttttactgtgacacaataatgtgatcctaaaactggcttatccttgagtgtttacaactcaaacaactttttgaatgcagtagttttttttttttaaaaacaaacttttatgtcaaattttttttcttagaagtagtcttcattattataaatttgtacaccaaaaggccatggggaactttgtgcaagtacctcatcgctgagcaaatggagcttgctatgttttaatttcagaaaatttcctcatatacgtagtgtgtagaatcaagtcttttaataattcattttttcttcataatatttactcaaagttaagcttaaaaataagttttatcttaaaatcatatttgaagacagtaagacagtaaactattttaggaagtcaacccccattgcactctgtggcagttattctggtaaaaataggcaaaagtgacctgaatctacaatgatgtcccaaagtaaccaagtaagagagattgtaaatgataaaccgagctttaaaggataaagtgttaataaagaaaggaagctgggcacatgtcaaaaagggagatcgaaatgttaggtaatcatttagaaaggacagaaaatatttaaagtggctcataggtaatgaatatttctgacttagatgtaaatccatctggaatctttacatcctttgccagctgaaacaagaaagtgaagggacaatgatatttcatggtcagtttattttgtaagagacagaagaaattatatctatacattaccttgtagcagcagtacctggaagccccagcccgtcacagaagtgtggaggggggctcctgactagacaatttccctagcccttgtgatttgaagcatgaaagttctggcaggttatgagcagcactagggataaagtatggttttattttggtgtaatttaggtttttcaacaaagcccttgtctaaaataaaaggcattattggaaatatttgaaaactagaaaatgatggataaaagggctgataagaaaatttctggctgtcagtagaagtgagataagatcctcagaggaaacagtaagaagggataatcattaagatagtaaaacaggcaaagcagaatcacatgtgcacacacacatacacatgtaaacattggaatgcataagttttaatattttagcgctatcagtttctaaatgcattaattactaactgccctctcccaagattcatttagttcaaacagtatccgtaaactaggaataatgccacatgcattcaatgggaccttttaagtactcttcagtttgttccaagaaatgtgcctactgaaatcaaattaatttgtattcaatgtgtacttcaagactgctaattgtttcatctgaaagcctacaatgaatcattgttcaaccttgaaaaataaaattttgtaaatcaaaaaaaaaaaaaaaaaaa

SEQ ID NO: 3312 - DNA, 331 bp, Homo sapiens
ccgagttccaggagcgaattgcaaacccaccgggaaaatgagcgaagagacggtccccgaggctgcctcgccgccgcccccgcaggggcagccttactttgaccgcttctcagaggacgaccccgagtacatgcgccttcgcaaccgggcggcggacctgcggcaggacttcaacctgatggagcagaagaagcgcgtcaccatgatcctgcagagtccctctttcagggaggagctggaaggcctcatccaggagcagatgaagaaggagtacaagaaagaggtggagaggaagaaactagaacttgatgctcctggctggttctcttca

SEQ ID NO: 3313 - DNA, 918 bp, Homo sapiens; identical to SEQ ID NO: 52

SEQ ID NO: 3314 - DNA, 5622 bp, Homo sapiens
atgaggacaggctgggcgacccctcgccgcccggcggggctcctcatgctgctcttctggttcttcgatctcgcggagccctctggccgcgcagctaatgaccccttcaccatcgtccatggaaatacgggcaagtgcatcaagccagtgtatggctggatagtagcagacgactgtgatgaaactgaggacaagttatggaagtgggtgtcccagcatcggctctttcatttgcactcccaaaagtgccttggcctcgatattaccaaatcggtaaatgagctgagaatgttcagctgtgactccagtgccatgctgtggtggaaatgtgagcaccactctctgtacggagctgcccggtaccggctggctctgaaggatggacatggcacagcaatctcaaatgcatctgatgtctggaagaaaggaggctcagaggaaagcctttgtgaccagccttatcatgagatctataccagagatgggaactcttatgggagaccttgtgaatttccattcttaattgatgggacctggcatcatgattgcattcttgatgaagatcatagtgggccatggtgtgccaccaccttaaattatgaatatgaccgaaagtggggcatctgcttaaagcctgaaaacggttgtgaagataattgggaaaagaacgagcagtttggaagttgctaccaatttaatactcagacggctctttcttggaaagaagcttatgtttcatgtcagaatcaaggagctgatttactgagcatcaacagtgctgctgaattaacttaccttaaagaaaaagaaggcattgctaagattttctggattggtttaaatcagctatactctgctagaggctgggaatggtcagaccacaaaccattaaactttctcaactgggatccagacaggcccagtgcacctactataggtggctccagctgtgcaagaatggatgctgagtctggtctgtggcagagcttttcctgtgaagctcaactgccctatgtctgcaggaaaccattaaataatacagtggagttaacagatgtctggacatactcagatacccgctgtgatgcaggctggctgccaaataatggattttgctatctgctggtaaatgaaagtaattcctgggataaggcacatgcgaaatgcaaagccttcagtagtgacctaatcagcattcattctctagcagatgtggaggtggttgtcacaaaactccataatgaggatatcaaagaagaagtgtggataggccttaagaacataaacataccaactttatttcagtggtcagatggtactgaagttactctaacatattgggatgagaatgagccaaatgttccctacaataagacgcccaactgtgtttcctacttaggagagctaggtcagtggaaagtccaatcatgtgaggagaaactaaaatatgtatgcaagagaaagggagaaaaactgaatgacgcaagttctgataagatgtgtcctccagatgagggctggaagagacatggagaaacctgttacaagatttatgaggatgaggtcccttttggaacaaactgcaatctgactatcactagcagatttgagcaagaatacctaaatgatttgatgaaaaagtatgataaatctctaagaaaatacttctggactggcctgagagatgtagattcttgtggagagtataactgggcaactgttggtggaagaaggcgggctgtaaccttttccaactggaattttcttgagccagcttccccgggcggctgcgtggctatgtctactggaaagtctgttggaaagtgggaggtgaaggactgcagaagcttcaaagcactttcaatttgcaagaaaatgagtggaccccttgggcctgaagaagcatcccctaagcctgatgacccctgtcctgaaggctggcagagtttccccgcaagtctttcttgttataaggtattccatgcagaaagaattgtaagaaagaggaactgggaagaagctgaacgattctgccaagcccttggagcacacctttctagcttcagccatgtggatgaaataaaggaatttcttcactttttaacggaccagttcagtggccagcattggctgtggattggtttgaataaaaggagcccagatttacaaggatcctggcaatggagtgatcgtacaccagtgtctactattatcatgccaaatgagtttcagcaggattatgacatcagagactgtgctgctgtcaaggtatttcataggccatggcgaagaggctggcatttctatgatgatagagaatttatttatttgaggccttttgcttgtgatacaaaacttgaatgggtgtgccaaattccaaaaggccgtactccaaaaacaccagactggtacaatccagaccgtgctggaattcatggacctccacttataattgaaggaagtgaatattggtttgttgctgatcttcacctaaactatgaagaagccgtcctgtactgtgccagcaatcacagctttcttgcgactataacatcttttgtgggactaaaagccatcaaaaacaaaatagcaaatatatctggtgatggacagaagtggtggataagaattagcgagtggccaatagatgatcattttacatactcacgatatccatggcaccgctttcctgtgacatttggagaggaatgcttgtacatgtctgccaagacttggcttatcgacttaggtaaaccaacagactgtagtaccaagttgcccttcatctgtgaaaaatataatgtttcttcgttagagaaatacagcccagattctgcagctaaagtgcaatgttctgagcaatggattccttttcagaataagtgttttctaaagatcaaacccgtgtctctcacattttctcaagcaagcgatacctgtcactcctatggtggcacccttccttcagtgttgagccagattgaacaagactttattacatccttgcttccggatatggaagctactttatggattggtttgcgctggactgcctatgaaaagataaacaaatggacagataacagagagctgacgtacagtaactttcacccattattggttagtgggaggctgagaataccagaaaatttttttgaggaagagtctcgctaccactgtgccctaatactcaacctccaaaaatcaccgtttactgggacgtggaattttacatcctgcagtgaacgccactttgtgtctctctgtcagaaatattcagaagttaaaagcagacagacgttgcagaatgcttcagaaactgtaaagtatctaaataatctgtacaaaataatcccaaagactctgacttggcacagtgctaaaagggagtgtctgaaaagtaacatgcagctggtgagcatcacggacccttaccagcaggcattcctcagtgtgcaggcgctccttcacaactcttccttatggatcggactcttcagtcaagatgatgaactcaactttggttggtcagatgggaaacgtcttcattttagtcgctgggctgaaactaatgggcaactcgaagactgtgtagtattagacactgatggattctggaaaacagttgattgcaatgacaatcaaccaggtgctatttgctactattcaggaaatgagactgaaaaagaggtcaaaccagttgacagtgttaaatgtccatctcctgttctaaatactccgtggataccatttcagaactgttgctacaatttcataataacaaagaataggcatatggcaacaacacaggatgaagttcatactaaatgccagaaactgaatccaaaatcacatattctgagtattcgagatgaaaaggagaataactttgttcttgagcaactgctgtacttcaattatatggcttcatgggtcatgttaggaataacttatagaaataattctcttatgtggtttgataagaccccactgtcatatacacattggagagcaggaagaccaactataaaaaatgagaagtttttggctggtttaagtactgacggcttctgggatattcaaacctttaaagttattgaagaagcagtttattttcaccagcacagcattcttgcttgtaaaattgaaatggttgactacaaagaagaacataatactacactgccacagtttatgccatatgaagatggtatttacagtgttattcaaaaaaaggtaacatggtatgaagcattaaacatgtgttctcaaagtggaggtcacttggcaagcgttcacaaccaaaatggccagctctttctggaagatattgtaaaacgtgatggatttccactatgggttgggctctcaagtcatgatggaagtgaatcaagttttgaatggtctgatggtagtacatttgactatatcccatggaaaggccaaacatctcctggaaattgtgttctcttggatccaaaaggaacttggaaacatgaaaaatgcaactctgttaaggatggtgctatttgttataaacctacaaaatctaaaaagctgtcccgtcttacatattcatcaagatgtccagcagcaaaagagaatgggtcacggtggatccagtacaagggtcactgttacaagtctgatcaggcattgcacagtttttcagaggccaaaaaattgtgttcaaaacatgatcactctgcaactatcgtttccataaaagatgaagatgagaataaatttgtgagcagactgatgagggaaaataataacattaccatgagagtttggcttggattatctcaacattctgttgaccagtcttggagttggttagatggatcagaagtgacatttgtcaaatgggaaaataaaagtaagagtggtgttggaagatgtagcatgttgatagcttcaaatgaaacttggaaaaaagttgaatgtgaacatggttttggaagagttgtctgcaaagtgcctctggactgtccttcatctacttggattcagttccaagacagttgttacatttttctccaagaagccatcaaagtagaaagcatagaggatgtcagaaatcagtgtactgaccatggagcggacatgataagcatacataatgaagaagaaaatgcttttatactggatactttgaaaaagcaatggaaaggcccagatgatatcctactaggcatgttttatgacacagatgatgcgagtttcaagtggtttgataattcaaatatgacatttgataagtggacagaccaagatgatgatgaggatttagttgacacctgtgcttttctgcacatcaagacaggtgaatggaaaaaaggaaattgtgaagtttcttctgtggaaggaacactatgcaaaacagctatcccatacaaaaggaaatatttatcagataaccacattttaatatcagcattggtgattgctagcacggtaattttgacagttttgggagcaatcatttggttcctgtacaaaaaacattctgattctcgtttcaccacagttttttcaaccgcaccccaatcaccttataatgaagactgtgttttggtagttggagaagaaaatgaatatcctgttcaatttgactaa

SEQ ID NO: 3315 - DNA, 4448 bp, Homo sapiens
cctccttccccaccgactttcttgttttgattaactccgtggactcctgactctttcttcgcccggaacatcaatatgtgtcatgtcattgtcacctgtcgctcgatgctctggaccttgctgagtattgtggtggcttttgccgagctcattgccttcatgagtgcagactggctgatcgggaaagcgaggagccgcggcggcgtggagccggcgggcccgggcgggggctccccggagccctaccaccccaccctgggcatctacgcccgctgcatccggaacccaggggtgcagcacttccagcgggacacgctgtgcgggccctacgccgagagcttcggcgagatcgccagcggcttctggcaggccacagctattttcctggctgtgggaatctttattctctgcatggtggccttggtgtccgtcttcaccatgtgtgtacagagcatcatgaagaaaagcatcttcaatgtctgtgggctgttgcaaggaattgcaggtctattccttatcctcggtttgatactctaccctgctggctggggttgccagaaggccatagactactgtggacattatgcatctgcctacaaacctggagactgctccttgggctgggccttttataccgccattgggggcacagtcctcactttcatctgtgctgtcttctctgcacaagcagaaattgcaacctctagtgacaaagtacaggaagaaattgaagaggggaaaaatctgatctgcctcctttagtttggaagagacaatgccattttctcccttgagtaatcttgtgaaacagtccacagtttcatcatttgagtcaagtggagaactaacctttacctaccaaagccacgttccacggcccgaggcttaaacaggaccaatgagaggccacatccagctacgcaaagttactggacatgcggtctgcagtgcacattataaggaatggaacatgaaaatagtatataatcctagacctggagttgccaagttctgtcagactccatctcccccaggttcaatgaaggataataatctaaatcattagggcagcagtttctctggtaacggaagagaccgtccgccagatctgcaggctgtttctgctccaacactgcttgcttgtgagcatctctgcctcagaatggggttttgggttggagttcttgttttcctctgttctttcaagttgtctccaacgaacagaaaactataaacttactggggacaggatgtgtgctaaagggcacagcaagacactgtcttttgcttagctgaccaaaggggtcagcagggatggcgtggagtcatgctgtggaacttattctaggctgaatcctagggtaaggtggatcaactgaactgtcactccagagattttagaaatttgagtaaagaaacaataaggacctatacaatcatatgagaacaaaaatatgaaatcttgctagtgaagacgtattttttcttcttcccagcagccaggctagcaccagttctggcccagtctcctcttcttctggagatcacatgtttttcttctaaggttaggattgtgctttgactgcgaaaggaaacctcactgtttcctccttccagggactgaggtctccaagctagctgtggcttatgcagatgttcactgggaggacctgccagaatctcggcacttggggggagacctttactcccagtttggtgaccatgctgtagtcagctctatttccaatcccgacagtagcagaatggcattctacaacaaaaagaagctagttatgggagttaagtttttgtagttactggtgttgatcctgaaagcagactgagataacattaaattgctgcaactgaagaactgcagccaagaccttaattccaggaaagcacagaggacaaagttaattcaaaaagaggcgctagatcaaggtcacagcactgcctacacctgtttacaaaaagaatcaaataccactatgaataaggattcaggggtttttaatctactttccataaattaccaatatcactgattcaggaagatagtatctcagaatgaccagagcagcacagaaacaagctactctgacattatgggagcttcaaaattgtatcatgatacagaaacactccttagcactttaagaaagtgagatggaactgccagatttctggaaggagaaaaagtgtaggtatttgggttcattaatctgctcacttgaggactttgttttgaaaaagtaccttctgtggacaaggtattgtgctaccagctatacaaccctgacttcagagtttgcaaccttgccctgagtgaatcatgttaaagctgtctgagtctaaagcaccgtatcttggtgcagaacagataattatacagagatggaatgggacaaccgcagttttactacattctggtgtttggcctatatgagaaaccatcttctcacagattaagggctaagggcaaaaggggtgggaggtgtggaactagccttaatgagtttcccattcctgaaccaaaattcaaagtgagtgagatgtaaatcctgtgattttggtgaagaaaaaaacgggtatcttcatagcagcctaggaaaccttaaccatatctctaacaccacacagaaagaggctggaggagccactggacaaagcttctgtctctgtgtgtacatttataatgttctaaccaagtctcaaaccttgatgaaaaacacaaaatttttccataaacttatcagaagactcacttttctttctttcttggatagagaaaccattttctgacactaggtttacaatctcagtgtccttacaagttaagtcctaagctcacaggatcctccgagcatgtccatcacctgctctttggctaaggtggcagtgtacctctagatcaacctgggaacagtcacaagggagtgtgacttcttggccataataaactcactcgatagtgtttatgttattaatctgaatgcaacagaagacaaaagcacaggcatgcacacacacagaaccccaaaccactaaaaactacctaaacactgacttagtaaatagtaaaaaggtaatgttgggacttttaaaccttgaatccattagccaggcttgggatgaaaggaccatctaaaatcatgctagtctaaaccatgctcttccacacagctgtttaaaaaccactgggtatgaggaatatgctagaaagaaatgttaaaaatagattgttggctcacacttatttttctaataaataggaccattattactaccaggaaagtcttatttattttgcctgaaattggcttaaagaaagtctcatgacgggatgggatgggctgcgcttctcaatgaactctgaggcagaaatatttgccttggattctgtggattctttaaacctgtgtgctaataattcaaacaatgttgcattaattgtataagggtttttgtatagttttcaaacatctgtggtgtaatgatctttgttaaacatatattctgtaaagtgccatagtctttttttatgtgtagcatatttaaaaatatatatgtatattatacatacacaagtttgtgtgaaagatgtgcaataacaaaggtgtatgtatgttttgttgttttgttttggaaactggacaggagtcaaaacagggatgtttgtttctgttttggcaaggagagttccacatttttgccttcatggcttattcagtaacccataattttaatgctacacaaatcttatgtgaagaaaagactggtatgaaatcattttttcctgggtctaaaataatcgctagtgttatgtcaaagttaagcccgcacgccaggcccagttaatgctagtctttcatgtgaaatgtgaagctgccatgttgccttttctcttagtaggataactagtagctggtacataatcactgaggagctatttcttaacatgcttttatagaccatgctaatgctagaccagtatttaagggctaatctcacacctccttagctgtaagagtctggcttagaacagacctctctgtgcaataacttgtggccactggaaatccctgggccggcatttgtattggggttgcaatgactcccaagggccaaaagagttaaaggcacgactgggatttcttctgagactgtggtgaaactccttccaaggctgagggggtcagtaggtgctctggagggactcggcaccacttgatattcaacagccacttgagccaaatataaaattgtatttacagctgatggactcaatttgagccttcaaacttgtagttatcctattatattgtaaactaatacattgtctagcattgatttggttcctgtgcatatgtattttcactatgtgctcccctccccagatcttaattaaaccagattttgcaattcaaaaaaaaaaaaaaaaaaaa

SEQ ID NO: 3316 - DNA, 5454 bp, Homo sapiens
atgaggacaggctgggcgacccctcgccgcccggcggggctcctcatgctgctcttctggttcttcgatctcgcggagccctctggccgcgcagctaatgaccccttcaccatcgtccatggaaatacgggcaagtgcatcaagccagtgtatggctggatagtagcagacgactgtgatgaaactgaggacaagttatggaagtgggtgtcccagcatcggctctttcatttgcactcccaaaagtgccttggcctcgatattaccaaatcggtaaatgagctgagaatgttcagctgtgactccagtgccatgctgtggtggaaatgtgagcaccactctctgtacggagctgcccggtaccggctggctctgaaggatggacatggcacagcaatctcaaatgcatctgatgtctggaagaaaggaggctcagaggaaagcctttgtgaccagccttatcatgagatctataccagagatgggaactcttatgggagaccttgtgaatttccattcttaattgatgggacctggcatcatgattgcattcttgatgaagatcatagtgggccatggtgtgccaccaccttaaattatgaatatgaccgaaagtggggcatctgcttaaagcctgaaaacggttgtgaagataattgggaaaagaacgagcagtttggaagttgctaccaatttaatactcagacggctctttcttggaaagaagcttatgtttcatgtcagaatcaaggagctgatttactgagcatcaacagtgctgctgaattaacttaccttaaagaaaaagaaggcattgctaagattttctggattggtttaaatcagctatactctgctagaggctgggaatggtcagaccacaaaccattaaactttctcaactgggatccagacaggcccagtgcacctactataggtggctccagctgtgcaagaatggatgctgagtctggtctgtggcagagcttttcctgtgaagctcaactgccctatgtctgcaggaaaccattaaataatacagtggagttaacagatgtctggacatactcagatacccgctgtgatgcaggctggctgccaaataatggattttgctatctgctggtaaatgaaagtaattcctgggataaggcacatgcgaaatgcaaagccttcagtagtgacctaatcagcattcattctctagcagatgtggaggtggttgtcacaaaactccataatgaggatatcaaagaagaagtgtggataggccttaagaacataaacataccaactttatttcagtggtcagatggtactgaagttactctaacatattgggatgagaatgagccaaatgttccctacaataagacgcccaactgtgtttcctacttaggagagctaggtcagtggaaagtccaatcatgtgaggagaaactaaaatatgtatgcaagagaaagggagaaaaactgaatgacgcaagttctgataagatgtgtcctccagatgagggctggaagagacatggagaaacctgttacaagatttatgaggatgaggtcccttttggaacaaactgcaatctgactatcactagcagatttgagcaagaatacctaaatgatttgatgaaaaagtatgataaatctctaagaaaatacttctggactggcctgagagatgtagattcttgtggagagtataactgggcaactgttggtggaagaaggcgggctgtaaccttttccaactggaattttcttgagccagcttccccgggcggctgcgtggctatgtctactggaaagtctgttggaaagtgggaggtgaaggactgcagaagcttcaaagcactttcaatttgcaagaaaatgagtggaccccttgggcctgaagaagcatcccctaagcctgatgacccctgtcctgaaggctggcagagtttccccgcaagtctttcttgttataaggtattccatgcagaaagaattgtaagaaagaggaactgggaagaagctgaacgattctgccaagcccttggagcacacctttctagcttcagccatgtggatgaaataaaggaatttcttcactttttaacggaccagttcagtggccagcattggctgtggattggtttgaataaaaggagcccagatttacaaggatcctggcaatggagtgatcgtacaccagtgtctactattatcatgccaaatgagtttcagcaggattatgacatcagagactgtgctgctgtcaaggtatttcataggccatggcgaagaggctggcatttctatgatgatagagaatttatttatttgaggccttttgcttgtgatacaaaacttgaatgggtgtgccaaattccaaaaggccgtactccaaaaacaccagactggtacaatccagaccgtgctggaattcatggacctccacttataattgaaggaagtgaatattggtttgttgctgatcttcacctaaactatgaagaagccgtcctgtactgtgccagcaatcacagctttcttgcgactataacatcttttgtgggactaaaagccatcaaaaacaaaatagcaaatatatctggtgatggacagaagtggtggataagaattagcgagtggccaatagatgatcattttacatactcacgatatccatggcaccgctttcctgtgacatttggagaggaatgcttgtacatgtctgccaagacttggcttatcgacttaggtaaaccaacagactgtagtaccaagttgcccttcatctgtgaaaaatataatgtttcttcgttagagaaatacagcccagattctgcagctaaagtgcaatgttctgagcaatggattccttttcagaataagtgttttctaaagatcaaacccgtgtctctcacattttctcaagcaagcgatacctgtcactcctatggtggcacccttccttcagtgttgagccagattgaacaagactttattacatccttgcttccggatatggaagctactttatggattggtttgcgctggactgcctatgaaaagataaacaaatggacagataacagagagctgacgtacagtaactttcacccattattggttagtgggaggctgagaataccagaaaatttttttgaggaagagtctcgctaccactgtgccctaatactcaacctccaaaaatcaccgtttactgggacgtggaattttacatcctgcagtgaacgccactttgtgtctctctgtcagaaatattcagaagttaaaagcagacagacgttgcagaatgcttcagaaactgtaaagtatctaaataatctgtacaaaataatcccaaagactctgacttggcacagtgctaaaagggagtgtctgaaaagtaacatgcagctggtgagcatcacggacccttaccagcaggcattcctcagtgtgcaggcgctccttcacaactcttccttatggatcggactcttcagtcaagatgatgaactcaactttggttggtcagatgggaaacgtcttcattttagtcgctgggctgaaactaatgggcaactcgaagactgtgtagtattagacactgatggattctggaaaacagttgattgcaatgacaatcaaccaggtgctatttgctactattcaggaaatgagactgaaaaagaggtcaaaccagttgacagtgttaaatgtccatctcctgttctaaatactccgtggataccatttcagaactgttgctacaatttcataataacaaagaataggcatatggcaacaacacaggatgaagttcatactaaatgccagaaactgaatccaaaatcacatattctgagtattcgagatgaaaaggagaataactttgttcttgagcaactgctgtacttcaattatatggcttcatgggtcatgttaggaataacttatagaaataattctcttatgtggtttgataagaccccactgtcatatacacattggagagcaggaagaccaactataaaaaatgagaagtttttggctggtttaagtactgacggcttctgggatattcaaacctttaaagttattgaagaagcagtttattttcaccagcacagcattcttgcttgtaaaattgaaatggttgactacaaagaagaacataatactacactgccacagtttatgccatatgaagatggtatttacagtgttattcaaaaaaaggtaacatggtatgaagcattaaacatgtgttctcaaagtggaggtcacttggcaagcgttcacaaccaaaatggccagctctttctggaagatattgtaaaacgtgatggatttccactatgggttgggctctcaagtcatgatggaagtgaatcaagttttgaatggtctgatggtagtacatttgactatatcccatggaaaggccaaacatctcctggaaattgtgttctcttggatccaaaaggaacttggaaacatgaaaaatgcaactctgttaaggatggtgctatttgttataaacctacaaaatctaaaaagctgtcccgtcttacatattcatcaagatgtccagcagcaaaagagaatgggtcacggtggatccagtacaagggtcactgttacaagtctgatcaggcattgcacagtttttcagaggccaaaaaattgtgttcaaaacatgatcactctgcaactatcgtttccataaaagatgaagatgagaataaatttgtgagcagactgatgagggaaaataataacattaccatgagagtttggcttggattatctcaacattctgttgactgtccttcatctacttggattcagttccaagacagttgttacatttttctccaagaagccatcaaagtagaaagcatagaggatgtcagaaatcagtgtactgaccatggagcggacatgataagcatacataatgaagaagaaaatgcttttatactggatactttgaaaaagcaatggaaaggcccagatgatatcctactaggcatgttttatgacacagatgatgcgagtttcaagtggtttgataattcaaatatgacatttgataagtggacagaccaagatgatgatgaggatttagttgacacctgtgcttttctgcacatcaagacaggtgaatggaaaaaaggaaattgtgaagtttcttctgtggaaggaacactatgcaaaacagctatcccatacaaaaggaaatatttatcagataaccacattttaatatcagcattggtgattgctagcacggtaattttgacagttttgggagcaatcatttggttcctgtacaaaaaacattctgattctcgtttcaccacagttttttcaaccgcaccccaatcaccttataatgaagactgtgttttggtagttggagaagaaaatgaatatcctgttcaatttgactaa

SEQ ID NO: 3317 - DNA, 3740 bp, Homo sapiens
ctctccggccgcgcagccgctgccgcccacccgcacccgccgtcatgctccgggccgcgctgcccgcgctcctgctgccgttgctgggcctcgccgctgctgccgtcgcggactgtccttcatctacttggattcagttccaagacagttgttacatttttctccaagaagccatcaaagtagaaagcatagaggatgtcagaaatcagtgtactgaccatggagcggacatgataagcatacataatgaagaagaaaatgcttttatactggatactttgaaaaagcaatggaaaggcccagatgatatcctactaggcatgttttatgacacagatgatgcgagtttcaagtggtttgataattcaaatatgacatttgataagtggacagaccaagatgatgatgaggatttagttgacacctgtgcttttctgcacatcaagacaggtgaatggaaaaaaggaaattgtgaagtttcttctgtggaaggaacactatgcaaaacagctatcccatacaaaaggaaatatttatcagataaccacattttaatatcagcattggtgattgctagcacggtaattttgacagttttgggagcaatcatttggttcctgtacaaaaaacattctgattctcgtttcaccacagttttttcaaccgcaccccaatcaccttataatgaagactgtgttttggtagttggagaagaaaatgaatatcctgttcaatttgactaagtttttggtaatcttgcactaagacatcaacaaatgccctggcagagataacttgggaaagattttaatataaaacttgacattggatattagagctttaatggtattccttattccagtaacatttttatgtactcatctgctgtgaaaagtctttaggttcattaaaaaaacaggttttagaaatgatcttagatctaatatagtgattttaagcatcccgtcaaaggcagaatctgtcacttgaatgaaggaaagcttaaagcccaagcagataaaaataaaagcccagcctatttgtcttgcctgctgtatcttccctatttagttgacccactttagtttatatgtttattagtaaacatgaaatggggaataagtgattttaagtacatcccatacatttaaatatctttgataattgttatttttttggcagataattcctctagaatgtgtatctttttatgatttagatgaagaaaattttacaacttttaacaccccacaccaattttagtttcattacttttacacacaccattttatcacaaatgactcaagttttaatgaatgtttataaattatttgaaacaaaatatgatcgctgtgtccaggatggcatagagaaagctggcaattaggttaacacttacatattatagtgcccctttaaggatttctctcttgccaccataccttttgtactttcccctatacaagatgtatctcattctcctcaagcatttataaatttttccttcaatgacatgaaaactgtgcaagcaaaaaccgaagaaaaacacttaagtacaactgtagtgacagtgatcaaagttttcagtgcatttattgtacattttaagaaaaaggtgaaaatcatttggggagtaaaaaaatgaaaaagctgaaacgagtaattttcctcaccatcaataaaccaaaaacaggaaagataaagaatgtataaatttcacgtaaattagtcacgtatcacttatcaatggggatacgttctaagaaatgcatagttagggaatcttgtgtgaaaatcagcttgtatttacacaaacccagatggtagagcctattttgtcccaaacctacacagcatgttactgtgctgaatactgcagacaattgtaacacaatatttgtgtatctaaatatagaaaaggtacagtaaaaatatggtctactaaggaaacactgttctatatgtggtccattactgactgaagtatactgtctagaagtctgaggctcaaagaaaagtaatccctcttctgaatccacaccccatcaattatcttactttcttctggggagatagatagatatactatctcactagcttgactaatggcaacaaagttccagcttgtgtagtctctttttattgaccacatgaatcgaaaacactcatcacaattaatggcactatcattaatgagacatgagtaactaaaaagtgatagaaaactattacagtgcggctacatggtactgaaaatgcaggcattacaccagctgttacacaagcacaagcatgctctgtaagagctttacatttctgagattttgtatagtgattgagatgtctattttattattgatagactattactaatgtcaatattgaacactaccctggaattcctgcctggttttcctacccaaattgtaccactccttgaagaactacaggcacagtaaaaaaatatggcgtattatgtgaactaaaagagttctaaaggagttcttaaaggagtggtagaatttgggtaggaaagtgattaagtccaacttaaaaccaacagtctcaaacgtctacaactacaatgtccaatgagccactagccacatgaggctatttaagtaaatttagtttaaaatccagttttcgaattacattagccacattgtcaagtgttcaaatcacaggtggttagtggctactgtactgggcaacatacattatagaacattttcattataggaagttttattgggcagtgctgctcttaaatcctaccttccactcaactcccatacaactttcttttgtacattttgatactttctacctaatggcagctcttccaaaatagctgctttaaactctgatttaattttcaatatttggtttcatttttcaacaggccaagaggcctctggtaatgaagtgctatatatatatatatatgacggagtctcactgtgctgcccaggctacagtgcagtggctcgatcttggctctctccaatctccgccttgcaggttttcaagcaattctcctgcctcagcctccttagtagctgggaccacagacatctgtcaccacacccagctaactttttgtatttttggtagagacggggtttcgccatattgactgggctggtctcaaactcctgacctcaagtgatccacccaccttggtctcccaaagtgctgggattacatgcgtgagccaccacacttggcctacattttttctttatataccagaacatctataacaggcaccttatctactcattagtgaagagataattggattacacaggcaggcttgtttactacatccagaatgtagaaactgctttcttcaacatcttggttctagctagtaataacaatataattctttggcagatattcagaataacattttaaactacattttcttagaaaattgcattcttgtagtgagcagtgtatggtctcttttgttcagaatttaaaactgataaccaatgaaagccttttctcttattcctctaccgtcatttacatgataatctgaagctaatatgacaatatttaaatactaagtggtactagggaactacaagaatactgtaaagcttaagccattgttatcactgtcatttagcatttaataacaaaactatacagaattatgtgcataccaatgaatgttttgtaccatctagttaaattttttaaataaagttttatgggttaagcag

SEQ ID NO: 3318 - DNA, 918 bp, Homo sapiens; identical to SEQ ID NO: 52

SEQ ID NO: 3319 - DNA, 3003 bp, Homo sapiens
caggctccggctccacactggcacgtagtgggcggatcgcgccggcgctgagtaggaaggagcttcagccgccagcccggaacgcatcataggttagcttttcaagacacttcctgcatctctgacctgttgcacctctgttatcttggcacctctgttatcttagcagcaagcacctgcctcagctgacccttgagccataacccataagctcctgaaaagtacatcaagtctaaagtgaaccagctaactcattaagactggaatcatgagcaacaatggagcagacctaacctttggttacatctcctgttttgtagctatccttttgtttggctcaaattttgtgccacttaaaaaatttgatactggtgatggaatgtttctccagtgggttctttgtgctgccatatggttggttgccttggttgtcaatctgatattacattgtccaaagttttggccttttgcaatgcttgggggctgcatttgggcaacagggaacattgctgttgtcccaattatcaaaaccattggtttaggccttggaatcttaatctggggatcatttaatgccttaactggctgggcaagctcaaggtttggctggtttggattggatgcagaagaagtatcaaatccgctgctaaattacattggagctgggctatcagtagtaagtgctttcatatttttgttcatcaaaagtgaaataccaaataacacgtgttccatggataccactccattaataacagagcatgtgatcaacacaacccaagacccctgttcctgggtggataaactttctacagtacaccaccgcatagtgggctgcagtcttgcagtgatatctggagtactctatggatctacatttgtgccaatcatctacatcaaggaccacagcaaaagaaatgatagtatatatgcaggggcaagccaatatgatttagactatgtgtttgcgcacttcagtggcatctttcttacaagtactgtctactttctggcctactgcatagccatgaaaaatagtcctaaactatatcctgaagcagtcctaccaggattcctgtcaggagtactttgggctatagctacctgctgttggttcatagcaaatcactctctgagtgctgtggtcagttttccaataatcactgctggtccaggatttatagctgcaatgtggggtatcttcatgtttaaggaaataaagggtctacaaaactacctattaatgatacttgcattttgcatcatcttgactggagccttatgcactgctttttctaaaatctaacaatgacaaaaccagcaggtggcagcagtagttaagagaacgcgtctatcggacagcggagagatcatgctgagaaaagagtgcattttcatatagcaaatggatctcagccactgttggagtgggtaaatgatttttttccccaaaaatgtgagaatgaaggaagattgagtttcattcaagtataaaaatgaaaatttcttctgatgaactgtttatgaaggtagtactttactgggtgactaaaatgtctacattattatagcattacatacgaggatgctctttttaccacagtatgtacctagtgttgcataatctagaacacagtatagagtccatatacaaagaagttacagtccatatttctcacctattaccccagtgaagtgaggcagaaataccttgggcgaggagggagagccttaccttctaatggaattagattccaaagatatttggatcctttgtttcataaagtaaatgcatagttggtaactaaatgttaaaaaggccattttattattgttagccaaaacttctgtttatttcaagttaatatcgcccaactctacatcatctacccattttagctcataatgcttttgattatcgccagataaagtccattctcagagaacaaaaatttttcatcattgagaaaatgtgcataacataatacatacatacacaagtatattcacgtacataaatacacacagatatgttgctaaagtgagattgtaggttatcagtaacaatttaaaggaaacaaccactcttttgaatgtacaacttttttttctgaaatacacttttctaaaaccctcttaactggaggtttcctgttttcttcttgttttaactggtggtttccagtaggcaaaataaaatgacaggcatgctagttttttttttttttttttttttaagaaaactgaaattaagccaggcagggtggcgcactactataatcccagctgctggggcggctgaagtaggagggtcacttagcccaagagtgcaaatctgccagcctaggcaacatagcaaggtcccatctctaaaaaagaaatttaatttaaatttgtaagaaaaaagaaaactgaaacagaactgccagtacaatgtttgttgcaattgtttccaaaactttgaaataacgaaacccctattcaaatgtaaattttacccattcccacctgatagtactgtttattactttgctatgcaggagaaacaaaacagctttttatttgtgtgtatactctgaagtcaatgtgcatgggttaaatcccacctctgcttcattttatttgtgtggctttggacaagttcctaagccctctgtgtcaggcccctcattaacaaaatggagtttatgatggcatctacctcacatggttattgtgtggttgaaattagttcaaatctgtaaagtatgttgatgagtatctggtacttggcaaacactatataattgttagctttattattatgtgttgtttgaaggggaaaaaagtttttgtagattggagaacaccatgtaagagctactaagctcaccaccttcccatccaattattactcctctaaatgaatactacttaaaagtgaaaaaaaaaaaaaaaaaaaaaaaaaaaaaaaaaaaaaaaaaaaaaaaaaaaaaaaaaaaaaaaaaaaaaaaaaaaaaaaaa

SEQ ID NO: 3320 - DNA, 4883 bp, Homo sapiens; identical to SEQ ID NO: 1444

SEQ ID NO: 3321 - DNA, 2458 bp, Homo sapiens
gcgccgggagcccatctgcccccaggggcacggggcgcggggccggctcccgcccggcacatggctgcagccacctcgcgcgcaccccgaggcgccgcgcccagctcgcccgaggtccgtcggaggcgcccggccgccccggagccaagcagcaactgagcggggaagcgcccgcgtccggggatcgggatgtccctcctccttctcctcttgctagtttcctactatgttggaaccttggggactcacactgagatcaagagagtggcagaggaaaaggtcactttgccctgccaccatcaactggggcttccagaaaaagacactctggatattgaatggctgctcaccgataatgaagggaaccaaaaagtggtgatcacttactccagtcgtcatgtctacaataacttgactgaggaacagaagggccgagtggcctttgcttccaatttcctggcaggagatgcctccttgcagattgaacctctgaagcccagtgatgagggccggtacacctgtaaggttaagaattcagggcgctacgtgtggagccatgtcatcttaaaagtcttagtgagaccatccaagcccaagtgtgagttggaaggagagctgacagaaggaagtgacctgactttgcagtgtgagtcatcctctggcacagagcccattgtgtattactggcagcgaatccgagagaaagagggagaggatgaacgtctgcctcccaaatctaggattgactacaaccaccctggacgagttctgctgcagaatcttaccatgtcctactctggactgtaccagtgcacagcaggcaacgaagctgggaaggaaagctgtgtggtgcgagtaactgtacagtatgtacaaagcatcggcatggttgcaggagcagtgacaggcatagtggctggagccctgctgattttcctcttggtgtggctgctaatccgaaggaaagacaaagaaagatatgaggaagaagagagacctaatgaaattcgagaagatgctgaagctccaaaagcccgtcttgtgaaacccagctcctcttcctcaggctctcggagctcacgctctggttcttcctccactcgctccacagcaaatagtgcctcacgcagccagcggacactgtcaactgacgcagcaccccagccagggctggccacccaggcatacagcctagtggggccagaggtgagaggttctgaaccaaagaaagtccaccatgctaatctgaccaaagcagaaaccacacccagcatgatccccagccagagcagagccttccaaacggtctgaattacaatggacttgactcccacgctttcctaggagtcagggtctttggactcttctcgtcattggagctcaagtcaccagccacacaaccagatgagaggtcatctaagtagcagtgagcattgcacggaacagattcagatgagcattttccttatacaataccaaacaagcaaaaggatgtaagctgattcatctgtaaaaaggcatcttattgtgcctttagaccagagtaagggaaagcaggagtccaaatctatttgttgaccaggacctgtggtgagaaggttggggaaaggtgaggtgaatatacctaaaacttttaatgtgggatattttgtatcagtgctttgattcacaattttcaagaggaaatgggatgctgtttgtaaattttctatgcatttctgcaaacttattggattattagttattcagacagtcaagcagaacccacagccttattacacctgtctacaccatgtactgagctaaccacttctaagaaactccaaaaaaggaaacatgtgtcttctattctgacttaacttcatttgtcataaggtttggatattaatttcaaggggagttgaaatagtgggagatggagaagagtgaatgagtttctcccactctatactaatctcactatttgtattgagcccaaaataactatgaaaggagacaaaaatttgtgacaaaggattgtgaagagctttccatcttcatgatgttatgaggattgttgacaaacattagaaatatataatggagcaattgtggatttcccctcaaatcagatgcctctaaggactttcctgctagatatttctggaaggagaaaatacaacatgtcatttatcaacgtccttagaaagaattcttctagagaaaaagggatctaggaatgctgaaagattacccaacataccattatagtctcttctttctgagaaaatgtgaaaccagaattgcaagactgggtggactagaaagggagattagatcagttttctcttaatatgtcaaggaaggtagccgggcatggtgccaggcacctgtaggaaaatccagcaggtggaggttgcagtgagccgagattatgccattgcactccagcctgggtgacagagcgggactccgtctc

SEQ ID NO: 3322 - DNA, 640 bp, Homo sapiens
gggggagctcggctcttgagacaggaatcttgcccattccccgaacgaataaaccccttccttaactcagcgtctgaggaattttgtctgcggctcctcctgctacattctgagtggggaaagggactaaggtggtctgaggaccccacagagtcaggaagattgagagcctgataaaggtcctgcgggcaggacaggacctcccaaccaagccctccagcaaggattcagagtgcccctccggcctcgccatgaggctcttcctgtcgctcccggtcctggtggtggttctgtcgatcgtcttggaaggcccagccccagcccaggggaccccagacgtctccagtgccttggataagctgaaggagtttggaaacacactggaggacaaggctcgggaactcatcagccgcatcaaacagagtgaactttctgccaagatgcgggagtggttttcagagacatttcagaaagtgaaggagaaactcaagattgactcatgaggacctgaagggtgacatcccaggaggggcctctgaaatttcccacaccccagcgcctgtgctgaggactccctccatgtggccccaggtgccaccaataaaaatcctacgaaaaaaaaaaaaaaaaaaaaaaaaaa

SEQ ID NO: 3323 - DNA, 1704 bp, Homo sapiens
atgccagactcacctgtggatgtgaagacgcaatctaggctgactcctccaacaatgccacctcccccaactactcaaggagctccaagaaccagttcatttacaccgacaacgttaactaatggcacgagccattctcctacagccttgaatggcgccccctcaccacccaatggcttcagcaatgggccttcctcttcttcctcctcctctctggctaatcaacagctgcccccagcctgtggtgccaggcaactcagcaagctgaaaaggttccttactaccctgcagcagtttggcaatgacatttcacccgagataggagaaagagttcgcaccctcgttctgggactagtgaactccactttgacaattgaagaatttcattccaaactgcaagaagctactaacttcccactgagaccttttgtcatcccatttttgaaggccaacttgcccctgctgcagcgtgagctcctccactgcgcaagactggccaaacagaaccctgcccagtacctcgcccagcatgaacagctgcttctggatgccagcaccacctcacctgttgactcctcagagctgcttctcgatgtgaacgaaaacgggaagaggcgaactccagacagaaccaaagaaaatggctttgacagagagcctttgcactcagaacatccaagcaagcgaccatgcactattagcccaggccagcggtacagtccaaataacggcttatcctaccagcccaatggcctgcctcaccctaccccacctccacctcagcattaccgtttggatgatatggccattgcccaccactacagggactcctatcgacaccccagccacagggacctcagggacagaaacagacctatggggttgcatggcacacgtcaagaagaaatgattgatcacagactaacagacagagaatgggcagaagagtggaaacatcttgaccatctgttaaactgcataatggacatggtagaaaaaacaaggcgatctctcaccgtactaaggcggtgtcaagaagcagaccgggaagaattgaattactggatccggcggtacagtgacgccgaggacttaaaaaaaggtggcggcagtagcagcagccactctaggcagcagagtcccgtcaacccagacccagttgcactagacgcgcatcgggaattccttcacaggcctgcgtctggatacgtgccagaggagatctggaagaaagctgaggaggccgtcaatgaggtgaagcgccaggcgatgacggagctgcagaaggccgtgtctgaggcggagcggaaagcccacgacatgatcacaacagagagggccaagatggagcgcacggtcgccgaggccaaacggcaggcggcggaggacgcactggcagttatcaatcagcaggaggattcaagcgagagttgctggaattgtggccgtaaagcgagtgaaacctgcagtggctgtaacacagcccgatactgtggctcattttgccagcacaaagactgggagaagcaccatcacatctgtggacagaccctgcaggcccagcagcagggagacacacctgcagtcagctcctctgtcacgcccaacagcggggctgggagcccgatggacacaccaccagcagccactccgaggtcaaccaccccgggaaccccttccaccatagagacaacccctcgctag

SEQ ID NO: 3324 - DNA, 2534 bp, Homo sapiens
ggacagtggagacgcgccttctcggctctggtccgcgccctggggccctggctccctggaggggctggggaactggaagctgggccgagagagttcccgctgcagctatcgcgcagtccctcctgcgcccgggcgcccccagcgggttccgggaggcgcccggtgagcccacgtctgttgcggcggagcgagcgcgctccgggagggccgagagccggcggggctggcaggagctctcgggcgcccgcctccctccttcgcggacggtctcccgacacgccggctgagagcccttttcgactgtgagctgcggcagctgagcagaggcggcggcgcgggacctgcagtcgccagggattccctccaggtgacgatgctctggttctccggcgtcggggctctggctgagcgttactgccgccgctcgcctgggattacgtgctgcgtcttgctgctactcaattgctcgggggtccccatgtctctggcttcctccttcttgacaggttctgttgcaaaatgtgaaaatgaaggtgaagtcctccagattccatttatcacagacaacccttgcataatgtgtgtctgcttgaacaaggaagtgacatgtaagagagagaagtgccccgtgctgtcccgagactgtgccctggccatcaagcagaggggagcctgttgtgaacagtgcaaaggttgcacctatgaaggaaatacctataacagctccttcaaatggcagagcccggctgagccttgtgttctacgccagtgccaggagggcgttgtcacagagtctggggtgcgctgtgttgttcattgtaaaaaccctttggagcatctgggaatgtgctgccccacatgtccaggctgtgtgtttgagggtgtgcagtatcaagaaggggaggaatttcagccagaaggaagcaaatgtaccaagtgttcctgcactggaggcaggacacaatgtgtgagagaagtctgtcccattctctcctgtccccagcaccttagtcacatacccccaggacagtgctgccccaaatgtttgggtcagaggaaagtgtttgacctcccttttgggagctgcctctttcgaagtgatgtttatgacaatggatcctcatttctgtacgataactgcacagcttgtacctgcagggactctactgtggtttgcaagaggaagtgctcccaccctggtggctgtgaccaaggccaggagggctgttgtgaagagtgcctcctacgagtgcccccagaagacatcaaagtatgcaaatttggcaacaagattttccaggatggagagatgtggtcctctatcaattgtaccatctgtgcttgtgtgaaaggcaggacggagtgtcgcaataagcagtgcattcccatcagtagctgcccacagggcaaaattctcaacagaaaaggatgctgtcctatttgcactgaaaagcccggcgtttgcacggtgtttggagatccccactacaacacttttgacggtcggacatttaactttcaggggacgtgtcagtacgttttgacaaaagactgctcctcccctgcctcgcccttccaggtgctggtgaagaacgacgcccgccggacacgctccttctcgtggaccaagtcggtggagctggtgctgggcgagagcagggtcagcctgcagcagcacctcaccgtgcgctggaacggctcgcgcatcgcgctcccctgccgcgcgccacacttccacatcgacctggatggctacctcttgaaagtgaccaccaaagcaggtttggaaatatcttgggatggagacagttttgtagaagtcatggctgcgccgcatctcaagggcaagctctgtggtctttgtggcaactacaatggacataaacgtgatgacttaattggtggagatggaaacttcaagtttgatgtggatgactttgctgaatcttggagggtggagtccaatgagttctgcaacagacctcagagaaagccagtgcctgaactgtgtcaagggacagtcaaggtaaagctccgggcccatcgagaatgccaaaagctcaaatcctgggagtttcagacctgccactcgactgtggactacgccactttctaccggtcctgtgtgacagacatgtgtgaatgtccagtccataaaaactgttattgcgagtcatttttggcatatacccgggcctgccagagagagggcatcaaagtccactgggagcctcagcagaattgtgcagccacccagtgtaagcatggtgctgtgtacgatacctgtggtccgggatgtatcaagacctgtgacaactggaatgaaattggtccatgcaacaagccgtgcgttgctgggtgccactgtccagcaaacttggtccttcacaagggaaggtgcatcaagccagtcctttgtccccagcggtgacctttgtttcgatccttaagactctgaaatctggtgactttgacactgaagcggaagagccaatgaagggctgcagtatttgtgtgcccgattctgtaaacac

SEQ ID NO: 3325 - DNA, 2089 bp, Homo sapiens; identical to SEQ ID NO: 1792

SEQ ID NO: 3326 - DNA, 928 bp, Homo sapiens
gggcgcgggatgcagacggctgcgaggcgctgggcacaggttgccaggacaaccgtgaggctgcataaaaagaacctatgacaggatgcacatgagagagacaagtggcttcacattgaagaaggggaggagtgcgccattggttttccatcctccagatgcactgattgctgtcccctttgacgatgatgacaagattgttgggggctacacctgtgaggagaattctctcccctaccaggtgtccctgaattctggctcccacttctgcggtggctccctcatcagcgaacagtgggtggtatcagcagctcactgctacaagtcccgcatccaggtgagactgggagagcacaacatcaaagtcctggaggggaatgagcagttcatcaatgcggccaagatcatccgccaccctaaatacaacagggacactctggacaatgacatcatgctgatcaaactctcctcacctgccgtcatcaatgcccgcgtgtccaccatctctctgcccaccgcccctccagctgctggcactgagtgcctcatctccggctggggcaacactctgagttctggtgccgactacccagacgagctgaagtgcctggatgctccggtgctgacccaggctgagtgtaaagcctcctaccctggaaagattaccaacagcatgttctgtgtgggcttccttgagggaggcaaggattcctgccagggtgactctggtggccctgtggtctgcaacggacagctccaaggagttgtctcctggggccatggctgtgcctggaagaacaggcctggagtctacaccaaggtctacaactatgtggactggattaaggacaccatcgctgccaacagctaaagcccccggtccctctgcagtctctataccaataaagtggccctgctctcccaaaaa

SEQ ID NO: 3327 - DNA, 891 bp, Homo sapiens
aggttgccaggacaaccgtgaggctgcataaaaagaacctatgacaggatgcacatgagagagacaagtggcttcacattgaagaaggggaggagtgcgccattggttttccatcctccagatgcactgattgctgccccctttgatgatgatgacaagatcgttgggggctacatctgtgaggagaattctgtcccctaccaggtgtccttgaattctggctaccacttctgcggtggctccctcatcagcgaacagtgggtggtgtcagcaggtcactgctacaagtcccgcatccaggtgagactgggagagcacaacatcgaagtcctggaggggaatgaacagttcatcaatgcagccaagatcatccgccaccccaaatacaacagccggactctggacaatgacatcctgctgatcaagctctcctcacctgccgtcatcaattcccgcgtgtccgccatctctctgcccactgcccctccagctgctggcaccgagtccctcatctccggctggggcaacactctgagttctggtgccgactacccagacgagctgcagtgcctggatgctcctgtgctgagccaggctgagtgtgaagcctcctaccctggaaagattaccaacaacatgttctgtgtgggcttcctcgagggaggcaaggattcctgccagggtgattctggtggccctgtggtctccaatggagagctccaaggaattgtctcctggggctatggctgtgcccagaagaacaggcctggagtctacaccaaggtctacaactatgtggactggattaaggacaccatagctgccaacagctaaagcccctggtccctctgcagtctctataccaataaagtgaccctgctctcccaaaaa

SEQ ID NO: 3328 - DNA, 3698 bp, Homo sapiens
gggaatatcctctcaagccctgaggtgcagggctgggaaggagtgggtgagcggctgggtcgtggcaggttggtctggggaggctggggaggcgggaggagaacggttggccccggcagcggcgtgtcggagggcggatggggctaggaggccgcccggggggtggggtctgcggcgggccggcccccgcgtgcgcgtcgcctcgccgggcatttcaaaagctcgccggcagggcgcggcgctagctccgtgtgcctcgcaggcgtggtgggcgcgtcctggcagccgcccgcttggttctcgcgggatccgggctccggctcgacgccggctctctttttgacgccccgccgccggggttgccatggttcatttcttgcacccgggccacacgccccggaacatcgtccctcctgacgctcagaaggatgccctgggctgctgcgtggtacaggaagaggcatctccctacactttggtcaacatctgcctgaatgtcctgattgctaacctggagaaattgtgttctgaaagacctgatggaacactgtgccttccggagcattggagtttccctcaggaagtagccgatcgatttctcagggtgatgacttggcaaggttgctggaggagccagtatgagtcagatttcagaagcactgagccgatacaggaacagatcatgttttgtgaaggaagccctccacaggctgttcacagagacattttcaatggaggtaaccatgcctgctattttaaagcttgtggctataggaatgaggaatcacccattggatttgcgagtgcagttcacagccagtgcttgcgctctcaacctaacacgccagggcctggccaaggggatgcctgttcgcctgttgtcagaggtcacctgtctacttttcaaggctctgaaaaatttcccccattaccagcagttacagaagaattgtcttctctccttaaccaattccaggattcttgtggatgttccatttgacaggtttgatgctgccaagtttgtcatgagatggctctgtaagcatgaaaaccccaagatgcaaacaatggcagtgagtgtcacctctattctggctctgcagctctcacctgagcaaacggcacagcttgaagagcttttcatggcagttaaggaacttctagcaatagtaaaacaaaagactactgagaatytagatgatgtcaccttcttgtttactttgaaagcactttggaatcttacagatgggtctccagctgcctgcaagcacttcattgaaaatcaaggattgcaaatcttcatccaagtcttggagaccttttcagagtcagcaatacaaagcaaagtacttggtcttttgaacaacatagcagaagtcagagagctctcttccaagctggtgaccgaagatgtgctgaagcatatcaacagtttactctgtagcagggaaatggaagtcagctattttgctgcaggtatcatagcccacctgacatctgacagacagctttggatatcccgtgacttccagaggcgtactcttctccaagatctgcatgcaaccatacagaattggccaagttcaagttgtaagatgacagcattggtgacctatagatctttcaagacatttttcccgctccttggcaacttctctcaaccagaggttcagctctgggcactatgggctatgtatcatgtctgcagtaaaaatcccagcaaatactgcaaaatgttagttgaagaagaaggattgcagcttttgtgtgatatccaggagcacagtgaggcaacccccaaagcacagcagattgcagcctccattctggatgacttcagaatgcatttcatgaattatcagaggcccactctgtgtcaaatgcccttctgaacctaaggaatttcagaggtgtgtgctcttcctcaatgtcaggtgttctgccctggcagtaattscacatcagttgtcattggagtttgtsagttggctgtctcattggcctttgattggtggattttatatatgttacaaaagggttggatttgtatgatagctgtaatcccaagtcaagttggactcattctgcagcctttcagcagcaattttgaagactcaaaccgtggactctgggaaggcctgggagcttgtgttggaacagctatgcaagttacttttctctagccttggacaattttttccctttgggagcttgtcatgggagtgggacctgttcactagaagagaaaggaaacctacagggagactttgatatttatattaaatttcctttgttgttatcgtcatgtgaagctatgagaaaagcttgggaagcatatgcttcaaaatgtagtgtttagaaggcagaacccctgttggagagcggggaaaagaatttatttatttatttatttatctatggctgggtatggtggctcacgcctgtaatcccagcactttgggaggccaaggcaggtggattgtctgaactcaggagttcgagatcagccttgccaacgtggtaaaactccgtctctaccaaaaaatacaaaaattagctgagcgtggtggtgtgcacctttactcctagctacttggaggctgaggtgggaggaccacttgagcccaggaggcagaggttgcagtgagctgagattgcaccactgcactccagcctggatgacagagtgagacctcatctcaaatgaatagaggggtggagaaaagagtcgtgatccacccgtctcggcctcccaaagtgctgggattacaggtgtgagtcactgcacctggcctttttacaattttgggtgtctatctttggcatgtttcctgttatgtgagcatgacatgctgtgtatgtgagtgagcttgtagggcgtggtgggacttaggcatttgcagacagtgtttagatgaaagattacatgtaatgataaatctgaatccctccattttatttgggtggaaccatgaccaaaaatggtaggaagacgaaaggccagaaagagactttgccagagagttcacggagttttcttaccccgcatgctgactaaagaaaacatgggcttttctgaaaccagcttcaactacagtataaactatatcagaagcttacttgataagccttgcggagctgctctgaggaatagtgtgaattccttccttgccttattgttgactgttaatgaacatgttttgtcatttatctgtttaagtttttcagaaaataaaagtaaatttctgttagcacattttaggattagatttttgtgcttttggctggcttggttcagattcttaactagagtaccatgtactgtctttggaaatcaaatgaggaagaagctcattctcttactctaaaccatgttccaaactattaccagagtccaaccagataagcagaatttgtaaccttacttccttccatagtccttaaactgtactgtattttttcacactcttgcatgattccaaaaggatatcttcctgacctgggttctagtacctcagagcattgttatcagatgctagcttattctaatgtgaggatgtgttaggggaactagtgtgttaagtccaattctgtacaagacatcctttcaagttctgtgtcattcacaacaatcctcacgggtaggtgagttttattttcctcacttaacagatgagaaaaaaaaaaaaaaaaaaaaa

SEQ ID NO: 3329 - DNA, 2490 bp, Homo sapiens
gtggctgggccctggaattgggatgacatggatatcgactgcctaacaagggaagagttaggcgatgatgctcaggcctggagcagattttcatttgaaattgaggccagagcccaagaaaatgcagatgccagcaccaacgtcaacttcagcagaggagctagtaccagggctggcttcagcgatggtgctagtattagcttcaatggtgcacccagcaccagtggtggcttcagtggtggacctggcattacctttggtgttgcacccagcaccagtgccagcttcagcaatacagccagcattagctttggtggtacactgagcactagctccagcttcagcagcgcagccagcattagctttggttgtgcacacagcaccagcactagtttcagcagtgaagccagcattagctttggtggcatgccttgtaccagtgccagctttagtggtggagtcagctctagttttagtggcccactcagcaccagtgccactttcagtggtggagccagctctggctttggaggcacactcagcaccacggctggctttagtggtgtactcagcactagcaccagctttggcagtgcacccacaacgagcacagtcttcagtagtgcgcttagcaccagcactggctttggaggcatactcagcaccagtgtctgttttggtggctctcccagctccagtggtagctttggtggtacactcagtaccagtatctgcttcggtggctctccctgcaccagcactggctttggaggcacacttagcaccagtgtctcctttggtggctcttccagcaccagtgccaattttggtggtacactaagtaccagcatctgctttgatggctctcccagcactggtgctggctttggtggtgctctcaacaccagtgccagctttggcagtgtgctcaacaccagtactggttttggtggtgctatgagcaccagtgctgactttggcggtacactaagcaccagtgtctgctttggtggctctcctggcaccagtgtcagctttggcagtgcactcaacaccaatgctggttatggtggtgctgtcagcaccaacactgactttggtggtacactaagcaccagcgtctgttttggtggctctcccagcaccagtgctggctttggtggtgcactcaacaccaatgccagctttggctgtgccgtcagcaccagtgccagcttcagtggtgctgtcagcaccagtgcttgcttcagtggtgcaccaatcaccaaccctggctttggcggtgcatttagcaccagtgctggcttcggtggtgcacttagtaccgctgctgacttcggtggtactcccagcaacagcattggctttggtgctgctcccagcaccagtgtcagctttggtggtgctcatggcaccagcctctgttttggtggagctcccagcaccagcctctgctttggcagtgcatctaatactaacctatgctttggtggccctcctagcaccagtgcctgctttagtggtgctaccagccctagtttttgtgatggacccagcaccagtaccggtttcagctttggcaatgggttaagcaccaatgctggatttggtggtggactgaacaccagtgctggctttggtggtggcctaggcaccagtgctggcttcagtggtggcctaagcacaagttctggctttgatggtgggctaggtaccagcgctggcttcggtggaggaccaggcaccagcactggttttggtggtggactgggcaccagtgctggcttcagtggcggactgggcaccagtgctggctttggtggtggactggtcactagtgatggctttggtggtggactgggcaccaatgctagtttcggcagcacacttggcaccagtgctggctttagtggtggcctcagcaccagcgatggctttggcagtaggcctaatgccagcttcgacagaggactgagtaccatcattggctttggcagtggttccaacaccagcactggctttactggcgaacccagcaccagcacgggcttcagtagtggacccagttctattgttggcttcagcggtggaccaagcactggtgttggcttctgcagtggaccaagcaccagtggcttcagcggtggaccgagcacaggagctggcttcggcggtggaccaaacactggtgctggctttggtggtggaccgagcaccagtgctggctttggcagtggagccgccagtcttggtgcctgtggcttctcgtatggctagtgaggtttcagataccgctaataaattgcagtagtccttcccatggagccaaagtaccttggatctttgtccacacagcagtcaaggcagttatggcccatcagctgagggtgtcatgtgatggaaaaatctgtttgctgttcctgctttattgtttgctttctgtgtgctgtcatattttggtatcagagttacattaaatttgcaaaatga

SEQ ID NO: 3330 - DNA, 2428 bp, Homo sapiens; identical to SEQ ID NO: 1794

SEQ ID NO: 3331 - DNA, 1090 bp, Homo sapiens
ggggctgtttccgggaggcgcgtggggcttgaggccgagaacggcccttgctgccaccaacatggagactttgtaccgtgtcccgttcttagtgctcgaatgtcccaacctgaagctgaagaagccgccctggttgcacatgccgtcggccatgactgtgtatgctctggtggtggtgtcttacttcctcatcaccggaggaataatttatgatgttattgttgaacctccaagtgtcggttctatgactgatgaacatgggcatcagaggccagtagctttcttggcctacagagtaaatggacaatatattatggaaggacttgcatccagcttcctatttacaatgggaggtttaggtttcataatcctggaccgatcgaatgcaccaaatatcccaaaactcaatagattccttcttctgttcattggattcgtctgtgtcctattgagttttttcatggctagagtattcatgagaatgaaactgccgggctatctgatgggttagagtgcctttgagaagaaatcagtggatactggatttgctcctgtcaatgaagttttaaaggctgtaccaatcctctaatatgaaatgtggaaaagaatgaagagcagcagtaaaagaaatatctagtgaaaaaacaggaagcgtattgaagcttggactagaatttcttcttggtattaaagagacaagtttatcacagaattttttttcctgctggcctattgctataccaatgatgttgagtggcattttctttttagtttttcattaaaatatattccatatctacaactataatatcaaataaagtgattattttttacaaccctcttaacattttttggagatgacatttctgattttcagaaattaacataaaatccagaagcaagattccgtaagctgagaactctggacagttgatcagctttacctatggtgctttgcctttaactagagtgtgtgatggtagattatttcagatatgtatgtaaaactgtttcctgaacaataagatgtatgaacggagcagaaataaatactttttctaacaaaaaaaaaaaaaaaaaaaaaaaaaaa

SEQ ID NO: 3332 - DNA, 1450 bp, Homo sapiens
ggggaggcaacgcgggaggcccagcgggaaggcaggaggcggcggcggaggaggagctctactgagccgcaactgtggcgacagcaaccggagtcgcagccgccgccacctgcacctggcgcctagcccacgtccagcgcctgcccggccgccgcttcccgccaccctgccctgcccacccgccaggtactaccattaaagataccttcttctcagcaaatctatgataaaaaatataagtaacagaagaagaaataactgttatttgtcaagtgacaagcttttaatgtcagaatggctcacctaaagcgactagtaaaattacacattaaaagacattaccataaaaagttctggaagcttggtgcagtaatttttttctttataatagttttggttttaatgcaaagagaagtaagtgttcaatattccaaagaggaatcaaggatggaaaggaacatgaaaaacaaaaacaagatgttggatttaatgctagaagctgtaaacaatattaaggatgccatgccaaaaatgcaaataggagcacctgtcaggcaaaacattgatgctggtgagagaccttgtttgcaaggatattatacagcagcagaattgaagcctgtccttgaccgtccacctcaggattcaaatgcacctggtgcttctggtaaagcattcaagacaaccaatttaagtgttgaagagcaaaaggaaaaggaacgtggggaagctaaacactgctttaatgctttcgcaagtgacaggatttctttgcaccgagatcttggaccagacactcgacctcctgagtatgttgaagaatatttattgtttattctttatcaccaggctttgcaggggagagaggggtgagctaaggaagttatctgttttttagctactctaaggcagaaaatcagcaaatactgtttatttaacctgttgtatttattttttgcttataatgattgaggctacatatccctatttatgcttggtgaggcagtgcagatatgaaaagttattagcttggaaattagaaaactgaattctagatctgactgctatccacaaggaaattctttattcctaaatactgtggttttctcatctatttagggggaattattggacaatttgtataggaagtagaaggtagaggaattgtttccatttctctgtatttctttagaataaaaatgtttaaaaacatgccaagattttggaactgttggataatattttatatatgtgtaaagcaattcacagactttgtgattactttgactcaaagtttttgagtacctaattatatttcagaatgccctatttttttgtaatcccagcattttgggaggctgaggcctgcaaatagcttgagttcaggagttccagaccagcctgggcaacatgatgaaaccccgtctcaaaaaaaaaaaaaaaaaaaaaa

SEQ ID NO: 3333 - DNA, 7335 bp, Homo sapiens; identical to SEQ ID NO: 558

SEQ ID NO: 3334 - DNA, 3702 bp, Homo sapiens
tggagggtctcgctctgtcacacaggctggagtgcagtggtgtgatcttggctcatcgtaacctccacctcccgggttcaagtgattctcatgcctcagcctcccgagtagctgggattacaggtggtgacttccaagagtgactccgtcggaggaaaatgactccccagtcgctgctgcagacgacactgttcctgctgagtctgctcttcctggtccaaggtgcccacggcaggggccacagggaagactttcgcttctgcagccagcggaaccagacacacaggagcagcctccactacaaacccacaccagacctgcgcatctccatcgagaactccgaagaggccctcacagtccatgcccctttccctgcagcccaccctgcttcccgatccttccctgaccccaggggcctctaccacttctgcctctactggaaccgacatgctgggagattacatcttctctatggcaagcgtgacttcttgctgagtgacaaagcctctagcctcctctgcttccagcaccaggaggagagcctggctcagggccccccgctgttagccacttctgtcacctcctggtggagccctcagaacatcagcctgcccagtgccgccagcttcaccttctccttccacagtcctccccacacggccgctcacaatgcctcggtggacatgtgcgagctcaaaagggacctccagctgctcagccagttcctgaagcatccccagaaggcctcaaggaggccctcggctgcccccgccagccagcagttgcagagcctggagtcgaaactgacctctgtgagattcatgggggacatggtgtccttcgaggaggaccggatcaacgccacggtgtggaagctccagcccacagccggcctccaggacctgcacatccactcccggcaggaggaggagcagagcgagatcatggagtactcggtgctgctgcctcgaacactcttccagaggacgaaaggccggagcggggaggctgagaagagactcctcctggtggacttcagcagccaagccctgttccaggacaagaattccagccacgtcctgggtgagaaggtcttggggattgtggtacagaacaccaaagtagccaacctcacggagcccgtggtgctcaccttccagcaccagctacagccgaagaatgtgactctgcaatgtgtgttctgggttgaagaccccacattgagcagcccggggcattggagcagtgctgggtgtgagaccgtcaggagagaaacccaaacatcctgcttctgcaaccacttgacctactttgcagtgctgatggtctcctcggtggaggtggacgccgtgcacaagcactacctgagcctcctctcctacgtgggctgtgtcgtctctgccctggcctgccttgtcaccattgccgcctacctctgctccagggtgcccctgccgtgcaggaggaaacctcgggactacaccatcaaggtgcacatgaacctgctgctggccgtcttcctgctggacacgagcttcctgctcagcgagccggtggccctgacaggctctgaggctggctgccgagccagtgccatcttcctgcacttctccctgctcacctgcctttcctggatgggcctcgaggggtacaacctctaccgactcgtggtggaggtctttggcacctatgtccctggctacctactcaagctgagcgccatgggctggggcttccccatctttctggtgacgctggtggccctggtggatgtggacaactatggccccatcatcttggctgtgcataggactccagagggcgtcatctacccttccatgtgctggatccgggactccctggtcagctacatcaccaacctgggcctcttcagcctggtgtttctgttcaacatggccatgctagccaccatggtggtgcagatcctgcggctgcgcccccacacccaaaagtggtcacatgtgctgacactgctgggcctcagcctggtccttggcctgccctgggccttgatcttcttctcctttgcttctggcaccttccagcttgtcgtcctctaccttttcagcatcatcacctccttccaaggcttcctcatcttcatctggtactggtccatgcggctgcaggcccggggtggcccctcccctctgaagagcaactcagacagcgccaggctccccatcagctcgggcagcacctcgtccagccgcatctaggcctccagcccacctgcccatgtgatgaagcagagatgcggcctcgtcgcacactgcctgtggcccccgagccaggcccagccccaggccagtcagccgcagactttggaaagcccaacgaccatggagagatgggccgttgccatggtggacggactcccgggctgggcttttgaattggccttggggactactcggctctcactcagctcccacgggactcagaagtgcgccgccatgctgcctagggtactgtccccacatctgtcccaacccagctggaggcctggtctctccttacaaaccctgggcccagccctcattgctgggggccaggccttggatcttgagggtctggcacatccttaatcctgtgcccctgcctgggacagaaatgtggctccagttgctctgtctctcgtggtcaccctgagggcactctgcatcctctgtcattttaacctcaggtggcacccagggcgaatggggcccagggcagaccttcagggccagagccctggcggaggagaggccctttgccaggagcacagcagcagctcgcctacctctgagcccaggccccctccctccctcagccccccagtcctccctccatcttccctggggttctcctcctctcccagggcctccttgctccttcgttcacagctgggggtccccgattccaatgctgttttttggggagtggtttccaggagctgcctggtgtctgctgtaaatgtttgtctactgcacaagcctcggcctgcccctgagccaggctcggtaccgatgcgtgggctgggctaggtccctctgtccatctgggcctttgtatgagctgcattgcccttgctcaccctgaccaagcacacgcctcagaggggccctcagcctctcctgaagccctcttgtggcaagaactgtggaccatgccagtcccgtctggtttccatcccaccactccaaggactgagactgacctcctctggtgacactggcctagagcctgacactctcctaagaggttctctccaagcccccaaatagctccaggcgccctcggccgcccatcatggttaattctgtccaacaaacacacacgggtagattgctggcctgttgtaggtggtagggacacagatgaccgacctggtcactcctcctgccaacattcagtctggtatgtgaggcgtgcgtgaagcaagaactcctggagctacagggacagggagccatcattcctgcctgggaatcctggaagacttcctgcaggagtcagcgttcaatcttgaccttgaagatgggaaggatgttctttttacgtaccaattcttttgtcttttgatattaaaaagaagtacatgttcattgtagagaatttggaaactgtagaagagaatcaagaagaaaaataaaaatcagctgttgtaatcgcctagcaaaaaaaaaaaaaaaaaaa

SEQ ID NO: 3335 - DNA, 1610 bp, Homo sapiens
cagggctgcagcctcatctgtttgcggatcagaacccgagctgtgcttgtggctgcggctgctaactggctgcgcacagggagctgtcaccatgcctcactcgtacccagccctttctgctgagcagaagaaggagttgtctgacattgccctgcggattgtagccccgggcaaaggcattctggctgcggatgagtctgtaggcagcatggccaagcggctgagccaaattggggtggaaaacacagaggagaaccgccggctgtaccgccaggtcctgttcagtgctgatgaccgtgtgaaaaagtgcattggaggcgtcattttcttccatgagaccctctaccagaaagatgataatggtgttcccttcgtccgaaccatccaggataagggcatcgtcgtgggcatcaaggttgacaagggtgtggtgcctctagctgggactgatggagaaaccaccactcaagggctggatgggctctcagaacgctgtgcccaatacaagaaggatggtgctgactttgccaagtggcgctgtgtgctgaaaatcagtgagcgtacaccctctgcacttgccattctggagaacgccaacgtgctggcccgttatgccagtatctgccagcagaatggcattgtgcctattgtggaacctgaaatattgcctgatggagaccacgacctcaaacgttgtcagtatgttacagagaaggtcttggctgctgtgtacaaggccctgagtgaccatcatgtatacctggaggggaccctgctcaagcccaacatggtgaccccgggccatgcctgtcccatcaagtataccccagaggagattgccatggcaactgtcactgccctgcgtcgcactgtgcccccagctgtcccaggagtgaccttcctgtctgggggtcagagcgaagaagaggcatcattcaacctcaatgccatcaaccgctgcccccttccccgaccctgggcgcttaccttctcctatgggcgtgccctgcaagcctctgcactcaatgcctggcgagggcaacgggacaatgctggggctgccactgaggagttcatcaagcgggctgaggtgaatgggcttgcagcccagggcaagtatgaaggcagtggagaagatggtggagcagcagcacagtcactctacattgccaaccatgcctactgagtatccactccataccacagcccttggcccagccatctgcacccacttttgcttgtagtcatggccagggccaaatagctatgcagagcagagatgccttcacctggcaccaacttgtcttcctttctctcttcccttcccctctctcattgctgcacctgggaccataggatgggaggatagggagcccctcatgactgagggcagaagaaattgctagaagtcagaacaggatggctgggtctccccctacctcttccagctcccacaattttcccatgatgaggtagcttctccctgggctctccttcttgcctgccctgtctcctgggatcagagggtagtacagaagccctgactcatgccttgagtacataccatacagcaaataaatggtagcaaaacaaaaaaaaaaaaaaaaaaa

SEQ ID NO: 3336 - DNA, 2131 bp, Homo sapiens
gagcagctcctcttccatctccagggtctcattctgttgcccaggctggagtgcagtggtgcgatctcggctcacagcaacctctctgcctccagaaatgacctccaccttcaacccccgagaatgtaaactgtccaagcaagaagggcaaaactatggcttcttcctgcgaattgagaaggacaccgagggccacctggtccgggtggttgagaagtgtagcccagcagagaaggctggccttcaagatggagacagagttcttaggatcaatggtgtctttgtggacaaagaagaacatatgcaggttgtggatctggtcagaaagagtgggaattcagtgactttactagttctggatggggattcctatgagaaagcagtgaaaacacgggtggacttgaaagagttgggtcaaagtcagaaggagcaaggtttgagtgataatatactttcccctgtgatgaatggaggtgtgcaaacttggacccagccccggctctgctatctcgtgaaggaaggaggcagctatggcttctctctgaaaactgtccaaggtaaaaagggggtgtacatgactgatattacacctcaaggtgtggctatgagagctggagttctggctgatgatcacttgattgaagtgaatggagagaatgtagaggatgccagccatgaggaagtggttgaaaaggtgaagaagtcaggaagccgtgtcatgttcctgctggtggacaaagaaactgacaagcgtcatgttgagcagaagatacaattcaaaagagaaacagccagtttgaaactgttaccccaccagccccgaattgtggagatgaagaaaggaagcaatggctatggtttctatctgagggcaggctcagaacagaaaggtcaaatcatcaaggacatagattctggaagtccagcagaggaggctggcttgaagaacaatgatctggtagttgctgtcaacggcgagtctgtggaaaccctggatcatgacagtgtggtagaaatgattagaaagggtggagatcagacttcactgttggtggtagacaaagagacggacaacatgtacagactggctcatttttctccatttctctactatcaaagtcaagaactgcccaatggctctgtcaaggaggctccagctcctactcccacttctctggaagtctcaagtccaccagatactacagaggaagtagatcataagcctaaactctgcaggctggctaaaggtgaaaatggctatggctttcacttaaatgcgattcggggtctgccaggctcattcatcaaagaggtacagaagggcggtcctgctgacttggctgggctagaggatgaggatgtcatcattgaagtgaatggggtgaatgtgctagatgaaccctatgagaaggtggtggatagaatccagagcagtgggaagaatgtcacacttctagtctgtggaaagaaggcctatgattatttccaagctaagaaaatccctattgtttcctccctggctgatccacttgacacccctccagattctaaagaaggaatagtggtggagtcaaaccatgactcgcacatggcaaaagaacgggcccacagtacagcctcacattcttcttccaattctgaagatacagagatgtgatgaaaacaagtaatagctttggctgtttatttgatagctgtttctgggtatttaataggaatcctttctcaaggaatgagttgtgacctgtttactgtctctttagaagaaaaactccactggaaaccattcaccatgtgtgattgtcttctgttatcatttgtcttacaggcggctattgcagacggctaatttatgcttaacttaggaagagataaggcaagagctagatttttttcatgtgatcttttccaagcttcaacttaacttaactacatttctctgtatgatgatgtctcttacttctacaggttccttgagcaccaaagatgattcataactctgtataggtgacagctgcttataaaagcatcttagcagataagcctattaaaattgtgcttttgtaacaatgttgtggttgctagaataaataccattaacaaatgcaaaaaaaaaaaaaaaaaaaaaaaa

SEQ ID NO: 3337 - DNA, 3003 bp, Homo sapiens; identical to SEQ ID NO: 2883

SEQ ID NO: 3338 - DNA, 1172 bp, Homo sapiens
cccgggccccccaaagtcccggccgggccgagggtcggcggccgccggcgggccgggcccgcgcacagcgcccgcatgtacaacatgatggagacggagctgaagccgccgggcccgcagcaaacttcggggggcggcggcggcaactccaccgcggcggcggccggcggcaaccagaaaaacagcccggaccgcgtcaagcggcccatgaatgccttcatggtgtggtcccgcgggcagcggcgcaagatggcccaggagaaccccaagatgcacaactcggagatcagcaagcgcctgggcgccgagtggaaacttttgtcggagacggagaagcggccgttcatcgacgaggctaagcggctgcgagcgctgcacatgaaggagcacccggattataaataccggccccggcggaaaaccaagacgctcatgaagaaggataagtacacgctgcccggcgggctgctggcccccggcggcaatagcatggcgagcggggtcggggtgggcgccggcctgggcgcgggcgtgaaccagcgcatggacagttacgcgcacatgaacggctggagcaacggcagctacagcatgatgcaggaccagctgggctacccgcagcacccgggcctcaatgcgcacggcgcagcgcagatgcagcccatgcaccgctacgacgtgagcgccctgcagtacaactccatgaccagctcgcagacctacatgaacggctcgcccacctacagcatgtcctactcgcagcagggcacccctggcatggctcttggctccatgggttcggtggtcaagtccgaggccagctccagcccccctgtggttacctcttcctcccactccagggcgccctgccaggccggggacctccgggacatgatcagcatgtatctccccggcgccgaggtgccggaacccgccgcccccagcagacttcacatgtcccagcactaccagagcggcccggtgcccggcacggccattaacggcacactgcccctctcacacatgtgagggccggacagcgaactggaggggggagaaattttcaaagaaaaacgagggaaatgggaggggtgcaaaagaggagagtaagaaacagcatggagaaaacccggtacgctcaaaaaaaaaaaaaaaaaaaaaaaaaaaaaaaa

SEQ ID NO: 3339 - DNA, 1806 bp, Homo sapiens
cgggcccccaccgccgcccgccgggaggaccgagcctaagagggcagccgcctgaaggaacgcgacggcggcgcccgcagtatttttcagtgctgtacaagcgtcttgaattactctggtagcttttccagaaagacccatgacttcaccacatttctcgagttacgatgaaggtcctctggatgtcagcatggcagccacaaacctggagaaccagctgcacagcgcacagaagaacctcctgttccttcagcgggagcatgccagcacgctcaaggggctgcactccgagatcaggcggctgcagcagcactgcacagatttaacatatgagctgacagtcaaaagttcggaacagacaggagacgggacttctaaaagcagtgaattaaagaaaagatgtgaagagctggaagcccaactgaaagtgaaagagaacgaaaatgctgagttgttgaaagaactggagcagaaaaacgcgatgatcacagtgctggagaacaccatcaaggagcgagagaagaagtacctggaggagctgaaggccaagagtcacaagctgaccctgctgtctagcgagctggagcagcgggccagcaccatcgcctacctgacctcccagctgcacgccgccaagaagaagctcatgagctccagcgggacctcagatgccagcccgtcagggagccccgtgctggccagctacaagccagcgccccccaaagacaagctacccgaaacgcctcgccgccgcatgaaaaagagcctctcagcccccttgcacccggaatttgaagaggtctacagattcggggcagagagcaggaaactccttttgcgggaaccagtggatgctatgcccgaccccaccccatttctgctggctagggagtccgccgaggtccacctcatcaaagagaggcccctcgtcatcccccccatcgcctccgaccgaagcggcgagcagcacagcccggcccgcgaaaagccgcacaaggcccacgtcggggtggcacatcggatccaccacgccaccccgccgcaggcccagcccgaggtgaagaccctggcggtcgaccaggtgaacggaggcaaggtggtgaggaagcactcagggacggacagaactgtgtgaagcccgccgtgccccaccccgcgctgtccatgcactgtgagcaccactgggaaatctcagccacaccttttctgtttaatcccatgcatgccaaacacttttcacacctaccgacccattctccttctgcttctcttgccctcttcttcacaccaaaatatgatcgtgtccctgccgcagaatatgtatttcctaattgctgtggccaaacgcctgtgtgccgaatcgcttgcttctgatcccgctccgtgtaacctaagtgcgctgcaggcaaagcccaggccacggctgcgtcactactgatgttcacgatgccacacagtcacacacctaattcattctcaagtcggagcaacacataccaaccttgaccttatcctcaagctccagggcagcctggccgagcagcccctgctccctcctggagacccttgtcacctcccgagctcctcctggagacccctgtcacctcctgaccaacctttcccagggcggcaccgatcaccgagcagccgtgcgtgtatctcaaggaactaaataagatgacgctactcctcatagcaccacaacctgaatgtgtgttcatatttttttgttagttttatccaaaatgtttaagatcccaacaaactttattttctaaacctgcaaaaaaaaaaaaaaaaaaaaaa

SEQ ID NO: 3340 - DNA, 2730 bp, Homo sapiens
gagcagcgcggtgggtgcggctgtgagacggcaggagacttctgccccgcggtgcacgcgaccctcgagacgacagcgcggctactgccagcagcgaaggcgcctcccgcggagcgccccgacggcgcccgctcgcccatgccgagctgagcgcggcagcggcggcgggatgctggcgctgctggccgccagcgtggcgctcgccgtggccgctggggcccaggacagcccggcgcccggtagccgcttcgtgtgcacggcactgcccccagaggcggtgcacgccggctgcccgctgcccgcgatgcccatgcagggcggcgcgcagagtcccgaggaggagctgagggccgcggtgctgcagctgcgcgagaccgtcgtgcagcagaaggagacgctgggcgcgcagcgcgaggccatccgcgagctcacgggcaagctagcgcgctgcgaggggctggcgggcggcaaggcgcgcggcgcgggggccacgggcaaggacactatgggcgacctgccgcgggaccccggccacgtcgtggagcagctcagccgctcgctgcagaccctcaaggaccgcctggagagcctcgagcaccagctcagagcaaacgtgtccaatgctgggctgcccggcgacttccgcgaggtgctccagcagcggctgggggagctggagaggcagcttctgcgcaaggtggcagagctggaggacgagaagtccctgctgcacaatgagacctcggctcaccggcagaagaccgagagcaccctgaacgcgctgctgcagagggtcaccgagctggagcgaggcaatagcgcctttaagtcaccagatgcgttcaaggtgtccctcccactccgcacaaactacctatacggcaagatcaagaagacgctgcctgagctgtacgccttcaccatctgcctgtggctgcggtccagcgcctcaccaggcattggcacccccttctcctatgcggtgccagggcaggccaacgagatcgtgctgatcgagtggggcaacaaccccatcgagctgctcatcaacgacaaggttgcgcagctgcccctgtttgtcagtgacggcaagtggcaccacatctgtgtcacctggacgacacgggatggcatgtgggaggcattccaggacggagagaagctgggcactggggagaacctggccccctggcaccccatcaagcccgggggcgtgctgatccttggacaagagcaggacaccgtggggggtaggtttgatgccactcaggcatttgtcggggagctcagccagttcaacatatgggaccgcgtccttcgcgcacaagaaattgtcaacatcgccaactgctccacaaacatgccgggcaacatcatcccgtgggtggacaataacgtcgatgtgttcggaggggcctccaagtggcccgtggagacgtgtgaggagcgtctccttgacttgtagccgccttctcctctgtccaggaggccgggatcaggctgttgccatggaagttcagggccatagactgccccacttaaactcttgtcagtctgggctcagggttcccagagctcattccccaggaatctctaagaccagggctggggcagtgtctgtcactggcttgtttgttccctaccaatattctgttgctgtttgaagtagtgccagggtcccctgggaagatgcccccaagacacctgccccaagtgggtggatatctgccttcctgctgcaagtggaggcaggtccagcagcccctcttcagagcccctgtaaatgctatcgcagcctgagtcctgccgccttccagttccttggtgtcccgtgcaccccttctgtctgtcccctttcatggctgtgcagccgtcccgctggagtggccatgtcccttgtgcattgagtgcatccccgctggtgactaagctcgcagcaagcggctaccccccgatctgcaaaagggcctctccctttgtgttctatacattgtgaatcttcccgtctgaagaacgcccagcctgcccagacaaagccccgccttccccaaagcagaggggctgtctgtgtctccagaaaggggacatcgggggggaggggggctcagaaaggagaagggctgtgatctccggtcccttcccccatcatccttccttagactgatgctttgactgaatcatcactagctatggcattaaaaggcctctcttctcatctggtgccaaaggttccgttgcagctttttacaaccatccggtgtggtttggaggatttgttttttttttttcccaacagaaaagaacagccattagaagaaggctcccattttctgatgttccgccccactgtgaagagtgtgctcgttttaaattcatgttgattcttgtaagcactggactgtcttcatcaagtatttccctacagaactcctcaagaaaacagagatcatttggctagagattgtctgagtgactccaagctactcactgtattggacgggagtagtaatttattttaaagataaagtgactaagtggggaaatttataaagctaaatattatatattttatttttcatacatgtttgaagtgcaaatctgtggatattccatttgtaggaccaagtcgacatgcccatcctgacattgtatgctacgagaactcttctgatgatggaatttcgattaaagtgcactgaaagatgaaaaaaaaaaaaaaaaaaaaaaaaa

SEQ ID NO: 3341 - DNA, 4243 bp, Homo sapiens
gtttaggaagcggctccgggtcggtggccccaggacagggaagagcgggcgctatggggagccggacgccagagtcccctctccacgccgtgcagctgcgctggggcccccggcgccgacccccgctgctgccgctgctgttgctgctgctgccgccgccacccagggtcgggggcttcaacttagacgcggaggccccagcagtactctcggggcccccgggctccttcttcggattctcagtggagttttaccggccgggaacagacggggtcagtgtgctggtgggagcacccaaggctaataccagccagccaggagtgctgcagggtggtgctgtctacctctgtccttggggtgccagccccacacagtgcacccccattgaatttgacagcaaaggctctcggctcctggagtcctcactgtccagctcagagggagaggagcctgtggagtacaagtccttgcagtggttcggggcaacagttcgagcccatggctcctccatcttggcatgcgctccactgtacagctggcgcacagagaaggagccactgagcgaccccgtgggcacctgctacctctccacagataacttcacccgaattctggagtatgcaccctgccgctcagatttcagctgggcagcaggacagggttactgccaaggaggcttcagtgccgagttcaccaagactggccgtgtggttttaggtggaccaggaagctatttctggcaaggccagatcctgtctgccactcaggagcagattgcagaatcttattaccccgagtacctgatcaacctggttcaggggcagctgcagactcgccaggccagttccatctatgatgacagctacctaggatactctgtggctgttggtgaattcagtggtgatgacacagaagactttgttgctggtgtgcccaaagggaacctcacttacggctatgtcaccatccttaatggctcagacattcgatccctctacaacttctcaggggaacagatggcctcctactttggctatgcagtggccgccacagacgtcaatggggacgggctggatgacttgctggtgggggcacccctgctcatggatcggacccctgacgggcggcctcaggaggtgggcagggtctacgtctacctgcagcacccagccggcatagagcccacgcccacccttaccctcactggccatgatgagtttggccgatttggcagctccttgacccccctgggggacctggaccaggatggctacaatgatgtggccatcggggctccctttggtggggagacccagcagggagtagtgtttgtatttcctgggggcccaggagggctgggctctaagccttcccaggttctgcagcccctgtgggcagccagccacaccccagacttctttggctctgcccttcgaggaggccgagacctggatggcaatggatatcctgatctgattgtggggtcctttggtgtggacaaggctgtggtatacaggggccgccccatcgtgtccgctagtgcctccctcaccatcttccccgccatgttcaacccagaggagcggagctgcagcttagaggggaaccctgtggcctgcatcaaccttagcttctgcctcaatgcttctggaaaacacgttgctgactccattggtttcacagtggaacttcagctggactggcagaagcagaagggaggggtacggcgggcactgttcctggcctccaggcaggcaaccctgacccagaccctgctcatccagaatggggctcgagaggattgcagagagatgaagatctacctcaggaacgagtcagaatttcgagacaaactctcgccgattcacatcgctctcaacttctccttggacccccaagccccagtggacagccacggcctcaggccagccctacattatcagagcaagagccggatagaggacaaggctcagatcttgctggactgtggagaagacaacatctgtgtgcctgacctgcagctggaagtgtttggggagcagaaccatgtgtacctgggtgacaagaatgccctgaacctcactttccatgcccagaatgtgggtgagggtggcgcctatgaggctgagcttcgggtcaccgcccctccagaggctgagtactcaggactcgtcagacacccagggaacttctccagcctgagctgtgactactttgccgtgaaccagagccgcctgctggtgtgtgacctgggcaaccccatgaaggcaggagccagtctgtggggtggccttcggtttacagtccctcatctccgggacactaagaaaaccatccagtttgacttccagatcctcagcaagaatctcaacaactcgcaaagcgacgtggtttcctttcggctctccgtggaggctcaggcccaggtcaccctgaacggtgtctccaagcctgaggcagtgctattcccagtaagcgactggcatccccgagaccagcctcagaaggaggaggacctgggacctgctgtccaccatgtctatgagctcatcaaccaaggccccagctccattagccagggtgtgctggaactcagctgtccccaggctctggaaggtcagcagctcctatatgtgaccagagttacgggactcaactgcaccaccaatcaccccattaacccaaagggcctggagttggatcccgagggttccctgcaccaccagcaaaaacgggaagctccaagccgcagctctgcttcctcgggacctcagatcctgaaatgcccggaggctgagtgtttcaggctgcgctgtgagctcgggcccctgcaccaacaagagagccaaagtctgcagttgcatttccgagtctgggccaagactttcttgcagcgggagcaccagccatttagcctgcagtgtgaggctgtgtacaaagccctgaagatgccctaccgaatcctgcctcggcagctgccccaaaaagagcgtcaggtggccacagctgtgcaatggaccaaggcagaaggcagctatggcgtcccactgtggatcatcatcctagccatcctgtttggcctcctgctcctaggtctactcatctacatcctctacaagcttggattcttcaaacgctccctcccatatggcaccgccatggaaaaagctcagctcaagcctccagccacctctgatgcctgagtcctcccaatttcagactcccattcctgaagaaccagtccccccaccctcattctactgaaaaggaggggtctgggtacttcttgaaggtgctgacggccagggagaagctcctctccccagcccagagacatacttgaagggccagagccaggggggtgaggagctggggatccctcccccccatgcactgtgaaggacccttgtttacacataccctcttcatggatgggggaactcagatccagggacagaggccccagcctccctgaagcctttgcattttggagagtttcctgaaacaacttggaaagataactaggaaatccattcacagttctttgggccagacatgccacaaggacttcctgtccagctccaacctgcaaagatctgtcctcagccttgccagagatccaaaagaagcccccagctaagaacctggaacttggggagttaagacctggcagctctggacagccccaccctggtgggccaacaaagaacactaactatgcatggtgccccaggaccagctcaggacagatgccacacaaggatagatgctggcccagggcccagagcccagctccaaggggaatcagaactcaaatggggccagatccagcctggggtctggagttgatctggaacccagactcagacattggcacctaatccaggcagatccaggactatatttgggcctgctccagacctgatcctggaggcccagttcaccctgatttaggagaagccaggaatttcccaggaccctgaaggggccatgatggcaacagatctggaacctcagcctggccagacacaggccctccctgttccccagagaaaggggagcccactgtcctgggcctgcagaatttgggttctgcctgccagctgcactgatgctgcccctcatctctctgcccaacccttccctcaccttggcaccagacacccaggacttatttaaactctgttgcaagtgcaataaatctgacccagtgcccccactgaccaaaaaaaaaaaaaaaaaa

SEQ ID NO: 3342 - DNA, 2204 bp, Homo sapiens
gagacaggaaggtggcaaaggaaggagcccatttgcatgacaataattgagccaagaatagaaagccacagggatgcaagggtgaggctggcggctgagctgggctaaacctcacaaatcagactacccagctctgctccgcaggggaagggagactgagccctgggccaggcttggcagagagggaagcgggaggacacgaccccagggcattgtgggaacactggccaggctggactttgccttcctcctcgtcctttagccgggagcctgtctttgcttgcctttgcctttgaggctctgtggctgtggggctgagtggcatcatggcggctcagaaagatctctgggacgccattgtgattggggcggggatccagggctgcttcactgcataccacctggccaaacacaggaagaggatcctcctgctggagcagttctttctaccacactcccgaggaagctcccatggacaaagccggataatccgaaaggcgtacctggaagacttttacacccggatgatgcatgagtgctatcagatatgggcccagctggagcacgaggctggaacccaattgcacaggcagactggattactgctgctgggaatgaaagagaatcaagaattaaagacaatccaggccaatctgtcgaggcagagggtagaacaccagtgtctttcatctgaggaactgaagcaacgtttcccaaatattcggttgcccaggggagaagtggggctcttggacaattccggaggagttatctatgcatataaggccctcagagccctgcaggatgcaattcgacagctaggaggcatagtgcgtgacggagagaaggtggtggagataaacccagggctactggtcacggtgaaaaccacctccaggagctaccaagctaagagcttggtcatcacagcaggtccttggaccaaccagctcctccgtcccctgggcattgagatgcctctccagaccctgcggatcaacgtgtgttactggcgagagatggttcctgggagctatggtgtgtcccaggcctttccgtgcttcctgtggctgggcttgtgtccccaccacatctacggactgcccacaggagagtacccagggctgatgaaggtcagctatcaccacggcaaccacgcagaccctgaggagcgggactgccccacagcacgcacagacatcggagacgtccagatcctgagcagctttgtcagagatcacttacctgatctgaagcccgagcctgctgtcattgagagctgcatgtacacgaatacccctgatgagcagttcattctcgatcgccacccaaagtatgacaacattgtcattggtgctggattctctgggcacgggttcaagctggcccctgtggtggggaagatcctgtatgaattaagcatgaaattaacaccatcttatgacttggcaccttttcgaatcagccgtttcccaagcctgggcaaagcccacctttgacctctggccagaagcctcccttctgtgcacaggagccagtttcacagatggagaagatgtctcagatgaagggagtgtccctgagatatcatccttttcttctgcctcgcctgaatcccccataaacaccagatgattgagtctaccttctttccttggcccgctccctttttcttctgcctcacttgaatcccccgtaaacaccagacgattgagtctaccttcttttcttggccacctccccattcacaactactttctcgctcccagaaggttgatcagatattctacaatcacagagtagcaaggacgtttgagatgggtatatcagtaagaagagggcacaagaactggctctggagaccaaagcagttgttaaaaattctctttgctgggggccgggtgtggtggctcacacctgtaatctcggcactttggggggctgagacaggcggatcacctgaggccaggaattcaagaccagcctggccaacatggtgaaaccctatctccactaaaaatacaaaattagctgggtgtggtggcgcatgcctgtaatcccagctacttgggagactgaggcaagagaatcacttgaacccgggaggtggaggtggcagtgagccgagattgcgccattgcactccagcctgggcaaaaagagtgagactctgtctcaaaaaaaaaaaaaaaaaaaaaaaaaaa

SEQ ID NO: 3343 - DNA, 1326 bp, Homo sapiens
cccccgtctagatttaaagcgcggctgcgcccggcttctgacgtccattgaatcgcgcgggcggccggcggcgagcgcggggctgcgccgggatcgctgcgccctccgccgctggcctctgcgacgcgcgccgctcgcccgagccacccgccgccgcgccggctccccgcgccgctgcgctcctcgccccgcgcctgcccccaggatggtccgcgcgaggcaccagccgggtgggctttgcctcctgctgctgctgctctgccagttcatggaggaccgcagtgcccaggctgggaactgctggctccgtcaagcgaagaacggccgctgccaggtcctgtacaagaccgaactgagcaaggaggagtgctgcagcaccggccggctgagcacctcgtggaccgaggaggacgtgaatgacaacacactcttcaagtggatgattttcaacgggggcgcccccaactgcatcccctgtaaagaaacgtgtgagaacgtggactgtggacctgggaaaaaatgccgaatgaacaagaagaacaaaccccgctgcgtctgcgccccggattgttccaacatcacctggaagggtccagtctgcgggctggatgggaaaacctaccgcaatgaatgtgcactcctaaaggcaagatgtaaagagcagccagaactggaagtccagtaccaaggcagatgtaaaaagacttgtcgggatgttttctgtccaggcagctccacatgtgtggtggaccagaccaataatgcctactgtgtgacctgtaatcggatttgcccagagcctgcttcctctgagcaatatctctgtgggaatgatggagtcacctactccagtgcctgccacctgagaaaggctacctgcctgctgggcagatctattggattagcctatgagggaaagtgtatcaaagcaaagtcctgtgaagatatccagtgcactggtgggaaaaaatgtttatgggatttcaaggttgggagaggccggtgttccctctgtgatgagctgtgccctgacagtaagtcggatgagcctgtctgtgccagtgacaatgccacttatgccagcgagtgtgccatgaaggaagctgcctgctcctcaggtgtgctactggaagtaaagcactccggatcttgcaactccatttcggaagacaccgaggaagaggaggaagatgaagaccaggactacagctttcctatatcttctattctagagtggtaaactctctataagtgttcagtgttgacatagcctttgtgcaaaaaaaaaaaaaaaaaaaaaaaaaaagaaaaaaaaaaaaaaaaaaa

SEQ ID NO: 3344 - DNA, 2133 bp, Homo sapiens
cccagcctcgcctcgggtgtagggattgcatagaaaagcaaaactacacagtcttgactgtgtagttttgtttttaggattagaggctcaccgattcatgtcggagatggtcagaaaaaccaactctccataggacgtcgtttcagaagcaaccttgggcttagtcccaccctttttaggcactcttgagaaatcagagtgcctagaaagatgacaactcaagcaccgacgtttacgcagccgttacaaagcgttgtggtactggagggtagtaccgcaacctttgaggctcacattagtggttttccagttcctgaggtgagctggtttagggatggccaggtgatttccacttccactctgcccggcgtgcagatctcctttagcgatggccgcgctaaactgacgatccccgccgtgactaaagccaacagtggacgatattccctgaaagccaccaatggatctggacaagcgactagtactgctgagcttctcgtgaaagctgagacagcaccacccaacttcgttcaacgactgcagagcatgaccgtgagacaaggaagccaagtgagactccaagtgagagtgactggaatccctacacctgtggtgaagttctaccgggatggagccgaaatccagagctcccttgatttccaaatttcacaagaaggcgacctctacagcttactgattgcagaagcataccctgaggactcagggacctattcagtaaatgccaccaatagcgttggaagagctacttcgactgctgaattactggttcaaggtgaagaagaagtacctgctaaaaagacaaagacaattgtttcgactgctcagatctcagaatcaagacaaacccgaattgaaaagaagattgaagcccactttgatgccagatcaattgcaacagttgagatggtcatagatggtgccgctgggcaacagctgccacataaaacacctcccaggattcctccgaagccaaagtcaagatccccaacaccaccgtctattgctgccaaagcacagctggctcggcagcagtccccatcgcccataagacactccccttccccggtcagacacgtgcgggcaccgaccccatctccggtcaggtaaagctgccatagagagagcagattattgcacattttggaactaggttttgaaacgagaaagattcccttgtccccctcgcagggcatgcgacgcggagagtggttcgcttcttcagtgtcccgctgctcaaacctctaggggagcatacaaacgggcaggctgtggggctccgtgttcctctggacatccagccgcttgtgtgtctgcctactagggtctcaggggtttttataggcatagggtgtgggcgtggcaggtcagggtgatcttgggaaatgcaacatttgggcgggaaggcaggagtgtttgtcctcacctaggtccatgggcacaggcctcgctagggaccacgcacttctcttcccagcacttccctgccctcctcccgtgtaagtttcatgcactcaaaaatgtagcaggtgacaaaggaggtaaaccaagaagttactgaatatgattttcacaaatcctcactgtccacaggtaaattgaagacccttataaacttctgaattcttatttatatttcatgtaataaatatctactttaggggccaaaatatggcacagtgaaaggagaagagcacagaagttagagttcaaagccctaaggacaaatcagcctgatcacttaacagtttgatttagggcaataagtataaataataaaataattgttattatatatggatcacttcctctatcagattggaactatacatacattatctcattaaatgttcacaacctgtaagaattattatcctcaatgttattgataggtaactggaattaaagaagttaagcagtttatttaaggtttcagttgtgtcatctgtaaattaaagagagtcacaataagaatgatctcaagctgcattttggggcttcaatgagataattagttgaaagtgccttgtaaatagaaaataattatgccaatattcttatattcagatggtaagtaaaaccttttaaatattttgcaaaaaaaaaaaaaaaaaa

SEQ ID NO: 3345 - DNA, 3549 bp, Homo sapiens
cgcgcgcacctaccgaggcgcgggcgctgcagaggctcccagcccaagcctgagcctgagcccgccccgaggtccccgccccgcccgcctggctctctcgccgcggagccgccaagatgggggacaagaaagatgacaaggactcacccaagaagaacaagggcaaggagcgccgggacctggatgacctcaagaaggaggtggctatgacagagcacaagatgtcagtggaagaggtctgccggaaatacaacacagactgtgtgcagggtttgacccacagcaaagcccaggagatcctggcccgggatgggcctaacgcactcacgccaccgcctaccaccccagagtgggtcaagttttgccggcagctcttcgggggcttctccatcctgctgtggatcggggctatcctctgcttcctggcctacggtatccaggcgggcaccgaggacgacccctctggtgacaacctgtacctgggcatcgtgctggcggccgtggtgatcatcactggctgcttctcctactaccaggaggccaagagctccaagatcatggagtccttcaagaacatggtgccccagcaagccctggtgatccgggaaggtgagaagatgcaggtgaacgctgaggaggtggtggtcggggacctggtggagatcaagggtggagaccgagtgccagctgacctgcggatcatctcagcccacggctgcaaggtggacaactcctccctgactggcgaatccgagccccagactcgctctcccgactgcacgcacgacaaccccttggagactcggaacatcaccttcttttccaccaactgtgtggaaggcacggctcggggcgtggtggtggccacgggcgaccgcactgtcatgggccgtatcgccaccctggcatcagggctggaggtgggcaagacgcccatcgccatcgagattgagcacttcatccagctcatcaccggcgtggctgtcttcctgggtgtctccttcttcatcctctccctcattctcggatacacctggcttgaggctgtcatcttcctcatcggcatcatcgtggccaatgtcccagagggtctgctggccactgtcactgtgtgtctgacgctgaccgccaagcgcatggcccggaagaactgcctggtgaagaacctggaggctgtagaaaccctgggctccacgtccaccatctgctcagataagacagggaccctcactcagaaccgcatgacagtcgcccacatgtggtttgacaaccagatccacgaggctgacaccactgaggaccagtcagggacctcatttgacaagagttcgcacacctgggtggccctgtctcacatcgctgggctctgcaatcgcgctgtcttcaagggtggtcaggacaacatccctgtgctcaagagggatgtggctggggatgcgtctgagtctgccctgctcaagtgcatcgagctgtcctctggctccgtgaagctgatgcgtgaacgcaacaagaaagtggctgagattcccttcaattccaccaacaaataccagctctccatccatgagaccgaggaccccaacgacaaccgatacctgctggtgatgaagggtgcccccgagcgcatcctggaccgctgctccaccatcctgctacagggcaaggagcagcctctggacgaggaaatgaaggaggccttccagaatgcctaccttgagctcggtggcctgggcgagcgcgtgcttggtttctgccattattacctgcccgaggagcagttccccaagggctttgccttcgactgtgatgacgtgaacttcaccacggacaacctctgctttgtgggcctcatgtccatgatcgacccaccccgggcagccgtccctgacgcggtgggcaagtgtcgcagcgcaggcatcaaggtcatcatggtcaccggcgatcaccccatcacggccaaggccattgccaagggtgtgggcatcatctctgagggcaacgagactgtggaggacatcgccgcccggctcaacattcccgtcagccaggttaacccccgggatgccaaggcctgcgtgatccacggcaccgacctcaaggacttcacctccgagcaaatcgacgagatcctgcagaatcacaccgagatcgtcttcgcccgcacatccccccagcagaagctcatcattgtggagggctgtcagagacagggtgcaattgtggctgtgaccggggatggtgtgaacgactcccccgctctgaagaaggccgacattggggtggccatgggcatcgctggctctgacgtctccaagcaggcagctgacatgatcctgctggacgacaactttgcctccatcgtcacaggggtggaggagggccgcctgatcttcgacaacctaaagaagtccattgcctacaccctgaccagcaatatcccggagatcacgcccttcctgctgttcatcatggccaacatcccgctgcccctgggcaccatcaccatcctctgcatcgatctgggcactgacatggtccctgccatctcactggcgtacgaggctgccgaaagcgacatcatgaagagacagcccaggaacccgcggacggacaaattggtcaatgagagactcatcagcatggcctacgggcagattggaatgatccaggctctcggtggcttcttctcttactttgtgatcctggcagaaaatggcttcttgcccggcaacctggtgggcatccggctgaactgggatgaccgcaccgtcaatgacctggaagacagttacgggcagcagtggacatacgagcagaggaaggtggtggagttcacctgccacacggccttctttgtgagcatcgttgtcgtccagtgggccgatctgatcatctgcaagacccggaggaactcggtcttccagcagggcatgaagaacaagatcctgatcttcgggctgtttgaggagacggccctggctgccttcctgtcctactgccccggcatggacgtggccctgcgcatgtaccctctcaagcccagctggtggttctgtgccttcccctacagtttcctcatcttcgtctacgacgaaatccgcaaactcatcctgcgcaggaacccagggggttgggtggagaaggaaacctactactgacctcagccccaccacatcgcccatctcttccccgtcccgcaggcccaggaccgcccctgtcagtccccccaattttgtattctggggggaggagccctctcttcctgtggccccaccttggcccccaccccctccactatctcctgccgcccccactctggctggcttctctcccctgccccaaacctctctcctctctcttttctgtgtcagtttctctccctctcctcacccctctatccattcctcccgccccagccacctccctgggctcttttttactccccttcagccccccggctgatgccatctctggttctggacaattatcaaatatatcagtggggagagagaaaaaaaaaaaaaaaaaaaaaaaaaaaaaaaaaaaaaa

SEQ ID NO: 3346 - DNA, 2342 bp, Homo sapiens
cgggaaggcttggaccgacgcggcccagaggccaggaacattccgcgcgtggaccagccgggccagggcgatgctgcgggtgcggtgtctgcgcggcgggagccgcggcgccgaggcggtgcactacatcggatctcggcttggacgaaccttgacaggatgggtgcagcgaactttccagagcacccaggcagctacggcttcctcccggaactcctgtgcagctgacgacaaagccactgagcctctgcccaaggactgccctgtctcttcttacaacgaatgggaccccttagaggaagtgatagtgggcagagcagaaaacgcctgtgttccaccgttcaccatcgaggtgaaggccaacacatatgaaaagtactggccattttaccagaagcaaggagggcattattttcccaaagatcatttgaaaaaggctgttgctgaaattgaagaaatgtgcaatattttaaaaacggaaggagtgacagtaaggaggcctgaccccattgactggtcattgaagtataaaactcctgattttgagtctacgggtttatacagtgcaatgcctcgagacatcctgatagttgtgggcaatgagattatcgaggctcccatggcatggcgttcacgcttctttgagtaccgagcgtacaggtcaattatcaaagactacttccaccgtggcgccaagtggacaacagctcctaagcccacaatggctgatgagctttataaccaggattatcccatccactctgtagaagacagacacaaattggctgctcagggaaaatttgtgacaactgagtttgagccatgctttgatgctgctgacttcattcgagctggaagagatatttttgcacagagaagccaggttacaaactacctaggcattgaatggatgcgtaggcatcttgctccagactacagagtgcatatcatctcctttaaagatcccaatcccatgcatattgatgctaccttcaacatcattggacctggtattgtgctttccaaccctgaccgaccatgtcaccagattgatcttttcaagaaagcaggatggactatcattactcctccaacaccaatcatcccagacgatcatccactctggatgtcatccaaatggctttccatgaatgtcttaatgctagatgaaaaacgtgttatggtggatgccaatgaagttccaattcaaaagatgtttgaaaagctgggtatcactaccattaaagttaacattcgtaatgccaattccctgggaggaggcttccattgctggacctgcgatgtccggcgccgaggcaccttacagtcctacttggactgaacaggcctgatggagcttgtggctggcctcagatacacctaagaagcttaggggcaaggttcattctcctgctttaaaaagtgcatgaactgtagtgctttaaacaatcatctccttaacaggggtcgtaagcctggtttgcttctattacttttctttgacataaagaaaataacttctgctaggtattactctctactcctaaagttatttactatttggcttcaagtataaaattttggtgaatgtgtaccaagaaaaaattagtcacctgagtaacttggccactaataattaaccatctacctctgtttttaattttctttccaaaaggcagcttgaaatgttggtcctaatcttaattttttttcctcttctatagacttgagaatgtttttctctaaatgagagaaagacttagaatgtacacagatccaaaatagaatcagattatctctttttttctaaaggagagaaagacttagaacatacacagatcctaagtagaaccaggtaattgtctctttttctaataaggaatttgggtaatttttaattttttgttttttaaaaaataacctagactatgcaaaacatcaaagtgaattttccatgaatgtttttaatattctcatctcaacattgtgatatatgctactaaaaaccttttcatatacatcttacctcatttcaagtgaattattttaatctttttctctctttccaaaaatttaggaatgtttagtgtaattggatttcgctatcagttcccatccttaagttttgatattcaatatctgatagatacactgcatctttggtcatctaagatttgtttacaaatgtgcaaattatttagagcatagactttataagcattaaaaaaaactaatggaggtaaaacctaaatgcgatgtgaaataattttagtgttgataccgtatgtgtatttttattctaataaacttttgtgttccagaaaaaaaaaaaaaaaaaaaaa

SEQ ID NO: 3347 - DNA, 2313 bp, Homo sapiens
ggggccgcgccgcgaggcctgatccctgcagcgcgggcaggcggcgtcgcagagcggagctagctggatgcgtccggactcctgcaggtgagagtgattttccagtgattgctttggcctgtacaaccagagaacaggattcttcccttctttttggccaccaaatgcctatgtgcaccacacattccagtgtgctgagaagggcagagcttcttggatgatgatggacgtcccaccgggcaggatgaaggcagagcgtgtggcatctccacctcaagggtgcagcctgatcttcctcttctcccttgccagccagcactctgccttctgtatccaccatggtgtttggtgagtttttccatcgccctggacaagacgaggaacttgtcaacctgaatgtggggggctttaagcagtctgttgaccaaagcaccctcctgcggtttcctcacaccagactggggaagctgcttacttgccattctgaagaggccattctggagctgtgtgatgattacagtgtggccgataaggaatactactttgatcggaatccctccttgttcagatatgttttgaatttttattacacggggaagctgcatgtcatggaggagctgtgcgtattctcattctgccaggagatcgagtactggggcatcaacgagctcttcattgattcttgctgcagcaatcgctaccaggaacgcaaggaggaaaaccacgagaaggactgggaccagaaaagccatgatgtgagtaccgactcctcgtttgaagagtcgtctctgtttgagaaagagctggagaagtttgacacactgcgatttggtcagctccggaagaaaatctggattagaatggagaatccagcgtactgcctgtccgctaagcttatcgctatctcctccttgagcgtggtgctggcctccatcgtggccatgtgcgttcacagcatgtcggagttccagaatgaggatggagaagtggatgatccggtgctggaaggattggagatcgcgtgcattgcctggttcaccggggagcttgccgtccggctggctgccgctccttgtcaaaagaaattctggaaaaaccctctgaacatcattgactttgtctctattattcccttctatgccacgttggctgtagacaccaaggaggaagagagtgaggatattgagaacatgggcaaggtggtccagatcctacggcttatgaggattttccgaattctaaagcttgcccggcactcggtaggacttcggtctctaggtgccacactgagacacagctaccatgaagttgggcttctgcttctcttcctctctgtgggcatttccattttctctgtgcttatctactccgtggagaaagatgaccacacatccagcctcaccagcatccccatctgctggtggtgggccaccatcagcatgacaactgtgggctatggagacacccacccggtcaccttggcgggaaagctcatcgccagcacatgcatcatctgtggcatcttggtggtggcccttcccatcaccatcatcttcaacaagttttccaagtactaccagaagcaaaaggacattgatgtggaccagtgcagtgaggatgcaccagagaagtgtcatgagctaccttactttaacattagggatatatatgcacagcggatgcacgccttcattaccagtctctcttctgtaggcattgtggtgagcgatcctgactccacagatgcttcaagcattgaagacaatgaggacatttgtaacaccacctccttggagaattgcacagcaaaatgagcgggggtgtttgtgcctgtttctcttatcctttcccaacattaggttaacacagctttataaacctcagtgggttcgttaaaatcatttaattctcagggtgtacctttcagccatagttggacattcattgctgaattctgaaatgatagaattgtctttatttttctctgtgaggtcaattaaatgccttgttctgaaatttattttttacaagagagagttgtgatatagtttggaatataagataaatggtattgggtggggtttgtggctacagcttatgcatcattctgtgtttgtcatttactcacattgagctaactttaaattactgacaagtagaatcaaaggtgcagctgactgagacgacatgcatgtaagatccacaaaatgagacaatgcatgtaaatccatgctcatgttctaaacatggaaactaggagcctaataaacttcctaattcagtatggaaaaaaaaaaaaaaaaaaaaaaaaaa

SEQ ID NO: 3348 - DNA, 1814 bp, Homo sapiens
ccaagactgagccggcggccgcggcgcagcgaacgagcagtgaccgtgctcctacccagctctgcttcacagcgcccacctgtctccgcccctcggcccctcgcccggctttgcctaaccgccacgatgatgttctcgggcttcaacgcagactacgaggcgtcatcctcccgctgcagcagcgcgtccccggccggggatagcctctcttactaccactcacccgcagactccttctccagcatgggctcgcctgtcaacgcgcaggacttctgcacggacctggccgtctccagtgccaacttcattcccacggtcactgccatctcgaccagtccggacctgcagtggctggtgcagcccgccctcgtctcctctgtggccccatcgcagaccagagcccctcaccctttcggagtccccgccccctccgctggggcttactccagggctggcgttgtgaagaccatgacaggaggccgagcgcagagcattggcaggaggggcaaggtggaacagttatctccagaagaagaagagaaaaggagaatccgaagggaaaggaataagatggctgcagccaaatgccgcaaccggaggagggagctgactgatacactccaagcggagacagaccaactagaagatgagaagtctgctttgcagaccgagattgccaacctgctgaaggagaaggaaaaactagagttcatcctggcagctcaccgacctgcctgcaagatccctgatgacctgggcttcccagaagagatgtctgtggcttcccttgatctgactgggggcctgccagaggttgccaccccggagtctgaggaggccttcaccctgcctctcctcaatgaccctgagcccaagccctcagtggaacctgtcaagagcatcagcagcatggagctgaagaccgagccctttgatgacttcctgttcccagcatcatccaggcccagtggctctgagacagcccgctccgtgccagacatggacctatctgggtccttctatgcagcagactgggagcctctgcacagtggctccctggggatggggcccatggccacagagctggagcccctgtgcactccggtggtcacctgtactcccagctgcactgcttacacgtcttccttcgtcttcacctaccccgaggctgactccttccccagctgtgcagctgcccaccgcaagggcagcagcagcaatgagccttcctctgactcgctcagctcacccacgctgctggccctgtgagggggcagggaaggggaggcagccggcacccacaagtgccactgcccgagctggtgcattacagagaggagaaacacatcttccctagagggttcctgtagacctagggaggaccttatctgtgcgtgaaacacaccaggctgtgggcctcaaggacttgaaagcatccatgtgtggactcaagtccttacctcttccggagatgtagcaaaacgcatggagtgtgtattgttcccagtgacacttcagagagctggtagttagtagcatgttgagccaggcctgggtctgtgtctcttttctctttctccttagtcttctcatagcattaactaatctattgggttcattattggaattaacctggtgctggatattttcaaattgtatctagtgcagctgattttaacaataactactgtgttcctggcaatagtgtgttctgattagaaatgaccaatattatactaagaaaagatacgactttattttctggtagatagaaataaatagctatatccatgaaaaaaaaaaaaaaaaaaaaa

SEQ ID NO: 3349 - DNA, 1154 bp, Homo sapiens
agaagccgcttataaattaccgcttccttcgcgccgccgccaacgccgagccccgaggaccgcaagcccagaggacaagctgcgccaagagggagtgcggagcgttcacccagcgggtcagagagcgagcgggcaggcagcccccggccggcggaacccggcacagccgagcagagcgcgggcggcgccgcagccaccccagatccagaaccagaaccacagcccttctgaggagctcccaaacaaagcaaggagatggccaccaaggagaagctgcagtgtctgaaagatttccacaaggacatcctgaagccctcaccagggaagagcccaggcacgcggcctgaggacgaggctgagggaaaacctccgcagagggagaagtggtctagcaagatcgactttgtgctctctgtggctggcggcttcgtgggcttgggcaacgtctggcgcttcccgtacctctgctacaagaatggtggaggtgcgtttctcataccgtattttattttcctgtttgggagcggcctgcctgtgtttttcttggagatcatcataggccagtacacctctgaagggggcatcacctgctgggaaaagatctgccccttgttctctggtatcggctatgcctccgttgtaattgtgtccctcctgaatgtctactacatcgtcatcctggcctgggccacatactacctgttccagtccttccagaaggagctgccctgggcacactgcaaccacagctggaacacacctcactgcatggaggacaccatgcgcaagaacaagagtgtctggatcaccatcagctccaccaacttcacctcccctgtcatcgagttctgggagtaaggccacctcattgaagcaaggaggaggacatgggtggggcagagaggatggcccacttccttatctcctcccctgggatacaggagccactgtcttcgggggagtgggaggagggtgcagatctggagataaatttatgcctttggccatagacaggactggaatcccagttctgccacttactggctgtttgaccttaggcaagccactcctcctttctgagcctcagtttctttacctgtaagataaaaagaatgaatcattactaccctgtgaaaaaaaaaaaaaaaaaaaaa

SEQ ID NO: 3350 - DNA, 820 bp, Homo sapiens
gcaggctccgggctgaagattgcttctcttctctcctccaaggtctagtgacggagcccgcgcgcggcgccaccatgcggcagaaggcggtatcgcttttcttgtgctacctgctgctcttcacttgcagtggggtggaggcaggtaagaaaaagtgctcggagagctcggacagcggctccgggttctggaaggccctgaccttcatggccgtcggaggaggactcgcagtcgccgggctgcccgcgctgggcttcaccggcgccggcatcgcggccaactcggtggctgcctcgctgatgagctggtctgcgatcctgaatgggggcggcgtgcccgccggggggctagtggccacgctgcagagcctcggggctggtggcagcagcgtcgtcataggtaatattggtgccctgatgggctacgccacccacaagtatctcgatagtgaggaggatgaggagtagccagcagctcccagaacctcttcttccttcttggcctaactcttccagttaggatctagaactttgccttttttttttttttttttttttttgagatgggttctcactatattgtccaggctagagtgcagtggctattcacagatgcgaacatagtacactgcagcctccaactcctagcctcaagtgatcctcctgtctcaacctcccaagtaggattacaagcatgcgccgacgatgcccagaatccagaactttgtctatcactctccccaacaacctagatgtgaaaacagaataaacttcacccaaaaaaaaaaaaaaaaaaaaaaaaaaaaaaaaaaaaaaaaaaa

SEQ ID NO: 3351 - DNA, 2882 bp, Homo sapiens
gagacggcggcgcgtgcagcagctccagaaagcagcgagttggcagagcagggctgcatttccagcaggagctgcgagcacagtgctggctcacaacaagatgctcaaggtgtcagccgtactgtgtgtgtgtgcagccgcttggtgcagtcagtctctcgcagctgccgcggcggtggctgcagccggggggcggtcggacggcggtaattttctggatgataaacaatggctcaccacaatctcccagtatgacaaggaagtcggacagtggaacaaattccgagacgatgattatttccgcacttggagtccaggaaaacccttcgatcaggctttagatccagctaaggatccatgcttaaagatgaaatgtagtcgccataaagtatgcattgctcaagattctcagactgcagtctgcattagtcaccggaggcttacacacaggatgaaagaagcaggagtagaccataggcagtggaggggtcccatattatccacctgcaagcagtgcccagtggtctatcccagccctgtttgtggttcagatggtcatacctactcttttcagtgcaaactagaatatcaggcatgtgtcttaggaaaacagatctcagtcaaatgtgaaggacattgcccatgtccttcagataagcccaccagtacaagcagaaatgttaagagagcatgcagtgacctggagttcagggaagtggcaaacagattgcgggactggttcaaggcccttcatgaaagtggaagtcaaaacaagaagacaaaaacattgctgaggcctgagagaagcagattcgataccagcatcttgccaatttgcaaggactcacttggctggatgtttaacagacttgatacaaactatgacctgctattggaccagtcagagctcagaagcatttaccttgataagaatgaacagtgtaccaaggcattcttcaattcttgtgacacatacaaggacagtttaatatctaataatgagtggtgctactgcttccagagacagcaagacccaccttgccagactgagctcagcaatattcagaagcggcaaggggtaaagaagctcctaggacagtatatccccctgtgtgatgaagatggttactacaagccaacacaatgtcatggcagtgttggacagtgctggtgtgttgacagatatggaaatgaagtcatgggatccagaataaatggtgttgcagattgtgctatagattttgagatctccggagattttgctagtggcgattttcatgaatggactgatgatgaggatgatgaagacgatattatgaatgatgaagatgaaattgaagatgatgatgaagatgaaggggatgatgatgatggtggtgatgaccatgatgtatacatttgattgatgacagttgaaatcaataaattctacatttctaatatttacaaaaatgatagcctatttaaaattatcttcttccccaataacaaaatgattctaaacctcacatatattttgtataattatttgaaaaattgcagctaaagttatagaactttatgtttaaataagaatcatttgctttgagtttttatattccttacacaaaaagaaaatacatatgcagtctagtcagacaaaataaagttttgaagtgctactataataaatttttcacgagaacaaactttgtaaatcttccataagcaaaatgacagctagtgcttgggatcgtacatgttaattttttgaaagataattctaagtgaaatttaaaataaataaatttttaatgacctgggtcttaaggatttaggaaaaatatgcatgctttaattgcatttccaaagtagcatcttgctagacctagatgagtcaggataacagagagataccacatggcaagaaaaacaaagtgacaattgtagagtcctcaattgtgtttacattaatagtggtgtttttacctatgaaattattctggatctaacaggacattttacaaaatggcaagtatggaaaaccatggattctgaaagttaaaaatttagttgttctccccaatgtgtattttaatttggatggcagtctcatgcagattttttaaaagattctttaataacatgatttgtttgcctttctagatttctttatctttctgaccagcaacttagggagcagaatttaaattaggaagacaaagggaaagatccatttaaaccatatttttacaaagtttgtcatttgccccaagatcaaattttaaattcttaattttcattttatttcccattttaggtaaaagtttgcatttaatcttagaattatgttatttttgttagtagtgtggaaacttagagaacttattgtatggtgccttgcaaaaatagagatagaaagattttagcatgcataccaatatagtatattacgcaatatataagcacacctaattaacagattaatatcagtaaaggtattgctgctggaatgaagaaaatgggatacgtttctttctttttttctattgttacataattgccatgtggacttgtttatgattattgtgtagagtagcatttaagatttaactgtagcaaaaattactttaaccgctgtatttaagttagcatgttaattaattgtgtagacattttggcacaccatcacttttaactatatcataccaatggttttgtgcccataataaaaatggaaaaacctgttgaatgttacgtattggtatctttaatttcaacagtgggtaaactggtttcccagtatacaattcattgaaagcaaaattgattaattatttccatttaatttatacacactcaatacaaaatttaatgttgactttacgtaataaagtataatg

SEQ ID NO: 3352 - DNA, 2217 bp, Homo sapiens
gggtgattggcttggctggacctgaatgatgcggctgtgattgctgaattgtctgggcaggtttggagtctctggcaagctcccctgactgtgcatccctctggagacgaagaggagggggaggcctgtcctctctgggatccattggtcacatccccctgaggattcccgaatgcctacctccagtgtcgtcaacatggagttctgaagtccatgtggctcttcacagtgaatcaggtgttaaggaagatgcagagacgccacagcagcaacacggataacattccacctgaaagaaaccgcagccaggcgctcagctccgaggcgagtgtggatgaaggtggcgtctttgagagtctgaaggcagaggcagcctccccaccagcgctcttctcgggcttatcaggcagcctccccaccagctcgttcccctccagcctggtgctgggctcctcggctggcggcggggacgtgttcatccagatgcccgcgtccagggaggaaggagggggccggggcgaggggggcgcctaccaccaccgccagccccaccaccatttccaccatggcggccaccgcgggggctccctgctgcagcacgtgggtggggaccaccgggggcactcggaggagggaggcgacgagcagcctgggacgcccgcccccgccctgtccgagctgaaggctgtgatctgctggctccagaaaggactccccttcatcctgatcctcctggccaaactgtgctttcagcataagctcggcattgctgtgtgcatcgggatggccagcaccttcgcctatgccaactccacgcttcgagaacaggtctcactgaaggagaagaggtcagtgctggtcatcttgtggatcctggcctttctggcggggaacaccctctatgtgctttatacattcagctccgagattgcgccacagcactccaacctgggtgacagagtgagtgagactctgtctaaaaaaaaaaagaaagaaagaagggagggagggaggaaggaaggaaggaaggaaagaaagaaagctcagctttggcccagatgtggttaccccttggtctcctgtctttatgtctttctcctcttcctattctgtcatctccctcacttaagtctcaggcctgtcagcagctcctgtggacattgccatcccctctggtagccttcagagcaaacaggacaacctatgttatggatgtttccaccaaccagggtagtggcatggagcaccgtaaccatctgtgcttctgtgatctctatgacagagccacttctccacctctgaaatgttccctgctctgaaatctggcatgagatggcacaggtgaccacgcagaagccaccagaatcttgcctgccctattcctcctcccaagtctgttctcttattgtcaacctcagcacaacaggctggcgccaatggcattacagagaaagcaatctgtgtggctagtgggcagattaccatgcaagccccaggagaaatggaggagctttgtagccacctccctgtcagccagtattaacatgtccccttccccctgccccgccgtagattcaggacattcgcccctgtgtgccaccaaaccaggactttccccttccccttggcttggcatccctggctctctcctggtacccagcaagacgtctgttccagggcagtgtagcatctttcaagctccgttactatggcgatggccatgatgttacaatcccacttgcctgaataatcaagtgggaaggggaagcagagggaaatggggccatgtgaatgcagctgctctgttctccctaccctgaggaaaaaccaaagggaagcaacaggaacttctgcaactggtttttatcggaaagatcatcctgcctgcagatgctgttgaaggggcacaagaaattggagctggagaagattgatgaaagtgcaggtgtgtaaggaaatagaacagtctgctgggagtcagacctggaattctgattccaaactctttattactttgggaagtcactcagcctccccgtagccatctccagggtgacggaacccagtgtattacctgctggaaccaaggaaactaacaatgtaggttactagtgaataccccaatggtttctccaattatgcccatgccaccaaaacaataaaacaaaattctctaacactgaaaaaaaaaaaaaaaaaaaaaaaaaaaaaaaaaaa

SEQ ID NO: 3353 - DNA, 983 bp, Homo sapiens
gcggcgggcagcagctgcgctgcgactgctctggaaggagaggacggggcacaaaccctgaccatgaccccccacaggctgctgccaccgctgctgctgctgctagctctgctgctcgctgccagcccaggaggcgccttggcgcggtgcccaggctgcgggcaaggggtgcaggcgggttgtccagggggctgcgtggaggaggaggatggggggtcgccagccgagggctgcgcggaagctgagggctgtctcaggagggaggggcaggagtgcggggtctacacccctaactgcgccccaggactgcagtgccatccgcccaaggacgacgaggcgcctttgcgggcgctgctgctcggccgaggccgctgccttccggcccgcgcgcctgctgttgcagaggagaatcctaaggagagtaaaccccaagcaggcactgcccgcccacaggatgtgaaccgcagagaccaacagaggaatccaggcacctctaccacgccctcccagcccaattctgcgggtgtccaagacactgagatgggcccatgccgtagacatctggactcagtgctgcagcaactccagactgaggtctaccgaggggctcaaacactctacgtgcccaattgtgaccatcgaggcttctaccggaagcggcagtgccgctcctcccaggggcagcgccgaggtccctgctggtgtgtggatcggatgggcaagtccctgccagggtctccagatggcaatggaagctcctcctgccccactgggagtagcggctaaagctgggggatagaggggctgcagggccactggaaggaacatggagctgtcatcactcaacaaaaaaccgaggccctcaatccaccttcaggccccgccccatgggcccctcaccgctggttggaaagagtgttggtgttggctggggtgtcaataaagctgtgcttggggtcaaaaaaaaaaaaaaaaaaaaaaaa

SEQ ID NO: 3354 - DNA, 1457 bp, Homo sapiens; identical to SEQ ID NO: 2879

SEQ ID NO: 3355 - DNA, 3003 bp, Homo sapiens; identical to SEQ ID NO: 2883

SEQ ID NO: 3356 - DNA, 1947 bp, Homo sapiens
catccctgccattgccgggcactcgcggcgctgctaacggcctggtcacatgctctccggagagctacgggagggcgctgggtaacctctatccgagccgcggccgcgaggaggagggaaaaggcgagcaaaaaggaagagtgggaggaggaggggaagcggcgaaggaggaagaggaggaggaggaagaggggagcacaaaggatccaggtctcccgacgggaggttaataccaagaaccatgtgtgccgagcggctgggccagttcatgaccctggctttggtgttggccacctttgacccggcgcgggggaccgacgccaccaacccacccgagggtccccaagacaggagctcccagcagaaaggccgcctgtccctgcagaatacagcggagatccagcactgtttggtcaacgctggcgatgtggggtgtggcgtgtttgaatgtttcgagaacaactcttgtgagattcggggcttacatgggatttgcatgacttttctgcacaacgctggaaaatttgatgcccagggcaagtcattcatcaaagacgccttgaaatgtaaggcccacgctctgcggcacaggttcggctgcataagccggaagtgcccggccatcagggaaatggtgtcccagttgcagcgggaatgctacctcaagcacgacctgtgcgcggctgcccaggagaacacccgggtgatagtggagatgatccatttcaaggacttgctgctgcacgaaccctacgtggacctcgtgaacttgctgctgacctgtggggaggaggtgaaggaggccatcacccacagcgtgcaggttcagtgtgagcagaactggggaagcctgtgctccatcttgagcttctgcacctcggccatccagaagcctcccacggcgccccccgagcgccagccccaggtggacagaaccaagctctccagggcccaccacggggaagcaggacatcacctcccagagcccagcagtagggagactggccgaggtgccaagggtgagcgaggtagcaagagccacccaaacgcccatgcccgaggcagagtcgggggccttggggctcagggaccttccggaagcagcgagtgggaagacgaacagtctgagtattctgatatccggaggtgaaatgaaaggcctggccacgaaatctttcctccacgccgtccattttcttatctatggacattccaaaacatttaccattagagaggggggatgtcacacgcaggattctgtggggactgtggacttcatcgaggtgtgtgttcgcggaacggacaggtgagatggagacccctggggccgtggggtctcaggggtgcctggtgaattctgcacttacacgtactcaagggagcgcgcccgcgttatcctcgtacctttgtcttctttccatctgtggagtcagtgggtgtcggccgctctgttgtgggggaggtgaaccagggaggggcagggcaaggcagggcccccagagctgggccacacagtgggtgctgggcctcgccccgaagcttctggtgcagcagcctctggtgctgtctccgcggaagtcagggcggctggattccaggacaggagtgaatgtaaaaataaatatcgcttagaatgcaggagaagggtggagaggaggcaggggccgagggggtgcttggtgccaaactgaaattcagtttcttgtgtggggccttgcggttcagagctcttggcgagggtggagggaggagtgtcatttctatgtgtaatttctgagccattgtactgtctgggctgggggggacactgtccaagggagtggcccctatgagtttatattttaaccactgcttcaaatctcgatttcactttttttatttatccagttatatctacatatctgtcatctaaataaatggctttcaaacaaaaaaaaaaaaaaaaaa

SEQ ID NO: 3357 - DNA, 3140 bp, Homo sapiens
ctgtgttccacccgcctgggctagcacgtgggggagctgcggaagcgcggcgctgcgggccgggccgcggggcacagccgggggccggcggcggcgcgcggactccgcatcccgcaccccgatggtagccgaggagctggtgtaattacttcaagcctccaggatggcaatccagttccgttcgctcttccccttggcattgcctgggatgctggcgctcctcggctggtggtggtttttctctcgtaaaaaaggccatgtcagcagccatgatgagcagcaggtggaggctggtgctgtgcagctgagggctgaccctgccatcaaggaacctctccccgtggaagacgtctgtcccaaagtagtgtccacaccccccagtgtcacagagcctccagaaaaggaactgtccaccgtgagcaagctgcctgcagagcccccagcattgctccagacacacccaccttgccgaagatcagagtcctcgggcattcttcctaacaccacagacatgagattgcgaccaggaacacgcagagatgacagtacaaagctggagctagccctgacaggtggtgaagccaaatcgattcctctagagtgccccctttcatccccaaagggtgtactattctccagcaaatcagctgaggtgtgtaagcaagattcccccttcagcagggtgccaaggaaggtccagccaggctaccccgtagtccccgcagagaagcgtagctctggggagagggcaagagagacaggtggggccgaagggactggtgatgccgtgttgggggaaaaggtgcttgaagaagctctgttgtctcgggagcatgtcttggaattggagaacagcaagggccccagcctggcctctttagagggggaagaagataaggggaagagcagctcatcccaggtggtggggccagtgcaggaggaagagtatgtagcagagaagttgccaagtaggttcatcgagtcggctcacacagagctggcaaaggacgatgcggcgccagcacccccagtcgcagacgccaaagcccaggatagaggtgtcgagggagaactgggcaatgaggagagcttggatagaaatgaggagggcttggatagaaatgaggagggcttggatagaaatgaggagagcttggatagaaatgaggagggcttggatagaaatgaggagattaagcgggctgccttccagataatctcccaagtgatctcagaagcaaccgaacaggtgctggccaccacggttggcaaggttgcaggtcgtgtgtgtcaggccagtcagctccaagggcagaaggaagagagctgtgtcccagttcaccagaaaactgtcttgggcccagacactgcggagcctgccacagcagaggcagctgttgccccgccggatgctggcctccccttgccaggcctaccagcagagggctcaccaccaccaaagacctacgtgagctgcctgaagagccttctgtccagccccaccaaggacagtaagccaaatatctctgcacaccacatctccctggcctcctgcctggcactgaccacccccagtgaagagttgccggaccgggcaggcatcctggtggaagatgccacctgtgtcacctgcatgtcagacagcagccaaagtgtccctttggtggcttctccaggacactgctcagattctttcagcacttcagggcttgaagactcttgcacagagaccagctcgagccccagggacaaggccatcaccccgccactgccagaaagtactgtgcccttcagcaatggggtgctgaagggggagttgtcagacttgggggctgaggatggatggaccatggatgcggaagcagatcattcaggaggttctgacaggaacagcatggattccgtggatagctgttgcagtctcaagaagactgagagcttccaaaatgcccaggcaggctccaaccctaagaaggtcgacctcatcatctgggagatcgaggtgccaaagcacttagtcggtcggctaattggcaagcaggggcgctatgtgagttttctgaagcaaacatctggtgccaagatctacatttcaaccctgccttacacccagagcgtccagatctgccacatagaaggctctcaacatcatgtagacaaagcgctgaacttgattgggaagaagttcaaagagctgaacctcaccaatatctacgctcccccattgccttcactggcactgccttctctgccgatgacatcctggctcatgctgcctgatggcatcaccgtggaggtcattgtggtcaaccaggtcaatgccgggcacctgttcgtgcagcagcacacacaccctaccttccacgcgctgcgcagcctcgaccagcagatgtacctctgttactctcagcctggaatccccaccttgcccaccccagtggaaataacggtcatctgtgccgcccctggtgcggacggggcctggtggcgagcccaagtggttgcctcctacgaggagaccaacgaagtggagattcgatacgtgcactacggcggatataagagggtgaaagtagacgtgctccggcaaatcaggtctgactttgtcaccctgccgtttcagggagcagaagtccttctggacagtgtgatgcccctgtcagacgatgaccagttttcaccggaagcagatgccgccatgagcgagatgacggggaatacagcactgcttgctcaggtgacaagttacagtccaactggtcttcctctgattcagctgtggagtgtggttggagatgaagtggtgttgataaaccggtccctggtggagcgaggccttgcccagtgggtagacagctactacacaagcctttgacccccatgctgcttcctgagagtctttttttgcactgttgaaattgggcttggcactcaagtcaaagatgaacatcggaataacaaacattgtcctctccagaaagtcctttctttctccatactgtagtcctattgagaagacatttcgtctctgagaaaaaaggatggaactatgggttctcttcgcaaagccaaaggatagtgtttaacaagccagctggcttatgctggttctcagctgtttaaaaaaaaaaaaaaaaaaa

SEQ ID NO: 3358 - DNA, 1318 bp, Homo sapiens
agcaacgctaggaagggcgggcagaaagggcacgctcttgtgggtgactacaggttaggagaccgttgaacctggaggggccctaggatggaccccgtggaaagattcagagactgcgccctctccctggcgccgccttcccctacacgcggcgggtatattctgttgcagttggcccaggacctgtttccaagactctgccccctcgcacttccgtccctcctggttttgtaaagtgatgctcataggaacccccaccccgcgtgacactactcccagctcctggctgacttctagtcttctggttgaagctgcgcctttagatgacacgaccctacccacccctgtttccagcggatgcccgggcctggagcccacagaattcttccagtccctgggtggggacggagaaaggaacgttcagattgagatggcccatggcaccaccacgctcgccttcaagttccagcatggagtgattgcagcagtggattctcgggcctcagctgggtcctacattagtgccttacgggtgaacaaggtgattgagattaacccttacctgcttggcaccatgtctggctgtgcagcagactgtcagtactgggagcgcctgctggccaaggaatgcaggctgtactatctgcgaaatggagaacgtatttcagtgtcggcagcctccaagctgctgtccaacatgatgtgccagtaccggggcatgggcctctctatgggcagtatgatctgtggctgggataagaagggtcctggactctactacgtggatgaacatgggactcggctctcaggaaatatgttctccacgggtagtgggaacacttatgcctacggggtcatggacagtggctatcggcctaatcttagccctgaagaggcctatgaccttggccgcagggctattgcttatgccactcacagagacagctattctggaggcgttgtcaatatgtaccacatgaaggaagatggttgggtgaaagtagaaagtacagatgtcagtgacctgctgcaccagtaccgggaagccaatcaataatggtggtggtggcagctgggcaggtctcctctgggaggtcttggccgactcagggacctaagccacgttaagtccaaggagaagaagaggcctagcctgagccaaagagagagtacgggctcagcagccagaggaggccggtgaagtgcatcttctgcgtgttctctatttgaacaagcatttcccccagggaagtttctgggtgccccactaagtagaataaagaaaaacggttataaataaaaaaaaaaaaaaaaaaaa

SEQ ID NO: 3359 - DNA, 995 bp, Homo sapiens
cttcctggaagggtgcgataaggccgggcgaggtgcctgggatgcttctccccttccgcgaggaagagatctaattgggtagggcgggtgtagactagcctgccgagccgcccgctggcacctgcagcctcctgggcgcccgccgggccccggcgagaaagttgttaaagggagcgaggtggttgttcctggggtccgaggcgcgcctctcacgccctgcccaacagaagccgcagtcccgtggggtctggagacgcagtttcctgttaatgacaataaatccctgctccccctgcctcagacatctacgcagcgaaatcgagcctggccttgagggtccacaccgcgagggaagatgcgtgcgcccattccagagcctaagcctggagacctgattgagatttttcgccctttctacagacactgggccatctatgttggcgatggatatgtggttcatctggcccctccaagtgaggtcgcaggagctggtgcagccagtgtcatgtccgccctgactgacaaggccatcgtgaagaaggaattgctgtatgatgtggccgggagtgacaagtaccaggtcaacaacaaacatgatgacaagtactcgccgctgccctgcagcaaaatcatccagcgggcggaggagctggtggggcaggaggtgctctacaagctgaccagtgagaactgcgagcactttgtgaatgagctgcgctatggagtcgcccgcagtgaccaggtcagagatgtcatcatcgctgcaagcgttgcaggaatgggcttggcagccatgagccttattggagtcatgttctcaagaaacaagcgacaaaagcaataactgaaaaagactgtcctgtcagcgatgactttatacatcaagggggtcttgttttgctagagagtttggggtttggtttgtggatttcattgtgatttataataaggcttattttcacagaataaaataaagcaaaaaaaaaaaaaaaaaa

SEQ ID NO: 3360 - DNA, 2379 bp, Homo sapiens
cctttttcgagagtgactcccgttgtcccaaggcttcccagagcgaacctgtgcggctgcaggcaccggcgcgtcgagtttccggcgtccggaaggaccgagctcttctcgcggatccagtgttccgtttccagcccccaatctcagagcggagccgacagagagcagggaaccggcatggccaaagccgcggcgatcggcatcgacctgggcaccacctactcctgcgtgggggtgttccaacacggcaaggtggagatcatcgccaacgaccagggcaaccgcaccacccccagctacgtggccttcacggacaccgagcggctcatcggggatgcggccaagaaccaggtggcgctgaacccgcagaacaccgtgtttgacgcgaagcggctgatcggccgcaagttcggcgacccggtggtgcagtcggacatgaagcactggcctttccaggtgatcaacgacggagacaagcccaaggtgcaggtgagctacaagggggagaccaaggcattctaccccgaggagatctcgtccatggtgctgaccaagatgaaggagatcgccgaggcgtacctgggctacccggtgaccaacgcggtgatcaccgtgccggcctacttcaacgactcgcagcgccaggccaccaaggatgcgggtgtgatcgcggggctcaacgtgctgcggatcatcaacgagcccacggccgccgccatcgcctacggcctggacagaacgggcaagggggagcgcaacgtgctcatctttgacctgggcgggggcaccttcgacgtgtccatcctgacgatcgacgacggcatcttcgaggtgaaggccacggccggggacacccacctgggtggggaggactttgacaacaggctggtgaaccacttcgtggaggagttcaagagaaaacacaagaaggacatcagccagaacaagcgagccgtgaggcggctgcgcaccgcctgcgagagggccaagaggaccctgtcgtccagcacccaggccagcctggagatcgactccctgtttgagggcatcgacttctacacgtccatcaccagggcgaggttcgaggagctgtgctccgacctgttccgaagcaccctggagcccgtggagaaggctctgcgcgacgccaagctggacaaggcccagattcacgacctggtcctggtcgggggctccacccgcatccccaaggtgcagaagctgctgcaggacttcttcaacgggcgcgacctgaacaagagcatcaaccccgacgaggctgtggcctacggggcggcggtgcaggcggccatcctgatgggggacaagtccgagaacgtgcaggacctgctgctgctggacgtggctcccctgtcgctggggctggagacggccggaggcgtgatgactgccctgatcaagcgcaactccaccatccccaccaagcagacgcagatcttcaccacctactccgacaaccaacccggggtgctgatccaggtgtacgagggcgagagggccatgacgaaagacaacaatctgttggggcgcttcgagctgagcggcatccctccggcccccaggggcgtgccccagatcgaggtgaccttcgacatcgatgccaacggcatcctgaacgtcacggccacggacaagagcaccggcaaggccaacaagatcaccatcaccaacgacaagggccgcctgagcaaggaggagatcgagcgcatggtgcaggaggcggagaagtacaaagcggaggacgaggtgcagcgcgagagggtgtcagccaagaacgccctggagtcctacgccttcaacatgaagagcgccgtggaggatgaggggctcaagggcaagatcagcgaggcggacaagaagaaggttctggacaagtgtcaagaggtcatctcgtggctggacgccaacaccttggccgagaaggacgagtttgagcacaagaggaaggagctggagcaggtgtgtaaccccatcatcagcggactgtaccagggtgccggtggtcccgggcctgggggcttcggggctcagggtcccaagggagggtctgggtcaggccccaccattgaggaggtggattaggggcctttccaagattgctgtttttgttttggagcttcaagactttgcatttcctagtatttctgtttgtcagttctcaatttcctgtgtttgcaatgttgaaattttttggtgaagtactgaacttgctttttttccggtttctacatgcagagatgaatttatactgccatcttacgactatttcttctttttaatacacttaactcaggccattttttaagttggttacttcaaagtaaataaactttaaaattcaaaaaaaaaaaaaaaaaa

SEQ ID NO: 3361 - DNA, 920 bp, Homo sapiens
acaggtcgcctgactgggctcctccccgggcccgccccgacaggtttgtcttgtgaccgcgggcggccgctgcttctttcccgagcttggaacttcgttatccgcgatgcgtttcctggcagctacattcctgctcctggcgctcagcaccgctgcccaggccgaaccggtgcagttcaaggactgcggttctgtggatggagttataaaggaagtgaatgtgagcccatgccccacccaaccctgccagctgagcaaaggacagtcttacagcgtcaatgtcaccttcaccagcaatattcagtctaaaagcagcaaggccgtggtgcatggcatcctgatgggcgtcccagttccctttcccattcctgagcctgatggttgtaagagtggaattaactgccctatccaaaaagacaagacctatagctacctgaataaactaccagtgaaaagcgaatatccctctataaaactggtggtggagtggcaacttcaggatgacaaaaaccaaagtctcttctgctgggaaatcccagtacagatcgtttctcatctctaagtgcctcattgagttcggtgcatctggccaatgagtctgctgagactcttgacagcacctccagctctgctgcttcaacaacagtgacttgctctccaatggtatccagtgattcgttgaagaggaggtgctctgtagcagaaactgagctccgggtggctggttctcagtggttgtctcatgtctctttttctgtcttaggtggtttcattaaatgcagcacttggttagcagatgtttaattttttttttaacaacattaacttgtggcctctttctacacctggaaatttactcttgaataaataaaaactcgtttgtcttgtcaaaaaaaaaaaaaaaaaaaaaaaaaaaaaaa

SEQ ID NO: 3362 - DNA, 3065 bp, Homo sapiens
ctcaggcggtggctggaggctgcgcatctggggctttaaacatacaaagggattgccaggacctgcggcggcggcggcggcggcgggggctggggcgcgggggccggaccatgagccgctgagccgggcaaaccccaggccaccgagccagcggaccctcggagcgcagccctgcgccgcggagcaggctccaaccaggcggcgacgcggccacacgcaccgagccagcgacccccgggcgacgcgcggggccagggagcgctacgatggaggcgctaatggcccggggcgcgctcacgggtcccctgagggcgctctgtctcctgggctgcctgctgagccacgccgccgccgcgccgtcgcccatcatcaagttccccggcgatgtcgcccccaaaacggacaaagagttggcagtgcaatacctgaacaccttctatggctgccccaaggagagctgcaacctgtttgtgctgaaggacacactaaagaagatgcagaagttctttggactgccccagacaggtgatcttgaccagaataccatcgagaccatgcggaagccacgctgcggcaacccagatgtggccaactacaacttcttccctcgcaagcccaagtgggacaagaaccagatcacatacaggatcattggctacacacctgatctggacccagagacagtggatgatgcctttgctcgtgccttccaagtctggagcgatgtgaccccactgcggttttctcgaatccatgatggagaggcagacatcatgatcaactttggccgctgggagcatggcgatggatacccctttgacggtaaggacggactcctggctcatgccttcgccccaggcactggtgttgggggagactcccattttgatgacgatgagctatggaccttgggagaaggccaagtggtccgtgtgaagtatggcaacgccgatggggagtactgcaagttccccttcttgttcaatggcaaggagtacaacagctgcactgataccggccgcagcgatggcttcctctggtgctccaccacctacaactttgagaaggatggcaagtacggcttctgtccccatgaagccctgttcaccatgggcggcaacgctgaaggacagccctgcaagtttccattccgcttccagggcacatcctatgacagctgcaccactgagggccgcacggatggctaccgctggtgcggcaccactgaggactacgaccgcgacaagaagtatggcttctgccctgagaccgccatgtccactgttggtgggaactcagaaggtgccccctgtgtcttccccttcactttcctgggcaacaaatatgagagctgcaccagcgccggccgcagtgacggaaagatgtggtgtgcgaccacagccaactacgatgacgaccgcaagtggggcttctgccctgaccaagggtacagcctgttcctcgtggcagcccacgagtttggccacgccatggggctggagcactcccaagaccctggggccctgatggcacccatttacacctacaccaagaacttccgtctgtcccaggatgacatcaagggcattcaggagctctatggggcctctcctgacattgaccttggcaccggccccacccccacactgggccctgtcactcctgagatctgcaaacaggacattgtatttgatggcatcgctcagatccgtggtgagatcttcttcttcaaggaccggttcatttggcggactgtgacgccacgtgacaagcccatggggcccctgctggtggccacattctggcctgagctcccggaaaagattgatgcggtatacgaggccccacaggaggagaaggctgtgttctttgcagggaatgaatactggatctactcagccagcaccctggagcgagggtaccccaagccactgaccagcctgggactgccccctgatgtccagcgagtggatgccgcctttaactggagcaaaaacaagaagacatacatctttgctggagacaaattctggagatacaatgaggtgaagaagaaaatggatcctggctttcccaagctcatcgcagatgcctggaatgccatccccgataacctggatgccgtcgtggacctgcagggcggcggtcacagctacttcttcaagggtgcctattacctgaagctggagaaccaaagtctgaagagcgtgaagtttggaagcatcaaatccgactggctaggctgctgagctggccctggctcccacaggcccttcctctccactgccttcgatacaccgggcctggagaactagagaaggacccggaggggcctggcagccgtgccttcagctctacagctaatcagcattctcactcctacctggtaatttaagattccagagagtggctcctcccggtgcccaagaatagatgctgactgtactcctcccaggcgccccttccccctccaatcccaccaaccctcagagccacccctaaagagatcctttgatattttcaacgcagccctgctttgggctgccctggtgctgccacacttcaggctcttctcctttcacaaccttctgtggctcacagaacccttggagccaatggagactgtctcaagagggcactggtggcccgacagcctggcacagggcagtgggacagggcatggccaggtggccactccagacccctggcttttcactgctggctgccttagaacctttcttacattagcagtttgctttgtatgcactttgtttttttctttgggtcttgttttttttttccacttagaaattgcatttcctgacagaaggactcaggttgtctgaagtcactgcacagtgcatctcagcccacatagtgatggttcccctgttcactctacttagcatgtccctaccgagtctcttctccactggatggaggaaaaccaagccgtggcttcccgctcagccctccctgcccctcccttcaaccattccccatgggaaatgtcaacaagtatgaataaagacacctactgagtgaaaaaaaaaaaaaaaaaaaaa

SEQ ID NO: 3363 - DNA, 2309 bp, Homo sapiens
cagcgccgccgtcgccaccgccaccgccaccgccactaccaccggctgagtctgcagtcccgagatcccagccatcatgtccatagagaagatctgggcccgggagatcctggactcccgcgggaaccccacagtggaggtggatctctatactgccaaaggtcttttccgggctgcagtgcccagtggagcctctacgggcatctatgaggccctggagctgagggatggagacaaacagcgttacttaggcaaaggtgtcctgaaggcagtggaccacatcaactccaccatcgcgccagccctcatcagctcaggtctctctgtggtggagcaagagaaactggacaacctgatgctggagttggatgggactgagaacaaatccaagtttggggccaatgccatcctgggtgtgtctctggccgtgtgtaaggcaggggcagctgagcgggaactgcccctgtatcgccacattgctcagctggccgggaactcagacctcatcctgcctgtgccggccttcaacgtgatcaatggtggctctcatgctggcaacaagctggccatgcaggagttcatgatcctcccagtgggagctgagagctttcgggatgccatgcgactaggtgcagaggtctaccatacactcaagggagtcatcaaggacaaatacggcaaggatgccaccaatgtgggggatgaaggtggctttgcccccaatatcctggagaacagtgaagccttggagctggtgaaggaagccatcgacaaggctggctacacggaaaagatcgttattggcatggatgttgctgcctcagagttttatcgtgatggcaaatatgacttggacttcaagtctcccactgatccttcccgatacatcactggggaccagctgggggcactctaccaggactttgtcagggactatcctgtggtctccattgaggacccatttgaccaggatgattgggctgcctggtccaagttcacagccaatgtagggatccagattgtgggtgatgacctgacagtgaccaacccaaaacgtattgagcgggcagtggaagaaaaggcctgcaactgtctgctgctcaaggtcaaccagatcggctctgtcactgaagccatccaagcgtgcaagctggcccaggagaatggctggggggtcatggtgagtcatcgctcaggagagactgaggacacattcattgctgacctggtggtggggctgtgcacaggccagatcaagactggtgccccgtgccgttctgaacgtctggctaaatacaaccagctcatgagaattgaggaagagctgggggatgaagctcgctttgccggacataacttccgtaatcccagtgtgctgtgattcctctgcttgcctggagacgtggaacctctgtctcatcctcctggaaccttgctgtcctgatctgtgatagttcaccccctgagatcccctgagccccagggtgcccagaacttccctgattgacctgctccgctgctccttggcttacctgacctcttgctgtctctgctcgccctcctttctgtgccctactcattggggttccgcactttccacttcttcctttctctttctctcttccctcagaaactagaaatgtgaatgaggattattataaaagggggtccgtggaagaatgatcagcatctgtgatgggagcgtcagggttggtgtgctgaggtgttagagagggaccatgtgtcacttgtgctttgctcttgtcccacgtgtcttccactttgcatatgagccgtgaactgtgcatagtgctgggatggaggggagtgttgggcatgtgatcacgcctggctaataaggctttagtgtatttatttatttatttattttatttgtttttcattcatcccattaatcatttccccataactcaatggcctaaaactggcctgacttgggggaacgatgtgtctgtatttcatgtggctgtagatcccaagatgactggggtgggaggtcttgctagaatgggaagggtcatagaaagggccttgacatcagttcctttgtgtgtactcactgaagcctgcgttggtccagagcggaggctgtgtgcctgggggagttttcctctatacatctctccccaaccctaggttccctgttcttcctccagctgcaccagagcaacctctcactccccatgccacgttccacagttgccaccacctctgtggcattgaaatgagcacctccattaaagtctgaatcagtgcaaaaaaaaataaaaaaaaaaaaaaaaaaaaaa

SEQ ID NO: 3364 - DNA, 2181 bp, Homo sapiens
ccattttcaaacagtccctcctgggagaacacagacaggcagaggattacaacacaaggcagcaagcactgggagacgaaagttttggcatctgttccctggctgtgccaagatgggcgattggagcttcctgggaaatttcctggaggaagtacacaagcactcgaccgtggtaggcaaggtctggctcactgtcctcttcatattccgtatgctcgtgctgggcacagctgctgagtcttcctggggggatgagcaggctgatttccggtgtgatacgattcagcctggctgccagaatgtctgctacgaccaggctttccccatctcccacattcgctactgggtgctgcagatcatcttcgtctccacgccctctctggtgtacatgggccacgccatgcacactgtgcgcatgcaggagaagcgcaagctacgggaggccgagagggccaaagaggtccggggctctggctcttacgagtacccggtggcagagaaggcagaactgtcctgctgggaggaagggaatggaaggattgccctccagggcactctgctcaacacctatgtgtgcagcatcctgatccgcaccaccatggaggtgggcttcattgtgggccagtacttcatctacggaatcttcctgaccaccctgcatgtctgccgcaggagtccctgtccccacccggtcaactgttacgtatcccggcccacagagaagaatgtcttcattgtctttatgctggctgtggctgcactgtccctcctccttagcctggctgaactctaccacctgggctggaagaagatcagacagcgatttgtcaaaccgcggcagcacatggctaagtgccagctttctggcccctctgtgggcatagtccagagctgcacaccaccccccgactttaatcagtgcctggagaatggccctgggggaaaattcttcaatcccttcagcaataatatggcctcccaacaaaacacagacaacctggtcaccgagcaagtacgaggtcaggagcagactcctggggaaggtttcatccaggttcgttatggccagaagcctgaggtgcccaatggagtctcaccaggtcaccgccttccccatggctatcatagtgacaagcgacgtcttagtaaggccagcagcaaggcaaggtcagatgacctatcagtgtgaccctcctttatgggaggatcaggaccaggtgggaacaaaggaggctcagagaggaaagacgtgtcccttctgaactgatgctttctcactgtcatcactgcttggctcctttgagccccgggtctcaatgacgttgctcattaattctagaaactataaccagggctctgggatagtaagagaggtgacaacccacccagactgcagttccctccccaccctctacccagtatacgaagcctttcagattactcatgaaacagggtagagggaaagaagggaagcatggcaaaagctggcctggaagggatagccagagggatagaatgactctctctctacataccagcagcataccaaatgcgttctctaagttcctacctccttgacctgatcaccctccctcctccaaggaagagctcaaagttcccagccaatagacagcatgaatcaaggaacttgcattatatgtgctcttgaatctgttgtctccatggaccattcctcggagtagtggtgagatggccttgggttgcccttggcttctcctccctctactcagccttaaaaagggcttcttggaactttaccagcagcctcagctttacaaatgccttggtatgtacctctggcaaatgccctggtatgtacctctggcaaatgccccaccttggtgatgttgcaacctttccttctgctagggtgtacacctagcctgtgcaggtgtcagccctgctagggagtcactgtacacacaaactctactggaattcctgccaacatctgtcaccctgcagctcctttacagttcaatccaatgatagaaaccatcccttccctttctcccttggctgttcacccagccattccctgaaggccttaccaacaggaatatccaagaagctgttgtcctctctcgaaccctgaccagatcatcagccactgaggccagtggaatttccccaggccttgttaaaaaaaaaaaaaaaaaa

SEQ ID NO: 3365 - DNA, 2891 bp, Homo sapiens
attttctcctggacaaggagagagtgcggctgctgagagccgagcccagcaatcccgatcctctgagtcgtgaagaagggaggcagcgagggggttggggttggggcctgaggcaagcccccaggctccgctcttgccagagggacaggagccatggctcagaaaatggactgtggtgcgggcctcctcggcttccagaatcctgacgcttgtagagcagtctgtcaccccctcccccagcctcctgcctccaccctccctctttctgcattccccactctgtgcgaccccccttattctcaactccgcgatccgcctgccgtcctgagctgctactgcacgcctcttggagcgtccccggctcctgctgaggcctccgtagaagacagcgccttgcttatgcagaccttgatggaggccatccagatctcagaggctccacctactaaccaggccaccgcagctgctagtccccagagttcacagcccccaactgccaatgagatggctgacattcaggtttcagcagctgccgctaggcctaagtcagcctttaaagtccagaatgccaccacaaaaggcccaaatggtgtctatgatttctctcaggctcataatgccaaggatgtgcccaacacgcagcccaaggcagcctttaagtcccaaaatgctaccccaaagggtccaaatgctgcctatgatttttcccaggcagcaaccactggtgagttagctgctaacaagtctgagatggccttcaaggcccagaatgccactactaaagtgggcccaaatgccacctacaatttctctcagtctctcaatgccaatgacctggccaacagcaggcctaagacccctttcaaggcttggaatgataccactaaggccccaacagctgatacccagacccagaatgtaaatcaggccaaaatggccacttcccaggctgacatagagaccgacccaggtatctctgaacctgacggtgcaactgcacagacatcagcagatggttcccaggctcagaatctggagtcccggacaataattcggggcaagaggacccgcaagattaataacttgaatgttgaagagaacagcagtggggatcagaggcgggccccactggctgcagggacctggaggtctgcaccagttccagtgaccactcagaacccacctggcgcaccccccaatgtgctctggcagacgccattggcttggcagaacccctcaggctggcaaaaccagacagccaggcagaccccaccagcacgtcagagccctccagctaggcagaccccaccagcctggcagaacccagtcgcttggcagaacccagtgatttggccaaacccagtaatctggcagaacccagtgatctggccaaaccccattgtctggcccggccctgttgtctggccgaatccactggcctggcagaatccacctggatggcagactccacctggatggcagaccccaccgggctggcagggtcctccagactggcaaggtcctcctgactggccgctaccacccgactggccactgccacctgattggccacttcccactgactggccactaccacctgactggatccccgctgattggccaattccacctgactggcagaacctgcgcccctcgcctaacctgcgcccttctcccaactcgcgtgcctcacagaacccaggtgctgcacagccccgagatgtggcccttcttcaggaaagagcaaataagttggtcaagtacttgatgcttaaggactacacaaaggtgcccatcaagcgctcagaaatgctgagagatatcatccgtgaatacactgatgtttatccagaaatcattgaacgtgcatgctttgtcctagagaagaaatttgggattcaactgaaagaaattgacaaagaagaacacctgtatattctcatcagtacccccgagtccctggctggcatactgggaacgaccaaagacacacccaagctcggtctcctcttggtgattctgggtgtcatcttcatgaatggcaaccgtgccagtgaggctgtcctctgggaggcactacgcaagatgggactgcgtcctggggtgagacatcccctccttggagatctaaggaaacttctcacctatgagtttgtaaagcagaaatacctggactacagacgagtgcccaacagcaaccccccggagtatgagttcctctggggcctccgttcctaccatgagactagcaagatgaaagtgctgagattcattgcagaggttcagaaaagagaccctcgtgactggactgcacagttcatggaggctgcagatgaggccttggatgctctggatgctgctgcagctgaggccgaagcccgggctgaagcaagaacccgcatgggaattggagatgaggctgtgtctgggccctggagctgggatgacattgagtttgagctgctgacctgggatgaggaaggagattttggagatccctggtccagaattccatttaccttctgggccagataccaccagaatgcccgctccagattccctcagacctttgccggtcccattattggtcctggtggtacagccagtgccaacttcgctgccaactttggtgccattggtttcttctgggttgagtgagatgttggatattgctatcaatcgcagtagtctttcccctgtgtgaggctgaagcctcagattccttctaaacacagctatctagagagccacatcctgttgactgaaagtggcatgcaagataaatttatttgctgttccttgtctactgctttttttccccttgtgtgctgtcaagttttggtatcagaaataaacattgaaattgcaaagtgaaaaaaaaaaaaaaaaaa

SEQ ID NO: 3366 - DNA, 1855 bp, Homo sapiens
gccttgcggcctgcgggggaggctgcccggaggaggcagcggcggcggcagcgcgtcctcggtccccaggaccacggcttctttcctgccagatctatccatctggccatccatccgtgggggtctgcaatggccacctttagccgccaggaatttttccagcagctactgcaaggctgtctcctgcctactgcccagcagggccttgaccagatctggctgctccttgccatctgcctcgcctgccgcctcctctggaggctcgggttgccatcctacctgaagcatgcaagcaccgtggcaggcgggttcttcagcctctaccacttcttccagctgcacatggtttgggtcgtgctgctcagcctcctgtgctacctcgtgctgttcctctgccgacattcctcccatcgaggcgtcttcctatccgtcaccatcctcatctacctactcatgggtgagatgcacatggtagacaccgtgacatggcacaagatgcgaggggcacagatgattgtggccatgaaggcagtgtctctgggcttcgacctggaccggggcgaggtgggtacggtgccctcgccagtggagttcatgggctacctctacttcgtgggcaccatcgtcttcgggccctggatatccttccacagctacctacaagctgtccaaggccgcccactgagctgccggtggctgcagaaggtggcccggagcctggcactggccctgctgtgccttgtgctgtccacttgcgtgggcccctacctcttcccgtacttcatccccctcaacggtgaccgcctccttcgcaacaagaaacgcaaagccaggtggctgcgagcctacgagagtgctgtctccttccacttcagcaactattttgtgggctttctttccgaggccacggccacgttggcgggggctggctttaccgaggagaaggatcacctggaatgggacctgacggtgtccaagccactgaatgtggagctgcctcggtcaatggtggaagttgtcacaagctggaacctgcccatgtcttattggctaaataactatgttttcaagaatgctctccgcctggggaccttctcggctgtgctggtcacctatgcagccagcgccctcctacatggcttcagtttccacctggctgcggtcctgctgtccctggcttttatcacttacgtggagcatgtcctccggaagcgcctggctcggatcctcagtgcctgtgtcttgtcaaagcggtgcccgccagactgttcgcaccagcatcgcttgggcctgggggtgcgagccttaaacttgctctttggagctctggccatcttccacctggcctacctgggctccctgtttgatgtcgatgtggatgacaccacagaggagcagggctacggcatggcatacactgtccacaagtggtcagagctcagctgggccagtcactgggtcacttttggatgctggatcttctaccgtctcataggctgaggcacatctgtggaccctcataaccctcttaagacccctctcagggtgccactgatgggggatgagggaaggccctctctctactccttgaccccctccatccttgacccccaacacctcaacacacacacacacacacacacacaaaatcacaccattttcatgcctgtcaatccccaccccaccacaaggcaggaagggggtggtgcctgctggggcctagagggggatgcttggggaaacagagaaggggagatccagggcctccccgccttccttcttcctttttatatacaatttgttattgtcaaataaaagtaggaaatattcaaaaaaaaaaaaaaaaaaaaaaaaa

SEQ ID NO: 3367 - DNA, 1584 bp, Homo sapiens
cgctaagcgtcccagccgcatccctcccgcagcgacggcggcccgggacccgcgggctgtgaaccatgaacacccgcaatagagtggtgaactccgggctcggcgcctcccctgcctcccgcccgacccgggatccccaggacccttctgggcggcaaggggagctgagccccgtggaagaccagagagagggtttggaggcagcccctaagggcccttcgcgggagagcgtcgtgcacgcgggccagaggcgcacaagtgcatacaccttgatagcaccaaatataaaccggagaaatgagatacaaagaattgcggagcaggagctggccaacctggagaagtggaaggagcagaacagagctaaaccggttcacctggtgcccagacggctaggtggaagccagtcagaaactgaagtcagacagaaacaacaactccagctgatgcaatctaaatacaagcaaaagctaaaaagagaagaatctgtaagaatcaagaaggaagctgaagaagctgaactccaaaaaatgaaggcaattcagagagagaagagcaataaactggaggagaaaaaaagacttcaagaaaaccttagaagagaagcatttagagagcatcagcaatacaaaaccgctgagttcttgagcaaactgaacacagaatcgccagacagaagtgcctgtcaaagtgctgtttgtggcccacaatcctcaacatggaaacttcctatcctgcctagggatcacagctgggccagaagctgggcttacagagattctctaaaggcagaagaaaacagaaaattgcaaaagatgaaggatgaacaacatcaaaagagtgaattactggaactgaaacggcagcagcaagagcaagaaagagccaaaatccaccagactgaacacaggagggtaaataatgcttttctggaccgactccaaggcaaaagtcaaccaggtggcctcgagcaatctggaggctgttggaatatgaatagcggtaacagctggggttctctattagttttttcgaggcacctaagggtatatgagaaaatattgactcctatctggccttcatcaactgacctcgaaaagcctcatgagatgctttttcttaatgtgattttgttcagcctcactgtttttaccttaatttcaactgcccacacacttgaccgtgcagtcaggagtgactggcttctccttgtcctcatttatgcatgtttggaggagctgattcctgaactcatatttaatctctactgccagggaaatgctacattatttttctaattggaagtataattagagtgatgttggtagggtagaaaaagagggagtcacttgatgctttcaggttaatcagagctatgggtgctacaggcttgtctttctaagtgacatattcttatctaattctcagatcaggttttgaaaagctttgggggtctttttagattttaatccctactttctttatggtacaaatatgtacaaaagaaaaaggtcttatattcttttacacaaatttataaataaattttgaactccttctgtaaaaaaaaaaaaaaaaaaaaaa

SEQ ID NO: 3368 - DNA, 3009 bp, Homo sapiens
cgctagccgaagcggctgcatctggcgccgcgtctgccccgcgtgctcggagcggattctgcccgccgtccccggagccctcggcgccccgctgagcccgcgatcacttcctccctgtgaccaaccggcgctgcaggttagagcctggcaatgccgtttgggtgtgtgactctgggcgacaagaagaactataaccagccatcggaggtgactgacagatatgatttgggacaggtcatcaagactgaggagttttgtgaaatcttccgggccaaggacaagacgacaggcaagctgcacacctgcaagaagttccagaagcgggacggccgcaaggtgcggaaagctgccaagaacgagataggcatcctcaagatggtgaagcatcccaacatcctacagctggtggatgtgtttgtgacccgcaaggagtactttatcttcctggagctggccacggggagggaggtgtttgactggatcctggaccagggctactactcggagcgagacacaagcaacgtggtacggcaagtcctggaggccgtggcctatttgcactcactcaagatcgtgcacaggaatctcaagctggagaacctggtttactacaaccggctgaagaactcgaagattgtcatcagtgacttccatctggctaagctagaaaatggcctcatcaaggagccctgtgggacccccgagtatctggccccagaggtggtaggccggcagcggtatggacgccctgtggactgctgggccattggagtcatcatgtacatcctgctttcaggcaatccacctttctatgaggaggtggaagaagatgattatgagaaccatgataagaatctcttccgcaagatcctggctggtgactatgagtttgactctccatattgggatgatatttcgcaggcagccaaagacctggtcacaaggctgatggaggtggagcaagaccagcggatcactgcagaagaggccatctcccatgagtggatttctggcaatgctgcttctgataagaacatcaaggatggtgtctgtgcccagattgaaaagaactttgccagggccaagtggaagaaggctgtccgagtgaccaccctcatgaaacggctccgggcaccagagcagtccagcacggctgcagcccagtcggcctcagccacagacactgccacccccggggctgcaggtggggccacagctgcagctgcgagtggagctacctcagcccctgagggtgatgctgctcgtgctgcaaagagtgataatgtggcccccgcagaccgtagtgccaccccagccacagatggaagtgccaccccagccactgatggcagtgtcaccccagccaccgatggaagcatcactccagccactgatgggagtgtcaccccagccactgacaggagcgctactccagccactgatgggagagccacaccagccacagaagagagcactgtgcccaccacccaaagcagtgccatgctggccaccaaggcagctgccacccctgagccggctatggcccagccggacagcacagccccagagggcgccacaggccaggctccaccctctagtaaaggggaagaggctgctggttatgcccaggagtctcaaagggaggaggccagctgagtaggcagcctggtgagggggggcaggggatgggcaggagggtgggagagtggatgaggggcttctcactgtacatagagtcactggcatgatgccctcgctcccccatgcccccacatcccagtggggcataactaggggtcacgggagagcagtctcgtctcctgtgtgtatgtgtgtgagtggtgggcaggccagtggcagggccggccccagcccctgcatggattccttgtggcttttctgtcttttgctagcttcaccagtttctgttccttgtgggatgctgctctagggatactcagggggctcctgctctccttccccttcccttcttgcctcaccattcccctaggcaggccctgcaggtcccacactctcccaggccctaaacttgggcggccttgccctgagagctggtcctccagcgaggccctgtcagcggtcttaggctcctgcacatgaaggtgtgtgcctgtggtgtgtgggctgctctaggagcagatacaggctggtatagaggatgcagaaaggtagggcagtatgtttaagtccagacttggcacatggctagggatactgctcactagctgtggaggtcctcaggagtggagagaatgagtaggagggcagaagcttccatttttgtccttcctaagaccctgttatttgtgttatttcctgcctttccgagtcctgcagtgggctgccctgtaccctgaacctcatgagcctctaagggaaaggaggaacaattaggacgtggcaatgagacctggcagggcagagtacaagcccagcacccagtgtcccagccttactgggtccttaccctgggccaaacagggagggctgatacctccttgctcttcctagatgcccacctcctacaatctcagcccacaagtcctctccaccctagggggcttgctgcatggcaataactcataatctgatttggaggtttgccctttacaggggcagattttctgctcagttcaacaatgaaatgaagaggaactccctctttctacagctcacttctatcagaggcccaggtgcctcagagccacattgagttgctttttctgggatgaggaagtagggttaaactccccagtttcctgagggaggctcctgacaggtgccctttgtcagaccctaccacagcctggataggcagccacattggtcctcgcccttgctcggcactccgtggtggtcctgcccttctccctgcatgcctgtgggtctgctctggtgtgtgaaggtcggtgggttaactgtgtgcctactgaacctggcaaataaacatcaccctgcaaagccaaaaaaaaaaaaaaaaaaaaaaaa

SEQ ID NO: 3369 - DNA, 780 bp, Homo sapiens
gctccctgcctcgggctctcaccctcctctcctgcagctccagctttgtgctctgcctctgaggagaccatggcccagtatctgagtaccctgctgctcctgctggccaccctagctgtggccctggcctggagccccaaggaggaggataggataatcccgggtggcatctataacgcagacctcaatgatgagtgggtacagcgtgcccttcacttcgccatcagcgagtataacaaggccaccaaagatgactactacagacgtccgctgcgggtactaagagccaggcaacagaccgttgggggggtgaattacttcttcgacgtagaggtgggccgaaccatatgtaccaagtcccagcccaacttggacacctgtgccttccatgaacagccagaactgcagaagaaacagttgtgctctttcgagatctacgaagttccctgggagaacagaaggtccctggtgaaatccaggtgtcaagaatcctagggatctgtgccaggccattcgcaccagccaccacccactcccaccccctgtagtgctcccacccctggactggtggcccccaccctgcgggaggcctccccatgtgcctgcgccaagagacagacagagaaggctgcaggagtcctttgttgctcagcagggcgctctgccctccctccttccttcttgcttctaatagccctggtacatggtacacacccccccacctcctgcaattaaacagtagcatcgcctccctctgaaaaaaaaaaaaaaaaaaaaaaa

SEQ ID NO: 3370 - DNA, 2806 bp, Homo sapiens
ccgggacccgcccgcccgcgggagaaatgttgctgaagtgctgctgaaagggccagagatgcaaggatttgggatacattttgaacctttaagctgtctgacattgacctcctttcattattaataaagaagaatcaggagcttaggatgtattaacaccaactcattaatatactaaccggacaatgttctacaaacaattctacattgtaaaggactggattggcacaaaataaaataattttattttattcagcttataatatgactcgatggaggaaaatttgataagcatgagagaagaccattcttttcatgttcgttacagaatggaagcttcttgcctagagctggccttggaaggggaacgtctatgtaaatcaggagactgccgcgctggcgtgtcattctttgaagctgcagttcaagttggaactgaagacctaaaaacacttagcgctatttacagccagttgggcaatgcttatttctatttgcatgattatgccaaagcattagaatatcaccatcatgatttaacccttgcaaggactattggagaccagctgggggaagcgaaagctagtggtaatctgggaaacaccttaaaagttcttgggaattttgacgaagccatagtttgttgtcagcgacacctagatatttccagagagcttaatgacaaggtgggagaagcaagagcactttacaatcttgggaatgtgtatcatgccaaagggaaaagttttggttgccctggtccccaggatgtaggagaatttccagaagaagtgagagatgctctgcaggcagccgtggatttttatgaggaaaacctatcattagtgactgctttgggtgaccgagcggcacaaggacgtgcctttggaaatcttggaaacacacattacctccttggcaacttcagggatgcagttatagctcatgagcagcgtctccttattgcaaaagaatttggagataaagcagctgaaagaagagcatatagcaaccttggaaatgcatatatatttcttggtgaatttgaaactgcctcggaatactacaagaagacactactgttggcccgacagcttaaagaccgagctgtagaagcacagtcttgttacagtcttggaaatacatatactttacttcaagactatgaaaaggccattgattatcatctgaagcacttagcaattgctcaagagctgaatgatagaattggtgaaggaagagcatgttggagcttaggaaatgcatacacagcactaggaaatcatgatcaagcaatgcattttgctgaaaagcacttggaaatttcaagagaggttggggataaaagtggtgaactaacagcacgacttaatctctcagaccttcaaatggttcttggtctgagctacagcacaaataactccataatgtctgaaaatactgaaattgatagcagtttgaatggtgtacgccccaagttgggacgccggcatagtatggaaaatatggaacttatgaagttaacaccagaaaaggtacagaactggaacagtgaaattcttgctaagcaaaaacctcttattgccaaaccttctgcaaagctactctttgtcaacagactgaaggggaaaaaatacaaaacgaattcctccactaaagttctccaagatgccagtaattctattgaccaccgaattccaaattctcagaggaaaatcagtgcagatactattggagatgaagggttctttgacttattaagccgatttcaaagcaataggatggatgatcagagatgttgcttacaagaaaagaactgccatacagcttcaacaacaacttcttccactccccctaaaatgatgctaaaaacatcatctgttcctgtggtatcccccaacacggatgagtttttagatcttcttgccagctcacagagtcgccgtctggatgaccagagggctagtttcagtaatttgccagggcttcgtctaacacaaaacagccagtcggtacttagccacctgatgactaatgacaacaaagaggctgatgaagatttctttgacatccttgtaaaatgtcaaggatccagattagatgatcaaagatgtgctccaccacctgctaccacaaagggtccgacagtaccagatgaagactttttcagccttattttacggtcccagggaaagagaatggatgaacagagagttcttttacaaagagatcaaaacagagacactgactttgggctaaaggactttttgcaaaataatgctttgttggagtttaaaaattcagggaaaaaatcggcagaccattagttactatggatttattttttttcctttcaaacacggtaaggaaacaatctattacttttttccttaaaaggagaatttatagcactgtaatacagcttaaaatatttttagaatgatgtaaatagttaaccttcagtagtctattaaggcattaatacttctctggacatgcgcgtttgagggtggaggggtcctgtaaggtgcttcatcgtctgtgattactgcttgggatgtgttctttggcagcttgtgagattactttacctagtgtttataaagtaggaagttaagtgaatcatagattagaatttaatactcttatggaaataattttttaacatcttaattgacaatggcgttttttttatacataaccatggatgtagtgggaaacaatgttgtttggtaaaaataatgtacttgatcaatgtaaaaaagtatataaaatagtcttactaaaaaaaaaaaaaaaaaaaaaa

SEQ ID NO: 3371 - DNA, 574 bp, Homo sapiens
catctgtcccgctgcgtgttttcctcttgatcgggaactcctgcttctccttgcctcgaaatggaccccaactgctcctgctcgcctgttggctcctgtgcctgtgccggctcctgcaaatgcaaagagtgcaaatgcacctcctgcaagaagagtgagtgcagggccttccctgcgaatctgggggatgggccaatttagagcagggaacccagagctctgcaggcaggggcaggccaatgaccagcttccccaaacccctccttcaacacctgattcagaatcagacctcaaattgccttaaaaatgggctgctgctcctgctgccctgtgggctgtgccaagtgtgcccagggctgcatctgcaaagggacgtcagacaagtgcagctgctgtgcctgatgccaggacagctgtgctctcagatgtaaatagagcaacctatataaacctggattttttttttttttgtacaaccctgacccgtttgctacatctttttttctatgaaatatgtgaatggcaataaattcatctagactaaaaaaaaaaaaaaaaaaaaaaaaaaaaaaaa

SEQ ID NO: 3372 - DNA, 2175 bp, Homo sapiens
gcagagcagcaagtgctccgtgcagggctgttgctatcacttggaggtgaacagcctcttttgccggtattcagtgaagaaagcaagtctaaatatgcagttctctcactggagtgaaagatgttttgttcatttctaatcaactatgctagacagctgcaagctgaaaagtgcctgcaatttgccatttatttgtaataagaaaataataaacactgctggaaccagtaatgcagaagtccccttggctgatcccggaatgtaccagctggacattacattaagaaggggtcaaagtttagctgctcgagatcgaggagggacgagtgatccatatgtgaagtttaaaatcggaggaaaagaagtttttagaagtaagataatacacaagaacctcaaccctgtgtgggaagaaaaagcttgtattctggttgatcatcttagggagccattgtatataaaggtatttgactatgattttggactacaggatgactttatgggctcagcctttctggatctgacacaattggagttaaacaggcccacagatgtgacccttactctgaaagatcctcattatcctgaccatgatcttggaatcattttgctctcagtcatccttacccctaaagaaggagagtccagggatgtgacaatgctaatgaggaagagttggaaaagatcaagtaaggaactttcagaaaatgaagtggttggatcttatttctctgtgaagtctctcttttggaggacgtgcggcaggccagctcttcctgtcctgggcttctgcagagcagagcttcagaatccttattgcaaaaatgtacaatttcagacccaaagtttacgcctatcagacctacacagaaaatcgcatctttggagaggaatagtcagcatcaccttgattgaagggagagacctcaaggccatggattccaacgggttgagcgatccctacgtgaagttccggcttgggcatcagaagtacaagagcaagattatgccaaaaacgttgaatcctcagtggagggaacaatttgattttcacctttatgaagaaagaggaggagtcattgatatcactgcatgggacaaagatgctgggaaaagggatgatttcattggcaggtgccaggtcgacctgtcagccctcagtagggaacagacgcacaagctggagttgcagctggaagagggtgagggacacctggtgctgctggtcactctgacagcatcagccacagtcagcatctctgacctgtctgtcaactccctggaggaccagaaggaacgagaggagatattaaagaaatatagcccattgaggatatttcacaacctgaaagatgtgggatttctccaggtgaaagtcatcagagcggaagggttaatggctgccgacgtcactggaaaaagtgacccattttgtgtggtagaactgaacaacgatagactgctaacacatactgtctacaaaaatctcaatcctgagtggaataaagtcttcacgttcaacattaaagatatccattcagttcttgaagtgacagtttatgatgaagatcgggatcgaagtgctgactttctgggcaaagttgctataccattgctgtctattcaaaatggtgaacagaaagcctacgtcttgaaaaacaagcagctgacagggccaacaaagggggtcatctatcttgaaatagatgtgatttttaatgctgtgaaagccagcttacgaacattaatacccaaagaacagaagtacattgaagaggaaaacagactctctaaacagctgctactaagaaactttatcagaatgaaacgttgtgtcatggtgctggtaaatgctgcatactacgttaatagttgctttgattgggattcacccccaaggagtctcgctgcttttgtggccttgtatgggactttcattaatgtctgagcacatggaacaaagagtgtctacgtccctttgtgttgtaagttaccagaaagttaggcagcctgcttcccatagacgtgttgttgtctccctaaagaaagcaattgtcattatcgttaagttttagaaaaaaaatctctctctctctgtctctctcagtattctttttgtagctctttcttataataaatatatggtggtactattaaaaaaaaaaaaaaaaaaaa

SEQ ID NO: 3373 - DNA, 1445 bp, Homo sapiens
gagggactggccagtcccctcctccgcgccggccccaaccctgtcgctgccgccgcgctccgagtccccattcccgagctgccgctgttgtcgctcgctcagcgtctccctctcggccgccctctcctcgggacgatggcgcgcggtggccgcggccgccgcctggggttagccctggggctgctgctggcgctggtgctggcgccgcgggttctgcgggccaagcccacggtgcgcaaagagcgcgtggtgcggcccgactcggagctgggcgagcggccccctgaggacaaccagagcttccagtacgaccacgaggccttcctgggcaaggaggactccaagaccttcgaccagctcaccccggacgagagcaaggagaggctagggaagattgttgatcgaatcgacaatgatggggatggctttgtcactactgaggagctgaaaacctggatcaaacgggtgcagaaaagatacatctttgataatgtcgccaaagtctggaaggattatgatagggacaaggatgataaaatttcctgggaagaatacaaacaagccacctatggttactacctaggaaaccccgcagagtttcatgattcttcagatcatcacacctttaaaaagatgctgccacgtgatgagagaagattcaaagctgcagacctcaatggtgacctgacagctactcgggaggagttcactgcctttctgcatcctgaagagtttgaacatatgaaggaaattgtggttttggaaaccctggaggacatcgacaagaacggggatgggtttgtggatcaggatgagtatattgcggatatgttttcccatgaggagaatggccctgagccagactgggttttatcagaacgggagcagtttaacgaattccgggatctgaacaaggacgggaagttagacaaagatgagattcgccactggatcctccctcaagattatgatcatgcacaggctgaggccaggcatctggtatatgaatcagacaaaaacaaggatgagaagctaactaaagaggaaatattggagaactggaacatgtttgtcggaagccaagctaccaattacggggaagatctcacaaaaaatcatgatgagctttgatagacactcaccagaatatggcagactgtcataggcattctgttattgtcttggattgttgctacaattgtctaatttacagcagttgtgatcccacaaaaagcaagtttatacctcagattggggtataaaaattgtttttcgctcagtatttactggaaaatggacatcactagtctttcagtaagatttctctcaaaacacgtgaaaaccttggtaaattgcaattctttctggggatatattggtacaacatgacttaaaacttttttttttctattaaaacttaaaggggaaaaaaaaaaaaaaaaaaa

SEQ ID NO: 3374 - DNA, 1185 bp, Homo sapiens
cgagtcctcgggcttcgccccacccggcccgtgggggagtatctgtcctgccgccttcgcccacgccctgcactccgggaccgtccctgcgcgctctgggcgcaccatggcccgcggggctgcgctggcgctgctgctcttcggcctgctgggtgttctggtcgccgccccggatggtggtttcgatttatctgatgcccttcctgacaatgaaaacaagaaacccactgcaatccccaagaaacccagtgctggggatgactttgacttaggagatgctgttgttgatggagaaaatgacgacccacgaccaccgaacccacccaaaccgatgccaaatccaaaccccaaccaccctagttcctccggtagcttttcagatgctgaccttgcggatggcgtttcaggtggagaaggaaaaggaggcagtgatggtggaggcagccacaggaaagaaggggaagaggccgacgccccaggcgtgatccccgggattgtgggggctgtcgtggtcgccgtggctggagccatctctagcttcattgcttaccagaaaaagaagctatgcttcaaagaaaatgcagaacaaggggaggtggacatggagagccaccggaatgccaacgcagagccagctgttcagcgtactcttttagagaaatagaagattgtcggcagaaacagcccaggcgttggcagcagggttagaacagctgcctgaggctcctccctgaaggacacctgcctgagagcagagatggaggccttctgttcacggcggattctttgttttaatcttgcgatgtgctttgcttgttgctgggcggatgatgtttactaacgatgaattttacatccaaagggggataggcacttggacccccattctccaaggcccgggggggcggtttcccatgggatgtgaaaggctggccattattaagtccctgtaactcaaatgtcaaccccaccgaggcacccccccgtcccccagaatcttggctgtttacaaatcacgtgtccatcgagcacgtctgaaacccctggtagccccgacttctttttaattaaaataaggtaagcccttcaatttgtttcttcaatatttctttcatttgtagggatatttgtttttcatatcagactaataaaaagaaattagaaaccaaaaaaaaaaaaaaaaaa

SEQ ID NO: 3375 - DNA, 1049 bp, Homo sapiens
ctggtaatctggtccttgttcccgtctggataccagcttccttcagcagcgcaggcggtggtccctgaggcccgtggaaggagtcaaacttgcgggaattttgcagtttatctgcagggctgttgtttccagcaagacccaaagctagaaaaggaggaggaagaaactgacccgatcagtgccagaagtcattgtattcaaagaagaataagcaagaaagaaaagaaggaaggaagagaggtagacagatacaagatgaaatcctgtcaaaaaatggaaggaaaaccagaaaatgagagtgaaccaaagcatgaggaagagccaaagcctgaggaaaagccagaagaggaggagaagctagaggaggaggccaaagcaaaaggaacttttagagaaaggctgattcaatctctccaggagtttaaagaagatatacacaacaggcatttaagcaatgaagatatgtttagagaagtggatgaaatagatgagataaggagagtcagaaacaaacttatagtgatgcgttggaaggttaatcgaaaccatccttacccctatttaatgtagtttaccttgatttttatctgatattaacaataccatatagcttgctttttattagcatttcctgatattcctttgtccatatttctacttataacctgttgctattaatggttttagatgtatctcttgttatctgcatctcattgtttattgtattttgaaccaatctacaagtctctgtcttttaataaaagaactttacacatttgtaaaaaagaggttcttggtaagatataaaatggaaaaaggctaagtaatatgtgaatatcatatttttgaaaggtaaaaagtacatttgtatattacatatatggacataacttgtgaaggatgaaagaaagtacagcctctcggtggtgggattatgaatgatttttctccttttgcttgtttgtattttctatattcctaaaattaacacacattattattgctagaataataaaagttttataaaaaagaaaaaaaaaaaaaaaaaa

SEQ ID NO: 3376 - DNA, 1255 bp, Homo sapiens
ggaggccggggcggggcgggcgcagccggcgctgagcttgcagggccgctcccctcacccgcccccttcgagtccccgggcttcgccccacccggcccgtgggggagtatctgtcctgccgccttcgcccacgccctgcactccgggaccgtccctgcgcgctctgggcgcaccatggcccgcggggctgcgctggcgctgctgctcttcggcctgctgggtgttctggtcgccgccccggatggtggtttcgatttatccgatgcccttcctgacaatgaaaacaagaaacccactgcaatccccaagaaacccagtgctggggatgactttgacttaggagatgctgttgttgatggagaaaatgacgacccacgaccaccgaacccacccaaaccgatgccaaatccaaaccccaaccaccctagttcctccggtagcttttcagatgctgaccttgcggatggcgtttcaggtggagaaggaaaaggaggcagtgatggtggaggcagccacaggaaagaaggggaagaggccgacgccccaggcgtgatccccgggattgtgggggctgtcgtggtcgccgtggctggagccatctctagcttcattgcttaccagaaaaagaagctatgcttcaaagaaaatgcagaacaaggggaggtggacatggagagccaccggaatgccaacgcagagccagctgttcagcgtactcttttagagaaatagaagattgtcggcagaaacagcccaggcgttggcagcagggttagaacagctgcctgaggctcctccctgaaggacacctgcctgagagcagagatggaggccttctgttcacggcggattctttgttttaatcttgcgatgtgctttgcttgttgctgggcggatgatgtttactaacgatgaattttacatccaaagggggataggcacttggacccccattctccaaggcccgggggggcggtttcccatgggatgtgaaaggctggccattattaagtccctgtaactcaaatgtcaaccccaccgaggcacccccccgtcccccagaatcttggctgtttacaaatcacgtgtccatcgagcacgtctgaaacccctggtagccccgacttctttttaattaaaataaggtaagcccttcaatttgtttcttcaatatttctttcatttgtagggatatttgtttttcatatcagactaataaaaagaaattagaaaccaaaaaaaaaaaaaaaaaaaa

SEQ ID NO: 3377 - DNA, 1979 bp, Homo sapiens; identical to SEQ ID NO: 1708

SEQ ID NO: 3378 - DNA, 1255 bp, Homo sapiens; identical to SEQ ID NO: 3376

SEQ ID NO: 3379 - DNA, 1260 bp, Homo sapiens; identical to SEQ ID NO: 78

SEQ ID NO: 3380 - DNA, 1426 bp, Homo sapiens
gtgtggagcagcccagccaagcactgtcaggaatcctgtgaagcagctccagctatgtgtgaagaagaggacagcactgccttggtgtgtgacaatggctctgggctctgtaaggccggctttgctggggacgatgctcccagggctgttttcccatccattgtgggacgtcccagacatcagggggtgatggtgggaatgggacaaaaagacagctacgtgggtgacgaagcacagagcaaaagaggaatcctgaccctgaagtacccgatagaacatggcatcatcaccaactgggacgacatggaaaagatctggcaccactctttctacaatgagcttcgtgttgcccctgaagagcatcccaccctgctcacggaggcacccctgaaccccaaggccaaccgggagaaaatgactcaaattatgtttgagactttcaatgtcccagccatgtatgtggctatccaggcggtgctgtctctctatgcctctggacgcacaactggcatcgtgctggactctggagatggtgtcacccacaatgtccccatctatgagggctatgccttgccccatgccatcatgcgtctggatctggctggccgagatctcactgactacctcatgaagatcctgactgagcgtggctattccttcgttactactgctgagcgtgagattgtccgggacatcaaggagaaactgtgttatgtagctctggactttgaaaatgagatggccactgccgcatcctcatcctcccttgagaagagttacgagttgcctgatgggcaagtgatcaccatcggaaatgaacgtttccgctgcccagagaccctgttccagccatccttcatcgggatggagtctgctggcatccatgaaaccacctacaacagcatcatgaagtgtgatattgacatcaggaaggacctctatgctaacaatgtcctatcagggggcaccactatgtaccctggcattgccgaccgaatgcagaaggagatcacggccctagcacccagcaccatgaagatcaagatcattgcccctccggagcgcaaatactctgtctggatcggtggctccatcctggcctctctgtccaccttccagcagatgtggatcagcaaacaggaatacgatgaagccgggccttccattgtccaccgcaaatgcttctaaaacactttcctgctcctctctgtctctagcacacaactgtgaatgtcctgtggaattatgccttcagttcttttccaaatcattcctagccaaagctctgactcgttacctatgtgttttttaataaatctgaaataggaaaaaaaaaaaaaaaaaaaaaaaaaaaaaaaaaaaaaaaaaaaaaaaaaaaaaaaaaaaaaaaaaaaaaaaaaaaaaaaaaaaaaaaaaaaaaaaaaaa

SEQ ID NO: 3381 - DNA, 717 bp, Homo sapiens
cggaacacgctgggaggagggtggaaggcaacctcggggaaactgggaaaggcggcctggacttcgggaacaccgcgtacctgcgggggcacagccccacccgagcgaacgggctccaaaggggaggtcccgcggtgcgcaccgcgcagagctcagggggtggtgcgcccggcccttctgcggcgcacagcccagcccaggaacgcgggcggtgcggactcagcgggccgggtgcaggcgcggagctgggcctctgcgcccggcccgacctccgtctataaatagagcagccagttgcagggctccattctgctttccaactgcctgactgcttgttcgtctcactggtgtgagctccagcatcccctttgctcgaaatggaccccaactgctcttgcgccactggtggctcctgcacgtgcgccggctcctgcaagtgcaaagagtgcaaatgcacctcctgcaagaagagctgctgttcctgctgccccgtgggctgtgccaagtgtgcccagggctgcgtctgcaaaggggcatcggagaagtgcagctgctgtgcctgatgtgggaacagctcttctcccagatgtaaatagaacaacctgcacaacctggatttttttaaaaatacaacactgagccatttgctgcatttctttttatactaaatatgtgactgacaataaaaacaattttgactttaaaaaaaaaaaaaaa

SEQ ID NO: 3382 - DNA, 2607 bp, Homo sapiens
agccggcgcagggtggccggggaggggtgagcagggtgccgctggctgctggggtctgcaggtcaccgagtccccaggagaggggactcctaagaagccacctgcctgtgtttacccggcagcgagcgcgcaggcccccgcgaactcctggcagcgctcaggaaaggccgttgcgcctcgcgaaggaaacagagccgttgaccatggttgcaactggcagtttgagcagcaagaacccggccagcatttcagaattgctggactgtggctatcacccagagagcctgctaagtgattttgactactgggattatgttgttcctgaacccaacctcaacgaggtaatatttgaggaatcaacttgccagaatttggttaaaatgctggagaactgtctgtccaaatcaaagcaaactaaacttggttgctcaaaggtccttgtccctgagaaactgacccagagaattgctcaagatgtcctgcggctttcctcaacggagccctgcggcttgcgaggttgtgttatgcacgtgaacttggaaattgaaaatgtatgtaaaaagctggataggattgtgtgtgattctagcgtcgtacctacttttgagcttacacttgtgtttaagcaggagaactgctcatggactagcttcagggactttttctttagtagaggtcgcttctcctctggtttcaggagaactctgatcctcagctcaggatttcgacttgttaagaaaaaactttactcactgattggaacaacagtgattgaagggtcctaaaaagggaaaatatataaagattatttcatgattgggtagtaaaactattcagctagtcagctaaagtcatttgtagtttgccccacctgccctaaataagaaaccccaaatgtagtctcttttctttctgtgtttcacattcatagcaactgcagctaacaggctgattttctggcctttggagaagtgattcaaaatagtgtagattttctgcatagatcccatttttgtacagaattgaatgggatggaataggtaagcaaaagtagaagcccatttgagttttacatttgattccacaatttggtttcaggtaggcttggtaatagactatataaaccagatttgcctattttgattttcatatggcttttttttctctaagttttcagaggattttttaaatcacagaatcatactaaatgatatttagcctatcaaaacttccaaaagcccacaccaccagttcctgactcaaatttgaagggtttttagacaggaaggtaggattaagtaggtgagtttaattaaagcttaaccctaggtaagagtaaatgagaaatattacggcaataatggaactgcttcactgtttcttggtgacttcctcactctaatgttttaaagaggcaacaaaagcttgtggtgccatttcagtaaccacggtgttgttttagatgcctttataagctcagtttcccctgttcttaagtgttgaatactgtctttaaactagaaaaatgcaaaatattgaactgatatttttgtgtgtagttgattactcttccattgagtgaatgatgaatacctgtgaggataggaaattagttctgagatctagtccctctctgattcacttagtaatctatcctcttttcagtattacatgtgcttaatctcagatgaaccatttcaccatggcagtgttatctcatctctgggcttttctgggaattgaagtatctctccttaaccccaattgtcaagggtagtagctgtatactaccactttgaattattgaaacgggtcaatttacgaagtctgcattggctatggagatatggtttatagtacagcctagagaatgaaactcaccgtccagataaccatgcatgcacccagattttttccaccttggatacctgtcactagggaataataaaggccttattttttgtcttattccaactaagtagatcattatctctttccttttttatgttaatgagagaatttagcctccactcaacaatgttcaattcagcaaggctttcatatccttgctgtgggtcgtggataaggagcttattcaggtttcctgccctagctattagctccacttcacatgctggagaccggcgtagggacagatgtattcatcctggtgttactgaaaaacaggtgtgatcctgttactgatactataagtgacctaaaatgtcactgttcaaattagccagtgttctaacaaactaaactcttcaaatgcttggaaagatactacaaagccaatctttatagaattgggccaagataaatcaatgttgttttgcatgtctattgttaagctccaaaggttcactgtgtttctgccgctgtcctggagttgtcaccactgactgggcaaggcttcttgggcatcgatgtagaactgttgtcctttttccactaacagttatctttgactctcttgcctgttatgcttacaaaatggtgatggcttatggaaggctgttaaattaatattcctgttaaaggaaattaaagtttgtctatttttgacaataaaacattatatatttttaaaaaaaaaaaaaaaaa

SEQ ID NO: 3383 - DNA, 2033 bp, Homo sapiens
attggctgaggccgataccacgcgccccgatacccggcgcaggagccacctccctgagccccgcggaccacgcctcagtccgcctgcgctcctcagcctgacggtccgcctttcggggctcctcagccttgtcacccgctcttggttttccttttctcttcatctttggctcctttgaccactcgaagccgcgcagcgggttccagtggacctcacagcagccccagaagtggtgcgccaagcacagcctctgctcctcctcgagccggtcgggaactgctgcctgccgccatcatgtctactgcaaatcctgaaactccaaactcaaccatctccagagaggccagcacccagtcctcatcagctgcaaccagccaaggctatattttaccagaaggcaaaatcatgccaaacactgtttttgttggaggaattgatgttaggatggatgaaactgagattagaagcttctttgctagatatggttcagtgaaagaagtgaagataatcactgatcgaactggtgtgtccaaaggctatggatttgtttcattttttaatgacgtggatgtgcagaagatagtagaatcacagataaatttccatggtaaaaagctgaagctgggccctgcaatcaggaaacaaaatttatgtgcttatcatgtgcagccacgtcctttggtttttaatcatcctcctccaccacagtttcagaatgtctggactaatccaaacactgaaacttatatgcagcccacaaccacgatgaatcctataactcagtatgttcaggcatatcctacttacccaaattcaccagttcaggtcatcactggatatcagttgcctgtatataattatcagatgccaccacagtggcctgttggggagcaaaggagctatgttgtacctccggcttattcagctgttaactaccactgtaatgaagttgatccaggagctgaagttgtgccaaatgaatgttcagttcatgaagctactccaccctctggaaatggcccacaaaagaaatctgtggaccgaagcatacaaacggtggtatcttgtctgtttaatccagagaacagactgagaaactctgttgttactcaagatgactacttcaaggataaaagagtgcatcactttagaagaagtcgggcaatgcttaaatctgtttgatcctcctggcttatctagttacatgggaagttgctggttttgaatattaagctaaaaggtttccactattatagaaattctgaattttggtaaatcacactcaaactttgtgtataagttgtattattagactctctagttttatcttaaactgttcttcattagatgtttatttagaaactggttctgtgttgaaatatagttgaaagtaaaaaaataattgagactgaaagaaactaagatttatctgcaaggattttttaaaaattggcattttaagtgtttaaaagcaaatactgattttcaaaaaaatgtttttaaaaacctattttgaaaggtcagaattttgttggtctgaatacaaacatttcacttctccaacaagtacctgtgaacagtacagtatttacagtattgagctttgcatttatgatttctccagaaatttaccacaaaagcaaaatttttaaaactgcatttttaatcagtggaactcaatatatagttagctttattgaagtcttcttatctaaacccagcaaaacagattcaaagcaaacagtccaatcagtgggtcatatgtttattcaaaatattttatcttttagctagaatccacacatatatatcctatttgattagggtagtaattaggataactaaaattctgggcctaattttttaaagaatccaagacaaactaaactttactaggtacataagcttctcaatgagtcaccattcttcttttttgtaaaaacttttttctttgaaatgctaaacttggctgtatgtcaaattgtgcaaaatattggtattaaagaatgctgcaactttaaaaaaaaaaaaaa

SEQ ID NO: 3384 - DNA, 1860 bp, Homo sapiens
agcggagatttacccgagcgtgttgcggcagcggctgggcttgcaaggcgcgatccaagagggatttaagcagcccagagctccagagaaaaagagagcgagagagaaccacacacagagacggcttaagcgtttacccgaattaaatatatatttttaaaaagaactgttgagttttatcattttcgttaagtgaccgtgcgcagcgctgtaactgcaggatggggaagcagaatagcaaactggcccctgaagtgatggaggacctggtgaagagcacagagtttaatgagcatgaactcaagcagtggtacaaaggatttctcaaggactgtccaagtgggaggctaaatctcgaggaatttcagcagctctatgtgaagttctttccttatggagacgcctccaagtttgcccagcatgccttccgaaccttcgacaagaatggggacggcaccattgacttccgagagttcatctgcgctctgtccatcacctccaggggcagctttgagcagaagctgaactgggccttcaatatgtatgacctggatggtgatggcaagatcacccgagtggagatgctggagatcatcgaggctatctacaaaatggtaggcactgtgatcatgatgaaaatgaatgaggatggcctgacgcctgagcagcgagtagacaagattttcagcaagatggataagaacaaagatgaccagattacactggatgaattcaaagaagctgcaaagagcgacccttccattgtattacttctgcagtgcgacatccagaaatgagctgatgtcaatgctatggactgcacaaaagtctcaatgttccattcagtctgcagctattcacacacacacacacacacacacacacacacacacacacacacacacacaaatattgcttggactacctataaatggacttgcttcttgtgtttgaaacactcgtgtgcatgagaatgtcatttgctaatgaattttaaaagcatatataaaacaaaacaaacaacctgccacaatgtgatatgtgtaatatcatttcataaaaatccctcttcctccaaagcctgggcagaaatgtgctgcaaagagttatatgacttcttgttcatgttttgctaatgctcgtatctccttgattacataatgttagtagcactgagacccccatggtaatgtaacttaattataagctatgtcactaccctcctgtaaaatactattggacagacacagagggacccttggctcctgtgtctggtccacacaccacagaagcttgtattatcagtgaatataaatgtactacatttgcatgccttttgggtttgccttaattcttacctcatttgcatcctatcgatctggaaagagctgttttggatgaatgcagtataaaatgtaaaaaccctgctaaatgacttattgattaagtatatctatctatatatacatatacacaaagatattatttatcgaaagtaaaaaagatggaagtgtattggtttctgtttgaattttcaaaggcttccaatgtggtggcaataaatgtcccaaataaatttataacaattgattttccccctaattcttattttataattttaaaattgcagcagttgctagcaacaacttactaaatctactcttaaatatacaactttggaatttgaagaattaatgacaacaaaagggaaaaaagcaactttccaacttttcatccaggctcccaaaagagggacaacgaacatggcatgtgaaaagtaaaacagatttgttcattccgaaaaaaaaatgttcattctatgacaataaattttatctcagtggaaaaaaaaaaaaaaaa

SEQ ID NO: 3385 - DNA, 4071 bp, Homo sapiens
tgggggagccggtgccccatcgggtaccgcacggctgccgcggcggccttaccctgccgcgagcgcctgtgacagcggcgccgctgtgctcgcgaccccggctccgggcctctgccgacctcaggggcaggaaagagtcgcccggcgggatgggcggcgaggctgggtgcgcggcggccgtgggtgccgagggccgcgtgaagagcctgggtctggtgttcgaggacgagcgcaagggctgctattccagcggcgagacagtggccgggcacgtgctgctggaggcgtccgagccggtggccctgcgcgcgctgcgcctggaggcccaggggcgcgccaccgccgcctggggcccgagcacctgcccccgcgcctcggccagcgccgcggccctggctgtcttctcggaggtggagtacctgaacgtgcgcctcagcctgcgggagcccccggccggtgaaggcatcattttattacagcctggaaaacatgaatttccatttcgctttcaacttccatctgaacctttggtcacctcgtttactgggaaatatggaagcattcagtactgtgtgcgggcagtgttggaacgacccaaggtacctgatcagagtgtaaagcgggaactccaggttgttagtcatgtcgatgtcaacacaccagcattattaacccctgtattgaaaactcaagagaaaatggttggctgttggtttttcacttctggtccagtctcgctgagtgccaaaattgaaagaaagggatactgtaatggagaagctattccaatctatgcagaaatagaaaattgttcctctcgtctgattgttccaaaggctgctattttccaaacgcagacatatttggctagtggaaaaacaaagaccattcgacacatggtcgccaatgtgcgaggaaaccacatcgcttctgggagcacagacacatggaatgggaaaacgctaaaaatcccacctgttactccatccatcctggattgctgcattatcagagtggactattccttagctgtatacattcacattcctggtgctaaaaaattgatgctcgaactgccattagtgatcggtacaattccatataatggttttggcagcagaaactccagcattgccagccagttcagtatggatatgagctggttgacactgaccctgccagagcagtctgaagcaccaccaaattatgcagatgtggtaccagaggaagaattctctagacacattcctccttaccctcaaccccctaactgtgagggagaagtgtgctgtcctgtgtttgcctgtatacaagaattccggtttcaacccccacctctttattcagaggttgacccacatcctagcgacgtagaagagagccagcctgtttccttcattctctgaacgtatttcagaaatcactgtgttcatcatcaaattagaatgttggttcttttccttctgcctttttgggagagagacaggaaagattcacttgaaaacataaatgaacgtcaagactgaaggcaatagaaattaaagaatgtgagaaagttctggtgggccggcaggattgccgcacaagtttatatgatggtcgtatatatatccctgttaaaaactgggatgaagatgtgcaaagtcacagaatgtaatggaagtcctgatggttacagagtaagtgaaagggtgcctgcgctgacgtgagagaaaggaatctgtaaacagtggaaacactgtgggagtttcccatggtgttttgaagagtggaacgaaggcgatatgaactgaaggggtgaagacttgattttggagagggcaacaaaacaagggtgtgtgtgcataggagaatggcccactccaaatacgaagtgagatcctgagtctttgggtgcttcatgatttcctaccatattcaggcctaaagacattgaaaaagcatcttttcttgagatcatggtcatatgaggtcctaatgaagtactacagttttcattctttcaagggtagactaaaatatagtttataaatcggcagtacagtattatgaaaccaagaaagggtttcttgaaaagcttgtcggttcaaagaggaaagatgaatttcaatgtgaaaacacgttttgttgagggctgtactttttaccccctttaagtgctttaacaggatatacgtttgattttcctcatatcttatttacctaggagcatgtcagagaaagaagggagagaaaaggttgcatctgcaggatgccttgataactacacagtcccaaataaaaggcctttttctaacctacctctaatggggttatcagatatgtttttaaatctctcgccctgagtactcttcttgggagttgctgctgtttacagccacagtctcatctatcactaaatatgaaactgggccaaggggaaaattcagtaagttagcgttaaatggaagtaaatatatgtatacctaagagaatgtcaaaataaacaccaaaccaaaagaaggtaggagtgccatttttagaaaagacacaactttaattcctgtcaagagacctaggtctactgatggcagtcactgcattgtacattattccagttcttcagtaattctgtttaaactgtgattttctttattgtgttggtgcaatattttattatcatttaacctcaggatattcagaccaacaggattgtgttgctgctgaaagtctgagcagtgttttaccgtccccagcccccctcccacatggtcacatgttcacttgcttttccttccatctgttggttttgtgagctgagagcatctctggacacatggaagggagccagggattcctgtgatacagattttgaaccagcagagtactttggttttcttcatgtcctaagggtttgatccagaaaccctggtgcttcccctgcagaatactgtacttcatttaacagaatgattgatttttctttcaatcagcatgttcaccaaaaatagaaaagttcttctaaggttaaattttgtatttaaaagttagttggccatttgatcagggaattttctacacacattaggcaaatgtatgcttttcatcctctgggcttacctctctcctctgcaatcctggaagcattgtgcatagttctttcattgtaagccgctatttaaattcccacaatgcaaaactgttagaccagtaattgtgctactgaaattgtcacaaaacgttattccttgatttggtttttaaattttgcttttgtgtgtgtgtctttaaacaggtaatgtgtatttaagtgttgtctaaacagttgatttttactttagaaaagatcatcttcaactgtttattgacttctgagttatatagttcatgccctgccaaggcattgttcgactccatgatactaaaacataatgaaagaaacaaactccagtatggagaagagaaagtttaattatttggttccatctagaaaagcaacaacttaaaggaatccttcactaggattgtcttatcacctttattagataaatcatgtagtgtccctgtgaaattgaagtgaaactatctctgtaggacttaagagaatagctaaaaggtgtgacttgccttattgaactgatactggcatatctgactgtaagcagtaggttgaagatatcattttatgaatgtggagaattctacattgaaacagaaaatacctgggaatgaagattaaaaatgtagctgctgttatttgcttggtgattcccctcttgctcttctttagtttgaaaaaacaaaaacgtggccttggaattttcattttgatgcagaaattttgaaattgaaaatgtgcatgttttggtgcacaaaatccttctgtgggcaaaactttgtttttgttttgcacagtaagaaacaataggcaagcgttatgtttttggtaagttaactatgaaagctttcttatttttattattaaaaatgtaacaatttaacccacaggaaaaaaaattactttgtatgcttgtttgaaccctatgggttcgttttattaataaaattattacacaaaaaaaaaaaaaaaaa

SEQ ID NO: 3386 - DNA, 1304 bp, Homo sapiens
ggtaaggaagtggaggattaaatgatttgcccaaagtctcacagtaatttgtagagctgagattgaaattcgggtgaaacttcacatatcacattctttttatcagatggcagtttctggatttactcttggtacctgcatacttctgttgcacattagttatgtggctaattatcccaatggaaaagtaacacagtcatgccatggaatgattcctgaacatggtcatagtccacagtctgttcctgttcatgacatttacgtgagtcagatgacattcaggccaggagatcagattgaaggtaccgtgctgggattaactgtttacattttggatttcactcttttactgtttattgaatctttattattacttgatttagaagatttcacttaaatctgttttcttttgtaagatactatcatacttcttatttttggttccagatgactgtattacttaagtagtctgtgtattccccatccagaacaggctttaaaataagtttttatcgttatttactatttttattaattgtgctatcacttcaagagaagagaaaaatgaagtttattttatcttgtttaaaatataataaacccttgtccttcttgatatcatataattttaagaacaattctctaatttctctggtaaaatgtaggctgattattaaagataaatctataacagcattttgcaaactattttttgcaactctagaaatgcaaaatgttaacaggtactctgttacatagagagtatatagaaaaataagtttggaatattctgtgtgatatataatataccttagagttcacactgtacagtaggatattaaatatcctaagaaatttgcagtaaagaaacaagtatttactttcatccagtgtttttctttttttgtaattcaataagaatttattgagtgtcactgtgagccagacactgtgttaaatactgcaattcaaaagaaaacacctcatgttttttcctctaatgaggtcaagtaaacattttttttttaaacttttattttgggttcaggggtacatgtgtaggtttgtttataggtaaattccatgtcacgagggtttggtgtacagattatttcatcactcaggtgataagcatagtacccaattggtatcatctagcattttccaaactaacttagccttatggactgcccctggaccatcacctatttttcttttctctttgcggaatggctattaatatctcacagattgaatatcttatggaacactggaaaaaaaaaaaaaaaaaaaaaaaaaaaaaa

SEQ ID NO: 3387 - DNA, 3913 bp, Homo sapiens
gaggggtctttagattctgggaaatgtctgattggcagatgttaaaagggattccttggtaatccagtgcatcaatgagctgcagaaattcagcccaggactgcaagaattcaggcatgaggacactctgtacaggaggctcacacaggcagacccaagatggacataaccttggaatctctgagacacatcattgcccaagtcttgcctcacagagatccggctctagtcttcaaagacttgaacgttgtgtcaatgttacaggaattttgggaaagcaagcagcagcagaaggctgcattcccaagtgaaggtgtggtggtctatgagtcactgccagctcctgggcctccctttgtgagttacgtgaccctcccagggggaagctgttttggcaactttcagtgctgcttaagtagagccgaggccaggcgggatgcagctaaagtggccctgatcaactccctcttcaatgagctgccctctcgcaggatcaccaaggaattcattatggaaagtgttcaggaagcagtagcctccaccagcggcaccttagatgatgcagatgaccccagcaccagtgttggggcctatcactacatgctggagtcaaacatggggaagactatgctggagtttcaggagctgatgaccattttccaactattgcactggaatggaagcctaaaagcccttcgtgaaacaaagtgttcccgacaggaagtcatctcctactattctcagtattctctagatgaaaagatgcgcagccacatggccctggactggatcatgaaggagcgggactcaccaggaattgtctctcaagagctacgaatggccctgaggcagttggaggaagccaggaaagcaggacaagaactacggttttacaaagaaaagaaagaaatattgagcttagccctgactcagatctgcagtgaccctgacacttcctcacccagtgatgatcagctgagccttacggccctgtgtggctatcactagcaaggccaagccccgggtaccctcagtgatggcagaggccagattaacattaggaatctcagtgcagaggtcctcagaggctccagcatctctagtactacctgaaggctctcctaaccctctccacacattccatttacagagtatgagagtcgtaggacccttacaagacccaacaagccactcgatgcatttttctatcacattctcaatagttccagctcaggatgaaaggatagacacaaaattgtttgaaaaacattttccaggcctggctccaacctaaagcctgactgtcacgtgccttgcttgattttatatatattgtttcaagaatagtccaatatagcattccccaaatgaacagcagccagaattaggtgaagtagcatgatagcagtgtttaaaaatacttaggattaaataaataatatggattgttttaaaaaatatccaaggatcagagtctctttctaagctttgtaagctaagcaatagtttatgtcctactagatacactgcaaactacagtggggattttatctggacatcccaccatcaaagatcttgaaatagtaatagtatgaaaatactagataaaattaatgtttaaaatgtttttgtaacaataatttttaaaacccacactcttccatatatggggataaatatcacctagaaaagtagcctcactcttattcctcaagaattaatatccaatgtttatgagtcttgcaatcaattttgttcatttttaatttgcaaatcgataacctgaactaatttgttcttattttttgccactgcaaacatatatctacagagagaaaaattaatggcattttaaaggttaaaacattttgaaaaattattagcatgtaacaaagaatgcttgcatttgattagtttcaccagcatttgagagaaggaccctttagctctgtttgttgttcaagaacataagcaaccagtagctcaaatgtagtatcattattaagtttaagtcactggaatcttctttaaaggaaggataagacattgccatctctatttaactcatccatatgggtcaatcaactgattagaaaatcaaaaaacaataaaaacttttttttttttttttttttagtagagacgggatttcatcatgttgcccaggctggtcttgaactcctgggctcaagccatctgcctgcctccacctcccaaaatgctgagattacaggtgtgagccaccatgcctggcctaaactaatttttagatagttcctggtcactcaaatttaagaatgtcagcaatgtcaattttaaatgctcataggtctttccatatctgtaacatgaaaatgattattctgcattttattcagtagtccaaattaaagaaaatgtttttctcaatttaaaataatttctttttcttttgtttatgcaagtgcatacatgcttcactgaaagcaaaaccattataattacattaaagtttataaaatatgatattttaacctcatatctaataagtatgtacaaaggtaaccatcactccttaaatccacatgaaaactactgtaactgatcatgtattttggaattagacttgataataaaagattatcatgtatcacatatctcacaccaggggaacaattagctacataattgtcataccttaatatcttttaaaggtaacagtaattttcaacacattttattttaaaatattattttaacaaaagttacattcctctccacaatgaggctaaatgtcacccacgaaagaactttattcccttatattcctgaaaagaaatcagaattaacatttttatgttgaataaattttaaaatttaggaaatgttctatttaaagttaatttctttcataaagccattactctttacattgtcatttccaaaaagccacaatttcccatgctggatgtgatgaaagttaggcacacctttactgcattagcagcctttgacaatgacttcctcaaactgacaccatcttaattagatgcagggacagggatcagatgggacaatatcaaatttactttgtgccctacaagttaaaaactgcacccattctgtaaattgaatatagaggttctcccttggccactgtcagcttttcttgactggccaaaactgcccattcttcctggaatggtatgaaagcttcagcaaaataaataaaagtcagaatctttgctggtccctttaatgctgatttgatagtaaatcaatttcagctgagacataagggctgtcagtctatcatataaacatctttaactatagcctagagaaaagagggttgaagagcaaagcagattttttttttccttttctatatcttgttctgaacaacacactgtgataaaggggactagagtggaagattccctatttaaacacatgaagctctgggtcctagccttttttggttataagccctttgagaatctgataaaagctgtggatcatctcctaggaaaatagaacaaaacatacatattcacattacacagttccagagtatgtggaccccccaaagtccagagattgccctaggggatctttagattcttgtttagaactgttgattttgaacacaacatacactgtcaaactttacatcagggatccaacataactcagacatagcccaggtagcctgtttctaacacaactgtcataatcctgaaatccaaaattgcactgtgtttgacatgagatagtttaagttccacaaaatccaaatttaccatattattgtttttaaaaaagcagtttagagcaaactgtcactaaacttggataaatgggtcagaaagtacagatttaataaagtcgtacctctaatgttcaaaaaaaaaaaaagaaaaaaaaaaaaaaa

SEQ ID NO: 3388 - DNA, 1271 bp, Homo sapiens
cgttactcactcttcctccttcccctcctcgccgactcccgggctctgggcccctgggggagggaagaggcctcctatctactcctctgccccagtcccctccttgcgtcagtcccagtgagggataagcgcctggcggaaggcgcagggaggtgtttctctgcttcaggagtgcccgccggcccttgcagctgctggaagacccatttatctcatgcttcttgttttctttggggacctgcaggggaaggaagcagggtgacggtttggtatccccacctaagaccctcccctttcccctgaggccagccgtcagcccctggcagggggtcttggaagccagaggtttttgctcagggcagggaaagggctgcaggatccccgggggctgccggaggtcggtctcactgacatcatggctgaccccagcatcgcctggtcccacagatgtcgccctctggtcgcctgtgtcttcttaccatcgttggcctgattctccccaccagaggacagacgttgaaagataccacgtccagttcttcagcagactcaactatcatggacattcaggtcccgacacgagccccagatgcagtctacacagaactccagcccacctctccaaccccaacctggcctgctgatgaaacaccacaaccccagacccagacccagcaactggaaggaacggatgggcctctagtgacagatccagagacacacaagagcaccaaagcagctcatcccactgatgacaccacgacgctctctgagagaccatccccaagcacagacgtccagacagacccccagaccctcaagccatctggttttcatgaggatgaccccttcttctatgatgaacacaccctccggaaacgggggctgttggtcgcagctgtgctgttcatcacaggcatcatcatcctcaccagtggcaagtgcaggcagctgtcccggttatgccggaatcattgcaggtgagtccatcagaaacaggagctgacaacccgctgggcacccgaagaccaagccccctgccagctcaccgtgcccagcctcctgcatcccctcgaagagcctggccagagagggaagacacagatgatgaagctggagccagggctgccggtccgagtctcctacctcccccaaccctgcccgcccctgaaggctacctggcgccttgggggctgtccctcaagttatctcctctgttaagacaaaaagtaaagcactgtggtctttgaaaaaaaaaaaaaaaaaaaaaa

SEQ ID NO: 3389 - DNA, 2529 bp, Homo sapiens
aggaagtgagaaagttggcacagtcacgccgggcttcgcaggaccaggtcactcagtgacagatggacaatgcaagaatgaactccttcctggaataccccatacttagcagtggcgactcggggacctgctcagcccgagcctacccctcggaccataggattacaactttccagtcgtgcgcggtcagcgccaacagttgcggcggcgacgaccgcttcctagtgggcaggggggtgcagatcggttcgccccaccaccaccaccaccaccaccatcaccacccccagccggctacctaccagacttccgggaacctgggggtgtcctactcccactcaagttgtggtccaagctatggctcacagaacttcagtgcgccttacagcccctacgcgttaaatcaggaagcagacgtaagtggtgggtacccccagtgcgctcccgctgtttactctggaaatctctcatctcccatggtccagcatcaccaccaccaccagggttatgctgggggcgcggtgggctcgcctcaatacattcaccactcatatggacaggagcaccagagcctggccctggctacgtataataactccttgtcccctctccacgccagccaccaagaagcctgtcgctcccccgcatcggagacatcttctccagcgcagacttttgactggatgaaagtcaaaagaaaccctcccaaaacagggaaagttggagagtacggctacctgggtcaacccaacgcggtgcgcaccaacttcactaccaagcagctcacggaactggagaaggagttccacttcaacaagtacctgacgcgcgcccgcagggtggagatcgctgcatccctgcagctcaacgagacccaagtgaagatctggttccagaaccgccgaatgaagcaaaagaaacgtgagaaggagggtctcttgcccatctctccggccaccccgccaggaaacgacgagaaggccgaggaatcctcagagaagtccagctcttcgccctgcgttccttccccggggtcttctacctcagacactctgactacctcccactgaggcggctccagccccagacaacagcccaggcatctccttgggctgggacttcttacccaaagcacatgcttagcttatctttctttccatttacagtctctttcttcctttctaatcctatctggggagctcctggccaggataatatatttgcagataattctggaccagagacttggtgcggggttaacaccttcatccagattgggtgccagcatacattttctggtgggccttaacatccctcctgcttttaggagaattcacagaacctactgttcctttcagatgaccttttggaaaatagttccctttgccaacagaaacatgccagaaggaatcttctcatcttttatctaactatatgtacagctctcccctcccttgtccttgaaagtaggatatagcgaaaggcgagtccaggagctcaggaagaagagatgcactatatgtttacacaattaattcatcccttaatttaagtcattttcatgtgtgtgagtttgctggttgtaaatactttgtcctaagagatttatctttatacagattttctagaaatgtttaggttactaaaacagggtgggcaaactctctaaactggtacaattttataggtgaaagaaaaaattccctcatttaaacccaatcagatgcctcagagggtagccttgatttgttcttacagttaagaagccctgcagagcacaaacttcagaaacccggcttcctgtgctaagtctttcccaatctctacccctttcttctcgggccaccctctgtttaaaatttgtgctgggttattcagaacctaaaagtattattcaaaccaatttcttccttccacagttatcttagctggatataatgtattttcagctcaattgttaatgtgatggatggcacaatgaatgtatattttgtgttattcgtgaatagtcttttgcatgtcgcacaatgtttgatgtccccaaagtaccacactgagttctatcagttatcctttgtgagcctatgatattccccatttcctgtacaatcatgaacagctctgagatcctggagtgatatgatccagagcagagtttacgggtcttaggatgtctgtaataaataaatatactcaagtttcaggtatgcttaagcatccgtgtatttggctgggctacaatttgttaattcctatgaagttggcacatttcatgaggggaaagggagaagggtggtaaatattttcaaagagatgggccttttcttgaataaaagttaataacagctcctttattataatcaaagctcataatggaaaaaaagactgatgaagaaatttatgaagcagatttatttttgaaacaaacatggatacttcctgggtcaagtgctaaccttttcacctccaactggatgttgacgtatatataaacagaactcccttcaaaagccaaaaaaaaaaaaaaaa

SEQ ID NO: 3390 - DNA, 2527 bp, Homo sapiens
ggttacttcctccagagactgacgagtgcggtgtcgctccagctcagagctcccggagccgcccggccagcgtccggcctccctgatcgtctctggccggcgccctcgccctcgcccggcgcgcaccgagcagccgcgggcgccgagcagccaccgtcccgaccaagcgccggccctgcccgcagcggcaggatgaatgatttcggaatcaagaatatggaccaggtagcccctgtggctaacagttacagagggacactcaagcgccagccagcctttgacacctttgatgggtccctgtttgctgtttttccttctctaaatgaagagcaaacactgcaagaagtgccaacaggcttggattccatttctcatgactccgccaactgtgaattgcctttgttaaccccgtgcagcaaggctgtgatgagtcaagccttaaaagctaccttcagtggcttcaaaaaggaacagcggcgcctgggcattccaaagaacccctggctgtggagtgagcaacaggtatgccagtggcttctctgggccaccaatgagttcagtctggtgaacgtgaatctgcagaggttcggcatgaatggccagatgctgtgtaaccttggcaaggaacgctttctggagctggcacctgactttgtgggtgacattctctgggaacatctggagcaaatgatcaaagaaaaccaagaaaagacagaagatcaatatgaagaaaattcacacctcacctccgttcctcattggattaacagcaatacattaggttttggcacagagcaggcgccctatggaatgcagacacagaattaccccaaaggcggcctcctggacagcatgtgtccggcctccacacccagcgtactcagctctgagcaggagtttcagatgttccccaagtctcggctcagctccgtcagcgtcacctactgctctgtcagtcaggacttcccaggcagcaacttgaatttgctcaccaacaattctgggacgcccaaagaccacgactcccctgagaacggtgcggacagcttcgagagctcagactccctcctccagtcctggaacagccagtcgtccttgctggatgtgcaacgggttccttccttcgagagcttcgaagatgactgcagccagtctctctgcctcaataagccaaccatgtctttcaaggattacatccaagagaggagtgacccggtggagcaaggcaaaccagttatacctgcagctgtgctggccggcttcacaggaagtggacctattcagctgtggcagtttctcctggagctgctatcagacaaatcctgccagtcattcatcagctggactggagacggatgggagtttaagctcgccgaccccgatgaggtggcccgccggtggggaaagaggaaaaataagcccaagatgaactacgagaagctgagccggggcttacgctactattacgacaagaacatcatccacaagacgtcggggaagcgctacgtgtaccgcttcgtgtgcgacctccagaacttgctggggttcacgcccgaggaactgcacgccatcctgggcgtccagccagacacggaggactgaggtcgccgggaccaccctgagccggccccaggctcgtggactgagtgggaagcccatcctgaccagctgctccgaggacccaggaaaggcaggattgaaaatgtccaggaaagtggccaagaagcagtggccttattgcatcccaaaccacgcctcttgaccaggctgcctcccttgtggcagcaacggcacagctaattctactcacagtgcttttaagtgaaaatggtcgagaaagaggcaccaggaagccgtcctggcgcctggcagtccgtgggacgggatggttctggctgtttgagattctcaaaggagcgagcatgtcgtggacacacacagactatttttagattttcttttgccttttgcaaccaggaacagcaaatgcaaaaactctttgagagggtaggagggtgggaaggaaacaaccatgtcatttcagaagttagtttgtatatattattataatcttataattgttctcagaatcccttaacagttgtatttaacagaaattgtatattgtaatttaaaataattatataactgtatttgaaataagaattcagacatctgaggttttatttcatttttcaatagcacatatggaattttgcaaagatttaatctgccaagggccgactaagagaagttgtaaagtatgtattatttacatttaatagacttacagggataaggcctgtggggggtaatccctgctttttgtgtttttttgtttgtttgtttgtttgtttttggggggttttcttgccttggttgtctggcaaggactttgtacatttgggagtttttatgagaaacttaaatgttattatctgggcttatatctggcctctgctttctcctttaattgtaaagtaaaagctataaagcagtatttttcttgacaaaaaaaaaaaaaaaa

SEQ ID NO: 3391 - DNA, 2462 bp, Homo sapiens
gctctgaccgactggtcccctaaacggtggcggcggtttttggtcgttgggccccgggatttaggaccaacatttgaagacccgaaggggaactgcaaccatgaatgaagaaaatatagatggaacaaatggatgcagtaaagttcgaactggtattcagaatgaagcagcattacttgctttgatggaaaagactggttacaacatggttcaggaaaatggacaaaggaaatttggcggtcctcctccaggttgggaaggtccacctccacctagaggctgtgaagtttttgtaggaaaaatacctcgtgatatgtatgaagatgagttagttcctgtatttgaaagagctgggaagatatatgaatttcgacttatgatggaatttagtggtgaaaatcgaggttatgcttttgtgatgtacactacaaaagaagaagcccaattagccatcagaattcttaataattatgaaattcgaccagggaagtttattggtgtgtgtgtaagcctggataattgtagattatttattggagctattcccaaggaaaagaagaaagaagaaattttagatgaaatgaagaaagttacagaaggagttgtagatgtcattgtttatccaagtgcaactgataagaccaaaaatcgtggttttgcatttgtggaatatgaatctcacagagctgctgctatggcaaggaggaaactaattccaggaacattccaactatggggccacaccattcaggtagattgggctgacccagagaaagaggtggatgaggaaaccatgcagagagttaaagttctttatgtaagaaatttaatgatctcaactacagaggaaacaattaaagcagaattcaataaatttaagcctggtgcagttgaacgggtaaagaaacttagagattatgcttttgttcactttttcaaccgagaagatgcagtggctgccatgtctgttatgaatggaaaatgcattgatggagcaagtattgaggtaacactagctaaaccagtaaataaagaaaacacttggagacagcatcttaatggtcagattagtccaaattctgaaaatctgattgtgtttgctaacaaagaagagagccacccaaaaactctaggcaagctgccaactcttcctgctcgtctcaatggtcagcatagcccaagtccgcctgaagttgaaagatgcacttaccctttttatcctggaacaaagcttactccaattagtatgtattctttaaaatccaatcattttaattctgcagtaatgcatttggattattactgcaacaaaaataactgggcaccaccagaatattatttatattcaacaacaagtcaagatgggaaagtactcttggtgtataagatagttattcctgctattgcaaatggatcccagagttacttcatgccagacaaactctgtactacgttagaagatgcaaaggaactggcagcccagtttacattacttcatttggactacaatttccatcgcagctcaataaatagtctttcccctgttagtgctaccctctcttctgggactcccagcgtgcttccttatacttcaaggccttattcttatccaggctatcctttgtcaccaacaatatcacttgctaatggcagccatgttggacagcggctatgtatctccaatcaggcctccttcttctgaagaaaatactaacattagtatgaaaatttgtgtaaatttgtagtatgaaaacttgcaaattaaaatattgttttattttagaatcgggtttgcatatttggttttaaaaaggtatttattccaaagtactaaacatcagctataattcagaataacatggagttgtagaatttataaaaatgcaaagtttaaaaagttattcagtggtttctcttgataaaggtacagcaaactactattctttttaaacttctaggattttcttctactttctgagtgggcaatagaacctagtcatttatgttttttttttttttgcataattttactaaatagtatttcacaaatattaaagcacttgaagacaatggttatagtagatttgattaccaaggatcactatctgtactggagattagaacaattatatgaccagaagcatctaaccattatgtaaaaagaaatgatgagacaaaaagattaagatacaaattttgtgcagtactaaagaaaaagcagtctaccattgtggtccttgaaaataactatagatatttttgttatttgttagacacaaattataattttgttgttaatgtatttaagcattttatagttatgctttgtgtttttgatattctttgtattgttaataacaagtgttatgggtttttaatgttgaaatcatgtgttaatttttgtacttgaattcaaattttttgacattaaatatgtgatgcttctaaaaaaaaaaaaaaaa

SEQ ID NO: 3392 - DNA, 1708 bp, Homo sapiens
gcatttttggtcgaagagagctgaagtaatgagaagacatcatggaggcccagtcccacagctccacgaccactgaaaagaaaaaagttgagaattccatagtgaagtgctccactcgaacagatgtgagcgagaaagccgttgcctccagcaccacttctaatggtgagcagcacagggattaccagcagcccagcctggagtcatttctgtgttctctgcattccttgtgaattgagcgtttgcacctggaccagtgtttgttctaggagacgctaaagaaagcaaatggagcaggggcggggggacggcggggggacatggaatgtagtaatctctattttggcactcaacctacacgttgacttccaaactttctaatttgagatgtaaatgtgataggttatttattatcagaagttcctgttttggcattttggaaatcatcttgactagtctggcaagagttcaaaatgctttgtgttgcatatggatcatctacactactcggaataattagtacaaaagacacaaaagttgtcttgtcaaaattagtgacaggacagcagtctcctccaaccccaactttaagtagtctactttaaaggattttaagaattgttaatgactgaacctcaaggtaatgttagtatctgagatgcaggttttgttgttagcttataaaaatttaatttacttatttgtgttcagagataacacagagccactgtttctgtattctgtgtttttaaagtttaagcaaagtgttgagaggcatttcagttcaagcatggagtgttgaaaataaattccagagcctccctggtacaaacagactgaatatgttaatggtaaccttcacttcctgtccctgctgtttctccattgtgggccactaatgcctttcctttttgtagatttcatagccattcttggcctccctgaatttctctgcttttccatgggcctttaggaagaatgagctggcccgttttcctcgttcctggacactgcctatctgggcacactgatttgtatgagccaacctgctattcttatattttctatattccaagacaggttttacttgattgatttacaagtttttacatccacctagagagtcagaatctcctttggaaggtaactgcagtccagaacattagactctaagggcatatacttccaagcagcctggccacttctctctgggtccctccatgtctgctgagagcctgtgcttctcacctgcacttcttcacccggtttcatgagtgtgctttgctgactgtactgggtagggaaggagctggctcttaaacctgctggcaaatgacttcagttttaaattgatcctgagggagatatatttacgtctgagttaaaataatgaatttacatatatgtgaaaatatttcctcctttattgatggtatttaaagtcaagactggagcttattttaattgagccagaatatttgcatttttcatccaatgtggttatagaaggcatttctccttagaaatatgttaccttggtttcttttttctggaattggtaaaatttaggcaaatttattatttcagaaatagaatcagtatatgcagtgttggttatttggtaatttttatggtaattctgtcggaataaatgcttcctatgtacttggcttcaggaaaaaaaaaaaaaaaaaaaaaaaaaaaaaaa

SEQ ID NO: 3393 - DNA, 5364 bp, Homo sapiens
agttgggagagaggagttgggctgtgccggaggccgaggaccgagagggctcaggtgacccctggaaagcctgggtggctggaaaggagcctagcgcctgcatgaaaggaagaacctgctgggaagtacctgagctcgagctgtgggttccgccgcacttcccctgcgtggtggcttggtggccgcgtctgcgcctcagccctgagaatccggatggcggtgaggtggacttgggcaggcaagagctgcctgctgctggcgtttttaacagtggcctatatcttcgtggagctcttggtctctacttttcatgcctccgcaggagccggccgtgccagggagctggggtcaagaaggctctcaggcctccagaaaaatacggaggatttgtctcgaccgctttataagaagccccctgcagattcccgtgcacttggggagtgggggaaagccagcaaactccagctcaacgaggatgaactgaagcagcaagaagaactcattgagagatacgccatcaatatttacctcagtgacaggatttccctgcatcgacacatagaggataaaagaatgtatgagtgtaagtcccagaagttcaactataggacacttcctaccacctctgttatcattgctttctataacgaagcctggtcgactttgctccgtaccattcacagtgttttagaaacttctcctgcagttcttttgaaagagatcatcttggtggatgacttgagtgacagagtttatttgaagacacaacttgaaacttacatcagcaatcttgatagagtacgcttgattaggaccaataagcgagaggggctggttagggcccgtctgattggggccactttcgccactggggacgtcctcactttcctggattgtcactgtgagtgtaattccggttggctggaaccgcttttggaaaggattgggagagatgaaacagcagttgtgtgtcctgttatagacacaattgattggaatacttttgaattctatatgcagataggggagcccatgattggtgggtttgactggcgtttaacatttcagtggcattctgtccccaaacaggaaagggacaggcggatatcaagaattgaccccatcagatcacctaccatggctggaggactgtttgctgtcagcaagaaatattttcagtaccttggaacgtatgacacaggaatggaagtgtggggaggtgaaaaccttgagctgtcttttagggtgtggcagtgtggtggcaaattggagatccacccgtgttcccacgtgggccatgtgttccccaagcgggcaccatatgctcgccccaatttcctacagaatactgctcgggcagcagaagtttggatggatgaatacaaagagcacttctacaatagaaaccctccagcaagaaaagaagcttatggtgatatttctgaaagaaaattactacgagagcggttgagatgcaagagctttgactggtatttgaaaaacgtttttcctaatttacatgttccagaggatagaccaggctggcatggggctattcgcagtagagggatctcgtctgaatgtttagattataattctcctgacaacaaccccacaggtgctaacctttcactgtttggatgccatggtcaaggaggcaatcaattctttgaatatacttcaaacaaagaaataaggtttaattctgtgacagagttatgtgcagaggtacctgagcaaaaaaattatgtgggaatgcaaaattgtcccaaagatgggttccctgtaccagcaaacattatttggcattttaaagaagatggaactatttttcacccacactcaggactgtgtcttagtgcttatcggacaccggagggccgacctgatgtacaaatgagaacttgtgatgctctagataaaaatcaaatttggagttttgagaaatagagcacaacagcactttcgtcatgagctgacagtagtgtcaagaaagtcaaagagccttaagagcctcagtgaagattgtattttattttatcaaaagccacctagcagtcatctgtggagcactggaaagctggggttcattttggtatatcacactgaaactgggtacccagagtgctgctgtttaatatttcacaatgccttacttattggttgttttatataagagttttgtcaatatggtctcttcttaaaagaagttgactatgaattgaaacacacaaaacatttaagtgccagacttaatattaaagaatgtaaaggtccaagtaaaatgaggtatgatttatgttgatgtgtaagttcaccgcacatcccactttttaacaaaactcatgaatgtgcagtttgagccattgctattttgattacatagaatttgtatttcttttttagccagcacattaaattttagattttattttttaatctaatttttttctaatcaaaaagaaaattgagcttaaggcaaaaggcctggttttagagatatgtgtaattggaagagggcatttgtttgagtgtgagtttggaggcctttttaacatgcagacatacccatatttaaatgaaatggggagatatttacattccgtactttgtaaacttgagctattggacttcactgatgtatatattaatacctcagattcctctgattttgtaagctgtcttctctgtgaacgtgtttgtgtgtgtagggcattttctgattgcacttccttaagttatgaatgtactagaaagggactcatccagaatactatgcctccctttgttaatgcttaatcatttaaagtaaacacaattgaagcctctctgaagttaaacccaactatgtttattaaaatgtgtgaaactgaaagtgggctaggttctaccaaggctgtggaactctcctacgagttctgctgatcaggaaatttaagaatttatcttaaaaatgcaaggaaaaaagactgccttggcaattgtgaatggtgctttcaatctcctagcaccgagcctggcacttaggcagctttcagtaagtgggtgaatgaatgactgaatgaatgaatgaatggctcagctgaggaatgtaactttggtcaagttattatgatgtgtttgggcttagttttctcattggtaaaatgtgggtgctggattggatcttaaagatcccttccagctctgaaatgctgattgtacagtatattcttcccagattgactcactgtgcaatctttacaatactttttatcttttcacttttgacataggtaatgttgttgagcagttgagcaatgttcagtccagttgtgaagctggagaagagaaatgggttttaaaaattaagtgaggggaggccgggtgcggtggctcacgcatgtaatcccagcactttgggaggccaaggcaggtggatcacgaggtcaggagatccagaccatcctggctaacatggtgaaacctcgtctctactaaaaatacaaaaaattagccagctgtggtggcgggcgcctgtagtcccagctactcaggaggctgaggcaggagaatggcgtgaacctgtgaggcagagcttacagtgagccgagatcgtgccactgcactccagcctgggcgacagagcaagactctgtctcaaaaaaaaaaaataataataaaataagtgagctgaactcacctgaagtggtttacttctgtgggttaagaagttctagtcagtgttcatagtcgtttcgttttgataattgttgaaccaattttgtttttaaaacctttagactctgaaagtaatattttgactaagaatgtaaatatttccaaactaaattactcgggaagtaaacgctttttttaaaagtatttttactggttttataccaatattatatgcagaaatcacaggatgaatttagaattaaatctcaattagttcactttggcctagatttatgaaaaatgcatgcctcgtaaagagtccactgtattcacgagtaaagttgcttttagtgttcacttgatgacttggagagtaggaattttgcaaaatctgaatttaaggaaattctttaggataaccatttcaaaaaataaaattgctatgcaatcttgaatattttctcttttgcctcgtaaaatgaaaatgcattcacagtttctgtaaattatttagcagccttaaagtttatcaaaaaattgtccagattccacgtgcagcatgcttggccctgcatttaatttaagaaggattaataataatgctctgaatttttcgaaagggattctcctaaacccacccacttctcttgcccaggctgctttttaaaaatatttttttattttttacttatttttaaattttctctttttatttatttttggttttcttgttagccacctgttatatgggagaacgaaaattgttatattttgaaagtacttattacattatttttattttagtatcttgatgctcctgtcaaaagggaaatgaggcttttaaaaataaagtaccttaattctttattgactttttgccataaattgctaggtgtgacccagcaatcttttaggaagagattttacagtggtgctttatttatatcaataatccagtatagttaggctgttcattcctcataatagagtacataacagaaaagtgggactttcacattttcatatttaggcacgttccaatttaattccaaaaatactctgtaattctacatctaaaaaaaccgattccctaattcgaatttattggtaccaaagctctctttggctatagacaattaagagttgaccttttaagttaatgtatatgcttaaaaacagttttaggaaaatatttggtagacaaagagtttcaactttaaatgttcactatgtcatttagtgtccaactttacggataggttgactatctaaataggcatttttagtcattaaaaaaaatctagtcaccaggaggatccctataactcaaaataacttgtttgtaaaagaaaatttgtttacttacccattagtaagttcctgcatattcattataagatggcaaatcaaacttttctaggatgaagacagcttatttttaagttgtatagtcttagttggtttagggtctcaattttaattaataaaatacttggtttttatttgcttgtccttttgaattcctgttttaataattttaaaatgagcacaaagaacgttgaagttcagattaatctcttctgaatgatgtttttttcctctgtgatgagttgtttctgacttttttccttttgtatttgtaatgttgattaagatgtaaaataaaaagtgtgcctgattatttttgcaaaaaaaaaaaaaaaa

SEQ ID NO: 3394 - DNA, 4122 bp, Homo sapiens
aggaggcgacagctgccagccgaggaggcgcggcggagaggggactgcggtcagctgcgtccacttggggctgtgcggcggtcccgcgcccggcgatgttcccgggcactccctgagtagcggcagcttatcccccgcccgctagcccgccctggtccccggctcgctcgctggctggcgcggccccggccccgctctgcgtcggccccgccgcggtggaggcgcgcgagggggacgcggccggggatgagcggattgcgggtgaactcgccgccggggccccgcgaagccgtgagccgctgcttttctccgagtcgccgccctgcccttggatttgagatcatgtccatccacatcgtggcgctggggaacgagggggacacattccaccaggacaaccagccgtcggggcttatccgcacttacctggggagaagccctctggtctccggggacgagagcagcttgttgctgaacgcggccagcacggtcgcgcgtccggtgttcaccgagtatcaggccagtgcgtttgggaatgtcaagctggtggtccacgactgtcccgtctgggacatatttgacagtgattggtacacttctcgaaatctaattgggggcgctgacatcattgtgatcaaatacaacgttaatgacaagttttcattccatgaagtaaaggataattatattccagtgataaaaagagcattaaattcagttccagtaattattgctgctgttggtaccagacaaaatgaagagttaccttgtacatgcccactatgtacctcagacagagggagctgtgttagtacaactgaagggatccaacttgcaaaagaactaggagcaacctatcttgaactccacagccttgatgacttctacataggaaagtattttggaggagtgttggagtattttatgattcaagccttaaatcagaagacaagtgaaaaaatgaagaaaagaaaaatgagcaactcctttcatggaattagaccacctcaacttgaacaaccagaaaaaatgcctgtcttaaaggctgaagcgtcacattataactctgacttaaataacttgctgttctgctgccagtgtgtggacgtggtattttataaccccgatttaaagaaagttgtagaggcccacaagatcgttctctgcgctgtaagccatgttttcatgctgcttttcaatgtgaagagtcccactgacattcaggattccagtatcatccgaactacccaggatctttttgctataaacagagatactgcatttccaggtgctagccatgaatcttcaggcaacccaccattacgagtcattgttaaagacgccctcttctgttcttgtttatcagacatccttcgcttcatttattcaggtgcttttcagtgggaagaattggaagaagatatcaggaagaagttgaaagattctggggatgtttcaaatgtaatcgagaaagttaaatgcattttaaaaacaccaggaaagattaattgcctaaggaattgcaaaacctatcaagccagaaaacctttgtggttttataacacttccctcaagtttttccttaataagccgatgcttgccgatgttgtcttcgaaattcaaggtacgacagtgccagcccacagggccatcctggtggcccgttgtgaagtgatggcagccatgtttaatggtaattacatggaagcaaagagtgtcctgattcccgtttatggtgtttccaaagagactttcttgtcatttttagaatacctgtacacagactcctgctgcccagctggcatattccaggccatgtgtctcctgatctgtgccgagatgtaccaagtgtccagactgcagcacatctgtgagctgttcatcattacccagctgcagagcatgccaagcagggaactggcatccatgaaccttgatatagttgacctgcttaaaaaggccaagtttcaccactctgattgcctttcaacctggctacttcatttcattgctactaactacctcatcttcagtcaaaagcctgaatttcaggatctttcagtggaagaacgcagttttgttgaaaagcacagatggccgtcgaatatgtacttgaagcagcttgcggaatacaggaagtatattcactcccggaaatgtcgttgcttagtaatgtaacctggagcttttatacactacatttcttttttattattatgaagaatgggatacctccaggttccagtaaaattcttctgaccgaaaccaatgtgggtgttagaaaaattaccatatagcttaatatgtttattagttctctttggaaaaaaactaccactgtggtcttaaaagggaacaaaatataccataggctaaaactaaggctttcactctagaatgcaaagctgttttgcagctgttttcccttaaagatgtcctgttgctttagtgatatttagacccctctcagttaagaaatgcttagattaaaaaaaaaaaattacgtaggattaatacagaaatttaatcatgtctgattaattgctctattaaaataaggggcatttaaagacccagcataaccatttgtataatgagaaatctaggggaaaaccaatcagtccaacatgagattttaggaatagaaatttgccggccatttggaaagtgaaatgccacttagttctcaattgatgacagtgtttgaatcatcataaaaaaaatacctgcttttcatctggacaacccaattgagccactttatctccttttggcaatctgagtaggcggggaacctaggcagggctggctttcttagcgtgtaacttgtgtagcagcacagggcccacacttagaaggaccccacacttggttcaaggctctgctatagcggaaattcttaataatgtttgaagaagggccccatgatttcattttgtgctgagccctcaaaattatgtctgtttcgtggtgggaaatatcctatgttttcttgctcaaacacctttctctctgaaagcagaaaaaggcactgatataaagggaagagaaggaggctcaccggagggaagagaacatagtgaagattcccgcctttggggaggtctggaccacccagggcctccactgccaccttggctggcaagggagaaatgtgttgtgttgtcttagctttaaaacagtcacagttcttgctctatcatagatgaacaaatactttcttgatcattctgtaagaccaggaggttggtaagagtgactaaccagcctaactttaatacacatgtataaagatgttcacagagaaagatgctctgtagagaatttgctaccgaagttggctcaagaatttgtttttagtgttatttaccaagattaggacgtcagtggcttaaattctttgaattcttttcaaggactgcaagattatttgataaagagtagcatgaatcttgtgctctaatattacacagtaagttcaaagaaaggatgtaagtcaaagacttgttacatagagggaaaatggactgggatagaggacagactgatagtttctttctttcatatcacatgtatagagaaataattatatcagaaactcacaaacctagacatggaaaaacagattactgtctattgtcagcatcattttcatctgtaagtcactactggaatatatttttcttttaatttccagtgactttagaatacacacagtttttccgacttttcaaaaatttgattaaatggttttatagtataatattgggaccccataccgttagcccttgtatgtataccaacactgccaaagtaaaacattaggtcaggcatggtggctcaggcctgtaatcccagcattttgggaggctgaggcaagtggataacttgaggtcatgagttcgaaaccagcctggccaaaacagtgaaaccccgtctctactaaaaatacaaaattagccagatgtggtggcgcacacctgtaatcccagctactcaggaagctgaggcaggaaaatcgcttgaacctgggaggtggaagttgcagtgagccgagatcgcaccactgcactccagcctgggtgacaagagcgaaactccatcacaaaaaaaaaaaaaaaa

SEQ ID NO: 3395 - DNA, 4591 bp, Homo sapiens
gtgaactgttgcaccgtgcaattgcacactataaatgtctttccttatctgtgtgtactcttatctcactgttctattttttctcctcatttatattaactctttcttacctttttttctgaacttctaggccttctctttccagaactggtggaagacaaatgaaacggccaagatggtaagaaacaagccgcatttctccttggggagactgataatttaaaaggtttgttgtgtcagaaacattcccagcttcatcaccaaccctttccttccacctctgcccactggagaccacttacatcccgaagcggacgcggcagctgaagtcaggaaaccatgcatcacattagcaggagccaactgcagactttaaactccgttcaacatgtggatgcggcagagaaatgacctgtccagacaagccggggcagctcataaactggttcatctgctccctgtgcgtcccgcgggtgcgtaagctctggagcagccggcgtccaaggacccggagaaaccttctgctgggcactgcgtgtgccatctacttgggcttcctggtgagccaggtggggagggcctctctccagcatggacaggcggctgagaaggggccacatcgcagccgcgacaccgccgagccatccttccctgagatacccctggatggtaccctggcccctccagagtcccagggcaatgggtccactctgcagcccaatgtggtgtacattaccctacgctccaagcgcagcaagccggccaatatccgtggcaccgtgaagcccaagcgcaggaaaaagcatgcagtggcatcggctgccccagggcaggaggctttggtcggaccatcccttcagccgcaggaagcggcaagggaagctgatgctgtagcacctgggtacgctcagggagcaaacctggttaagattggagagcgaccctggaggttggtgcggggtccgggagtgcgagccgggggcccagacttcctgcagcccagctccagggagagcaacattaggatctacagcgagagcgccccctcctggctgagcaaagatgacatccgaagaatgcgactcttggcggacagcgcagtggcagggctccggcctgtgtcctctaggagcggagcccgtttgctggtgctggaggggggcgcacctggcgctgtgctccgctgtggccctagcccctgtgggcttctcaagcagcccttggacatgagtgaggtgtttgccttccacctagacaggatcctggggctcaacaggaccctgccgtctgtgagcaggaaagcagagttcatccaagcagcagcagcagcgtgtctttccatgcgcttggcattctttattttcccagcctgggaggatatgagagttccagggaaatgctgtattggacatgcaaggctcacctggggaacttatcagcagttgctgaaacagaaatgctggcagaatggccgagtacccaagcctgaatcaggttgtactgaaatacatcatcatgagtggtccaagatggcactctttgattttttgttacagatttataatcgcttagatacaaattgctgtggattcagacctcgcaaggaagatgcctgtgtacagaatggattgaggccaaaatgtgatgaccaaggttctgcggctctagcacacattatccagcgaaagcatgacccaaggcatttggtttttatagacaacaagagtttctttgacaggagtgaagataacttaaacttcaaattgttagaaggcatcaaagagtttccagcttctgcagtttctgttttgaagagccagcacttacggcagaaacttcttcagtctctgtttcttgataaagtgtattgggaaagtcaaggaggtagacaaggaattgaaaagcttatcgatgtaatagaacacagagccaaaattcttatcacctatatcaatgcacacggggtcaaagtattacctatgaatgaatgacaaaagaatcttctggctagggtgttagatatatttatgcatttttggttttgtttttaaatcaagcacatcaacctcaagcccgtttagcaatgaggcagtgtagatgaatacgtaaaataaatgactttaaccaagtagctataatgggacttagcactgtatgcatacttaaaaaggttttgaaaaacaaactacttgagaaatatttgtttatatttttctctaacatcatgctatgtgtcagtctgaacatctgacaacagaaatttcagttattattctagctaagttttgaaaacatttgtcatgctgtttaatagaaaactgcaaaccagagatactgactccattaataaaccatattttgtgccgttttgactgttctgaccaaatactaatgggaacaattcttgacgtttttctgttgctgattgttaacatagagcagtctctacactaccctgaggcaactctacattggaacactgaggcttacagcctgcaagagcatcagagctgaccatacatttaaacagaaatgctggtttatttgcaaaatcaccagtatattttctattgtgtctataaaaaatcagtcatttaagtacaagaatcatattttccattcctttttagaaatttattttgttgtccctatggaaatcattcacatctgacaatttatatgttaaagagttttactctctctattttggtccaatttgtatctagtggctgagaaattaaataattctaaagtatgaagttacctatctgaaaatgtacttacagagtatcattttaaaatggatgtctctttaaaaattttgttacttttaccaacaatgtaatataatttatgtatattttattaataatagtgaattccttaaaatttgttctatgtacttatatttaatttgatttaatggttactgcccagatattgagaaatggttcaaatattgagtgtgtttcaatatattatctggcttatttcaacatgagtaatatgagcaaaataagttaaaacctgcgtctgatcaattttcctcatgactagaactaaaacagtaaatttggacaatattaagcctcaaataatcatctccaaactcattctaacactttttaaatcagattggaagacatggacaaatcaggttcatgtgttgcatctttatgtcctttgccaatatccaagatcatcacatatggtagatattcacatggagtttcaaattcagaatagattaccattaccttcctgcccttacacatcctactccttatttaaaagttctatttgtgacttttcatttcctgaaagtttaaaaatacaatttgagaatgtttataatacattctctcctgtcttttcacggttacgtctgttatttctgaaatacaccacattttctttgttctggtcaaggttaactcaatatctgtgtgaaagagaactactaacaacgttacaatagaggctagatttgaaaaaaaaaatctatagatctaattgatacaattgtagaacaaaatgtcaaaataatgttttaagtataagagaagatggaccaaggagagagagatcatttgaaaatctaattgtagcttttctaggctcacattcatgtactacttttagcacccttatgggctgtgctcgccccctggacagttgagctttggattatcttcctcttcaattttccctctattgacccgagtgtctccctctgcttctacagatttatagtactccttggctcttttgagtctccacttttactcactgtctctgggatttttaagatccttttcttctcttataaatcatcctcttaatgaaaattagcctaacaaaagtttggagactggaatcctactttgagccactgacttgaaataactcttttggcaagttgcctgacatcctgtcttaccaaggtggcatatttgcatttttactgcttaaaacattttttttttttaccatctttatccaaatttatcatattgatggtaggactaacaggctttttagaagctggctttaactttgagtctcaagctacaatgctgttgggcagcctggtcttcccacgtgagggtttaactttgtttatttgcctccagttattcctaaatgcttattaaatgaaaggcccaggaacatgtttattttagtcacctttgctttttaacaattttgttttgtaatcaatgagtaattcatgatgaattatttttgactaatggatagccgaaggccaagcttttaattctaataggtaatgttcttcttttgtcttattgaaacaatgagaatactctgtgcatttcaaatgcactccgattatgctgtggttttattcacataagcacaatatgtgttttatttataacttcataacaaacttataatataataatttaccttagcagacatgcaaaagcttattcttgtgtgacttactttctttaagctaataatataaaaataaatatgtatcttaaaaatctataataaaacattagaaattaaaaaaaaaaaaaaaaaaaaaaaaaaaaaaaaaagaaaaaaaaaaaaaaaa

SEQ ID NO: 3396 - DNA, 2311 bp, Homo sapiens
ggtgaactgtcatggtgctggcaggaatggctaagggtgatgggcagcgagaacaaccagaggcgctttttgtgtctttttctagttttggcctgttctcaatctggtctgggagacgaatcctgctgacctcctacctctgctggcaaaactcgagtggggtctgggaacttgaaggaaggagttttacagcttcagatctgggtatttatccaaaagacttgaaactggggtcctgaggagatacaaacacttctcagttcattaaagcactattcacagtatccaagaagtgaagtgttcaaccactgagtatgatgttggctctaagtattcatatgaggcctacgtcaaattcatacatgtcgaatatcaaattggggaagtcatttgattgcccgcctcagaacgatggatctgcatctcttcgactactcagagccagggaacttctcggacatcagctggccatgcaacagcagcgactgcatcgtggtggacacggtgatgtgtcccaacatgcccaacaaaagcgtcctgctctacacgctctccttcatttacattttcatcttcgtcatcggcatgattgccaactccgtggtggtctgggtgaatatccaggccaagaccacaggctatgacacgcactgctacatcttgaacctggccattgccgacctgtgggttgtcctcaccatcccagtctgggtggtcagtctcgtgcagcacaaccagtggcccatgggcgagctcacgtgcaaagtcacacacctcatcttctccatcaacctcttcggcagcattttcttcctcacgtgcatgagcgtggaccgctacctctccatcacctacttcaccaacacccccagcagcaggaagaagatggtacgccgtgtcgtctgcatcctggtgtggctgctggccttctgcgtgtctctgcctgacacctactacctgaagaccgtcacgtctgcgtccaacaatgagacctactgccggtccttctaccccgagcacagcatcaaggagtggctgatcggcatggagctggtctccgttgtcttgggctttgccgttcccttctccattgtcgctgtcttctacttcctgctggccagagccatctcggcgtccagtgaccaggagaagcacagcagccggaagatcatcttctcctacgtggtggtcttccttgtctgctggttgccctaccacgtggcggtgctgctggacatcttctccatcctgcactacatccctttcacctgccggctggagcacgccctcttcacggccctgcatgtcacacagtgcctgtcgctggtgcactgctgcgtcaaccctgtcctctacagcttcatcaatcgcaactacaggtacgagctgatgaaggccttcatcttcaagtactcggccaaaacagggctcaccaagctcatcgatgcctccagagtctcagagacggagtactctgccttggagcagagcaccaaatgatctgccctggagaggctctgggacgggtttacttgtttttgaacagggtgatgggccctatggttttctagagcaaagcaaagtagcttcgggtcttgatgcttgagtagagtgaagaggggagcacgtgccccctgcatccattctctctttctcttgatgacgcagctgtcatttggctgtgcgtgctgacagttttgcaacaggcagagctgtgtcgcacagcagtgctgtgcgtcagagccagctgaggacaggcttgcctggacttctgtaagataggattttctgtgtttcctgaattttttatatggtgatttgtatttaaattttaagactttattttctcactattggtgtaccttataaatgtatttgaaagttaaatatattttaaatattgtttgggaggcatagtgctgacatatattcagagtgttgtagttttaaggttagcgtgacttcagttttgactaaggatgacactaattgttagctgttttgaaattatatatatataaatatatataaatatataaatatatgccagtcttggctgaaatgttttatttaccatagttttatatctgtgtggtgttttgtaccggcacgggatatggaacgaaaactgctttgtaatgcagtttgtgacattaatagtattgtaaagttacattttaaaataaacaaaaaactgttctggactgcaaatctgcacacacaacgaacagttgcatttcagagagttctctcaatttgtaagttatttttttttaataaagatttttgtttcctaaaaaaaaaaaaaaaa

SEQ ID NO: 3397 - DNA, 2333 bp, Homo sapiens
cccgggccagggtccacctgtccccgcagcgccggctcgcgccctcctgccgcagccaccgagccgccgtctagcgccccgacctcgccaccatgagagccctgctggcgcgcctgcttctctgcgtcctggtcgtgagcgactccaaaggcagcaatgaacttcatcaagttccatcgaactgtgactgtctaaatggaggaacatgtgtgtccaacaagtacttctccaacattcactggtgcaactgcccaaagaaattcggagggcagcactgtgaaatagataagtcaaaaacctgctatgaggggaatggtcacttttaccgaggaaaggccagcactgacaccatgggccggccctgcctgccctggaactctgccactgtccttcagcaaacgtaccatgcccacagatctgatgctcttcagctgggcctggggaaacataattactgcaggaacccagacaaccggaggcgaccctggtgctatgtgcaggtgggcctaaagccgcttgtccaagagtgcatggtgcatgactgcgcagatggaaaaaagccctcctctcctccagaagaattaaaatttcagtgtggccaaaagactctgaggccccgctttaagattattgggggagaattcaccaccatcgagaaccagccctggtttgcggccatctacaggaggcaccgggggggctctgtcacctacgtgtgtggaggcagcctcatcagcccttgctgggtgatcagcgccacacactgcttcattgattacccaaagaaggaggactacatcgtctacctgggtcgctcaaggcttaactccaacacgcaaggggagatgaagtttgaggtggaaaacctcatcctacacaaggactacagcgctgacacgcttgctcaccacaacgacattgccttgctgaagatccgttccaaggagggcaggtgtgcgcagccatcccggactatacagaccatctgcctgccctcgatgtataacgatccccagtttggcacaagctgtgagatcactggctttggaaaagagaattctaccgactatctctatccggagcagctgaaaatgactgttgtgaagctgatttcccaccgggagtgtcagcagccccactactacggctctgaagtcaccaccaaaatgctgtgtgctgctgacccacagtggaaaacagattcctgccagggagactcagggggacccctcgtctgttccctccaaggccgcatgactttgactggaattgtgagctggggccgtggatgtgccctgaaggacaagccaggcgtctacacgagagtctcacacttcttaccctggatccgcagtcacaccaaggaagagaatggcctggccctctgagggtccccagggaggaaacgggcaccacccgctttcttgctggttgtcatttttgcagtagagtcatctccatcagctgtaagaagagactgggaagataggctctgcacagatggatttgcctgtgccacccaccagggtgaacgacaatagctttaccctcaggcataggcctgggtgctggctgcccagacccctctggccaggatggaggggtggtcctgactcaacatgttactgaccagcaacttgtctttttctggactgaagcctgcaggagttaaaaagggcagggcatctcctgtgcatgggtgaagggagagccagctcccccgacggtgggcatttgtgaggcccatggttgagaaatgaataatttcccaattaggaagtgtaacagctgaggtctcttgagggagcttagccaatgtgggagcagcggtttggggagcagagacactaacgacttcagggcagggctctgatattccatgaatgtatcaggaaatatatatgtgtgtgtatgtttgcacacttgtgtgtgggctgtgagtgtaagtgtgagtaagagctggtgtctgattgttaagtctaaatatttccttaaactgtgtggactgtgatgccacacagagtggtctttctggagaggttataggtcactcctggggcctcttgggtcccccacgtgacagtgcctgggaatgtattattctgcagcatgacctgtgaccagcactgtctcagtttcactttcacatagatgtccctttcttggccagttatcccttccttttagcctagttcatccaatcctcactgggtggggtgaggaccactccttacactgaatatttatatttcactatttttatttatatttttgtaattttaaataaaagtgatcaataaaatgtgatttttctgatgaaaaaaaaaaaaaaa

SEQ ID NO: 3398 - DNA, 3767 bp, Homo sapiens
gataagttggcgcgtcacctagacgtcagcctcttacctctcggacgtcccgtcccaggagcaaaactctagtgactttgggcccgcccccgtgagagtggagggcggccgatgagggcggttctgaagggaacaagaccaatgagacgagcccggggcggggcgcggggccggagggtggggcgggtggcggcggtggcagtccgaggtctggctccgcgcagtatatgacagtacgtcagcagcgggatggccctagcagtggcggcggctgcagaagcccaagcagccgcggccgcagtggaggctagagccggagcggcggcggcggcggcaccccggggagtttaagatggcggcgggggggacagggggcctgcgggaggagcagcgctatgggctgtcgtgcggacggctggggcaggacaacatcaccgtactgcatgtgaagctcaccgagacggcgatccgggcgctcgagacttaccagagccacaagaatttaattccttttcgaccttcaatccagttccaaggactccacgggcttgtcaaaattcccaaaaatgatcccctcaatgaagttcataactttaacttttatttgtcaaatgtgggcaaagacaaccctcagggcagctttgactgcatccagcaaacattctccagctctggagcctcccagctcaattgcctgggatttatacaagataaaattacagtgtgtgcaacaaacgactcgtatcagatgacacgagaaagaatgacccaggcagaggaggaatcccgcaaccgaagcacaaaagttatcaaacccggtggaccatatgtagggaaaagagtgcaaattcggaaagcacctcaagctgtttcagatacagttcctgagaggaaaaggtcaacccccatgaaccctgcaaatacaattcgaaagacacatagcagcagcaccatctctcagaggccatacagggacagggtgattcacttactggccctgaaggcctacaagaaaccggagctacttgctagactccagaaagatggtgtcaatcaaaaagacaagaactccctgggagcaattctgcaacaggtagccaatctgaattctaaggacctctcatataccttaaaggattatgtttttaaagagcttcaaagagactggcctggatacagtgaaatagacagacggtcattggagtcagtgctctctagaaaactaaatccgtctcagaatgctacaggcaccagccgttcagaatctcctgtatgttctagtagagatgctgtatcttctcctcagaaacggcttttggattcagagtttattgatcctttaatgaataaaaaagcccgaatatctcacctgacgaacagagtaccaccaacactaaatggtcatttgaatcccaccagtgaaaaatcggctgcaggcctcccactgccccctgcggctgctgccatccccacccctccaccgctgccttcaacctatctgcccatctcacatcctcctcagattgtaaattctaactccaactcccctagcactccagaaggccgggggactcaagacctacctgttgacagttttagtcaaaacgatagtatctatgaggaccagcaagacaaatatacctctaggacttctctggaaaccttaccccctggttccgttctactaaagtgtccaaagcctatggaagaaaaccattcaatgtctcacaaaaagtccaaaaagaagtctaaaaaacataaggaaaaggaccaaataaaaaagcacgacattgagactattgaggaaaaggaggaagatcttaagagagaagaggaaattgccaagctaaataactccagtccaaattccagtggaggagttaaagaggattgcactgcctccatggaaccttcagcaattgaactcccagattatttgataaaatatatcgctatcgtctcctatgagcaacgccagaattataaggatgacttcaatgcagagtatgatgagtacagagctttgcatgccaggatggagactgtagctagaagatttatcaaactagatgcacaaagaaagcgcctttctccaggctcaaaagagtatcagaatgttcatgaagaagtcttacaagaatatcagaagataaagcagtctagtcccaattaccatgaagaaaaatacagatgtgaatatcttcataacaagctggctcacatcaaaaggctaataggtgaatttgaccaacagcaagcagagtcatggtcctagaactctgcttggaccagaagatgtgaataaacttaagcttatttatttaaaattccaaatgagttgctctagattctaaaaaggtgaaactttggctgttgaaagtttcagtattagtaaacttgagttactttttcttttccattttactttgcttccctgcatttcgaagctgctctttctggtcctccccaccaccccacccccaagacttgtgtttgttaatagaaataatttttttaggtattggggatccattgtctatatttcaaatcagttttttttcctcaaaaacttgtgtttgttattagaaatgattttttagatattggggatccagtgtccacacttaaaagttgtatgtgtttaaaaaacaacaacagtaatgtgcaaggtgaaatgcttttggataaacgtaagcctattttctgacgtttcttaatgcaaactctttgccttaaatggtagaatatttagaaatttgcacaaaattaaaaaaataaacattgtcttggagggttaaaaaatagaaaggtgtatgtgtatagattcacatacacatatgtatatacaggctgacttgatctagaacattaaatccgccctgcaagttaaccccccattgcaatggttgccttaaggtgtttgctagttgtgtacatagtgtggttaatcattagctacactgcttcccacttgattagagcaatgggaagcatactgtggcctaccagcatctggaagtgtgtgctcgatctgtatgtgtgcagaggtggtgtggatgtgagcgtgcatgaaggaaaaaaagctgctactcctagtaggccaaacgctcaggttaaacaactgacgagtgttactgtagggtgtttttttgtttttttgttttttttcttctatcaaattgctacttttgttgtggaagacaaaagcatttccatttcaacgagtttgtcagctttattaatgttgggcaaaaattgatatgtcatgaaaatgaaacagatctatagttttgggacaaaattataaaatgaaatgtgtaggtaacctatttatatactgctataaagtattttttgaagagagatatgcaaagaagctattacctacataagaggtatatttaaagattttttttttttcatcctggtgccaggaatataaaaaagagtggatatatttaaccataacatactgtgattcatcaaacagcacaaactttcatttcatggagtttatctgttgacattgatttaaactgtcacttgttttatcatgtgggaacataagttatgtggtcaaaaatataaggattttgaattaatgttgattcaagttgtattgtcttattgtattgtcttttcaaagtgctgccagttgaaaagggaagcattatgtttacaaatctgttttgaaatgtttgccaaaattttggtagtgtctttaataaagatgtttgtctccagcatccagaaaaaaaaaaaaaaaa

SEQ ID NO: 3399 - DNA, 2203 bp, Homo sapiens
gcgctcggagcacggcggggaccgggaggcagagacggggcggccgtggctccgagggcgggagctgagccgggccccgggaccgaagtttggcggcggctccgggaggcagagcgggctccccgggcgacttccaggcccctctcgcgtcctcgccccggacccgtgggcagccgggggggacggaagccgcggccgggccaactccgaggcggggacgccgcgacgggaacttgaggcccgagagggatgtgaaggcccaaaatgaccctcttaccgggagacaattctgactacgactacagcgcgctgagctgcacctcggacgcctccttccacccggccttcctcccgcagcgccaggccatcaagggcgcgttctaccgccgggcgcagcggctgcggccgcaggatgagccccgccagggctgtcagcccgaggaccgccgccgtcggatcatcatcaacgtaggcggcatcaagtactcgctgccctggaccacgctggacgagttcccgctgacgcgcctgggccagctcaaggcctgcaccaacttcggcgacatcctcaacgtgtgcgatgactacgacgtcacctgcaacgagttcttcttcgaccgcaacccgggggccttcggcactatcctgaccttcctgcgcgcgggcaagctgcggctgctgcgcgagatgtgcgcgctgtccttccaggaggagctgctgtactggggcatcgcggaggaccacctggacggctgctgcaagcgccgctacctgcagaagattgaggagttcgcggagatggtggagcgggaggaagaggacgacgcgctggacagcgagggccgcgacagcgagggcccggccgagggcgagggccgcctggggcgctgcatgcggcgactgcgcgacatggtggagaggccgcactcggggctgcctggcaaggtgttcgcctgcctgtcggtgctcttcgtgaccgtcaccgccgtcaacctctccgtcagcaccttgcccagcctgagggaggaggaggagcagggccactgttcccagatgtgccacaacgtcttcatcgtggagtcggtgtgcgtgggctggttctccctggagttcctcctgcggctcattcaggcgcccagcaagttcgccttcctgcggagcccgctgacgctgatcgacctggtggccatcctgccctactacatcacgctgctggtggacggcgccgccgcgggccgtcgcaagcccggcgcgggcaacagctacctggacaaggtggggctggtgctgcgcgtgctgcgggcgctgcgcatcctgtacgtgatgcgcctggcgcgccactccctggggctgcagacgctggggctcacggcccgccgctgcacccgcgagttcgggctcctgctgctcttcctctgcatggccatcgccctcttcgcgcccctgctctacgtcatcgagaacgagatggccgacagccccgagttcaccagcatccctgcctgctactggtgggctgtcatcaccatgacgacggtgggctatggcgacatggtccccaggagcaccccgggccaggtagtggccctgagcagcatactgggcggcatcctgctcatggccttcccagtcacctccatcttccacaccttctcccgctcctacctggagctcaagcaggagcaagagagggtgatgttccggagggcgcagttcctcatcaaaaccaagtcgcagctgagcgtgtcccaggacagtgacatcttgttcggaagtgcctcctcggacaccagagacaataactgagcgcggaggacacgcctgccctgcctgccatctgtggcccgaagccattgccatccactgcagacgcctggagagggacaggccgcttccgagtgcagtcctggcgcagcaccgactcccacgcacccggggaaggacaccctcactcccacaccccgggaagaacactagaacatcagcagaggggccctgcccctccgcctgcagccgtgaaaggaagctgggtcatcagcccagccccgcccaccccagcccctatgtgtgtttccctcaataaggagatgccttgttcttttcaccatgcgaataacatgcccagcaaaaacttgctttatgggtctgcctggagaaaaaaaaaaaaaatacaaacagcagaaacagcaaaaaaaaaaaaaaa

SEQ ID NO: 3400 - DNA, 2348 bp, Homo sapiens; identical to SEQ ID NO: 602

SEQ ID NO: 3401 - DNA, 1846 bp, Homo sapiens; identical to SEQ ID NO: 1563

SEQ ID NO: 3402 - DNA, 5182 bp, Homo sapiens
agttggaaagagaccacagactttgagggaagctcactcaggatctgctctccggcaaagtagtaagtgaggtgctgagagcagaatgagctactttgtggattctgctgggagcagccccgtcccttactcagcgcctcgtcctgcagtggtgaggcaaggacctagcaacacttatgaagatcctcgaatgaactgtggtttccagtccaattatcaccagcaaagaccttgctaccccttttgggatgagatggcaactcaggaagttcctactggtcttgaacactgtgtctcagatatggaatgtgcagatgtcccactattaactccaagcagcaaagaaatgatgtctcaagcattaaaagctactttcagtggtttcactaaagaacagcaacgactggggatcccaaaagacccccggcagtggacagaaacccatgttcgggactgggtgatgtgggctgtgaatgaattcagcctgaaaggtgtagacttccagaagttctgtatgaatggagcagccctctgcgccctgggtaaagactgctttctcgagctggccccagactttgttggggacatcttatgggaacatctagagatcctgcagaaagaggatgtgaaaccatatcaagttaatggagtcaacccagcctatccagaatcccgctatacctcggattacttcattagctatggtattgagcatgcccagtgtgttccaccatcggagttctcagagcccagcttcatcacagagtcctatcagacgctccatcccatcagctcggaagagctcctctccctcaagtatgagaatgactacccctcggtcattctccgagaccctctccagacagacaccttgcagaatgactactttgctatcaaacaagaagtcgtcaccccagacaacatgtgcatggggaggaccagtcgtggtaaactcgggggccaggactcttttgaaagcatagagagctacgatagttgtgatcgcctcacccagtcctggagcagccagtcatctttcaacagcctgcagcgtgttccctcctatgacagcttcgactcagaggactatccggctgccctgcccaaccacaagcccaagggcaccttcaaggactatgtgcgggaccgtgctgacctcaataaggacaagcctgtcattcctgctgctgccctagctggctacacaggcagtggaccaatccagctatggcagtttcttctggaattactcactgataaatcctgtcagtcttttatcagctggacaggagatggctgggaattcaaactttctgacccagatgaggtggccaggagatggggaaagaggaaaaacaaacctaagatgaattatgagaaactgagccgtggcctacgctactattacgacaaaaacatcatccacaagacagcggggaaacgctacgtgtaccgctttgtgtgtgacctgcagagcctgctggggtacacccctgaggagctgcacgccatgctggacgtcaagccagatgccgacgagtgatggcactgaaggggctggggaaaccctgctgagaccttccaaggacagccgtgttggttggactctgaattttgaattgttattctattttttattttccagaactcattttttaccttcaggggtgggagctaagtcagttgcagctgtaatcaattgtgcgcagttgggaaaggaaagccaggacttgtggggtgggtgggaccagaaattcttgagcaaattttcaggagagggagaagggccttctcagaagcttgaaggctctggcttaacagagaaagagactaatgtgtccaatcatttttaaaaatcatccatgaaaaagtgtcttgagttgtggacccattagcaagtgacattgtcacatcagaactcatggaactgatgtaaggcaattaatttgcttctgtttttaggtctgggagggcaaaaaagaggtgggtgggatgaaacatgttttggggggggatgcactgaaaatctgagaactatttacctatcactctagttttgaagcaaagatggacttcagtggggaggggccaaaaccgttgttgtgttaaaatttattttattaaattttgtgccagtattttttttcttaaaaatcgtcttaagctctaaggtggtctcagtattgcaatatcatgtaagtttgtttttatttgccggctgaggattctgtcacaatgaaagaaaactgtttatatagaccccattggaaaagcaaaacgctctcactgagatcagggatcccaaattcatgggacttatataagaaggacaattaatgctgatttgggtacaggggaattatgtgtgtgaatgtcatctacaattaaaaaaattagcacatccctttacttacttgttatcagtggattctcggggtttggacttaatgttgagctaagaagcattaagtctttgaactgaatgtattttgcatccctggttttggacgacagtaaacgtaggagcactgttgaagtcctggaagggagatcgaaggaggaagattgacttggttctttcttagtcctatatctgtagcatagatgacttggaataaaagctgtatgcatgggcattacccctcaggtcctaagaaataagtcctgaatgcatgtcgttccaaactaacactctgtaatttttcttttatgtcttattttccaagagtcctccattttttgcaccccctcaccgccaactctgttattcagtagagagaagtgtacggctttctgattggtgagtgaaaaagtaacttgagacacgacctaagttgaagagtttagacttgctgagttttagaagtgatggaaattaagagagcatttcaataaaatgtgacttggctgtctttggaagagaagtgcaaggctttcctttgaagaatttaaattagtccggtaggatgtcaggtgagactgtgtatgcaaaatgaatggcacaggtgatgccagggcctcttgcttgggtctgatgtcttggcacagggtaagtgaaggttaattccagaagagaggaatgacttgaaggcaaaggaaactaaggaaggaggttcagtgaggaaaataaggttgtccatgagatttgaatagatttttagttcccccaaggtttaaatacaaacatagtcaagcaaggtagtcatctttctgctggttgtgagggggaatctgaaaatggagttttagaggaaaagtcaacatctaactagtgaggaaaagtgcctaatacaattagaatctccctcactctatagttgcccagttgaacggataaggaggaggggtggcttttatggacttccatgagagaaggaaagaaatatttcaggtaagcttctcagggctggccctttttgggatttggatgagaaattggaagtactaactactttctagcatatctttaagaaaattgattgttatttactcccagatcctcttgcagacccagaattatcaggaacatagctctgtgattcatgagtgtccccatactgatgaattggagcatccatatggaaagcaaaggcagaattatcccagctgtattattttgatcttttggatgcaggtgccttaatgaagctctcaaaatattttaggagctgctcagggagtgttgggtggaactgtttggactacattgttttctcttagattatgtgatttttgttgggcactggcaaaaggtgtgtgtgtgaatgtgtgcatgtgtgtgaatgttgtgtgtgtgtgtgtgtgtgtgtgcgtgtttgtgtgtgtgtgtgtgtgtttgcagacatgcaaaactgcagctgaaataataccttagatttctaggtaagtctttccacatttcaataatgggtaagagtagaaccagggccgggtatcaattattgcttgctgtttgcaaccaggcataaaatcactttctcaaatcatccaccgttcctattaaatttatgccggaaacactccttctgtgagtataactcctgcagttcctatagcagataagatataagaaagtgcctcctagtgctcctccgcccgcttgtttgctaaaattccctttctctctaagtccaccattttcaagatttgtagatagtgtattagttaagacagctttgtcgatctggccagatgttttttctcctttgtccaaaggccagagaccatcccaggaagagtggtgggtggtttatacactggaaatgttgcgtttatgctttttaaaaacacacgttaacttcagaggaaggatgggcaaatctggtctagctgggtgaaacccttattttcccagagatgccttaacctttgttggttttggctttagggttcagagtcacttttgttcccttctccattctggagagggacttcccctacatagagccctgatttttgtggctgtggggattggaggtagcattcaaagatcagatgtgcttttcctcactttggagatgaacactctgggttttacagcattaacctgcctaaccttcatggtgagaaatacaccatctctcttctagtcatgctgtgcatgccgcttactctgttggggtctatataaatttgttgaactcttacctacattccaaagaagtttcaaggaaccataaatatatgtatacatatacatatataaaatatatatattaaaataaaattatcaggaatactgcctcagttattgaacttttttttttaagaatactttttttttaagctgagaagtatagggatgaaaaagatgttatattgtgtttgactattttccaacttatattttcatataatttatattttttaaaagctgaaaatttagaagcaagatgaaaaaaaggaaaagcaggtgctttttaaaaatcagaactgaggtagcttagagatgtagcgatgtaagtgtcgatgtttttttaaaaaaaaatgcaaaaaaattcttatggcggagttttttgtttgtttattttagtagctgatgctggcacatcattttgctggagagttttttatatactgtagcctgatttcatattgtattttaaactgtgtgaaattaaaaacaaagaatttcattcataaaaaaaaaaaaaaaaaaaaaaaaaaaaaaaaaaaaaaaaaa

SEQ ID NO: 3403 - DNA, 8042 bp, Homo sapiens
ggcccgcgccggctgtgctgcacagggggaggagagggaaccccaggcgcgagcgggaagaggggacctgcagccacaacttctctggtcctctgcatcccttctgtccctccacccgtccccttccccaccctctggcccccaccttcttggaggcgacaacccccgggaggcattagaagggatttttcccgcaggttgcgaagggaagcaaacttggtggcaacttgcctcccggtgcgggcgtctctcccccaccgtctcaacatgcttaggggtccggggcccgggctgctgctgctggccgtcctgtgcctggggacagcggtgccctccacgggagcctcgaagagcaagaggcaggctcagcaaatggttcagccccagtccccggtggctgtcagtcaaagcaagcccggttgttatgacaatggaaaacactatcagataaatcaacagtgggagcggacctacctaggcaatgcgttggtttgtacttgttatggaggaagccgaggttttaactgcgagagtaaacctgaagctgaagagacttgctttgacaagtacactgggaacacttaccgagtgggtgacacttatgagcgtcctaaagactccatgatctgggactgtacctgcatcggggctgggcgagggagaataagctgtaccatcgcaaaccgctgccatgaagggggtcagtcctacaagattggtgacacctggaggagaccacatgagactggtggttacatgttagagtgtgtgtgtcttggtaatggaaaaggagaatggacctgcaagcccatagctgagaagtgttttgatcatgctgctgggacttcctatgtggtcggagaaacgtgggagaagccctaccaaggctggatgatggtagattgtacttgcctgggagaaggcagcggacgcatcacttgcacttctagaaatagatgcaacgatcaggacacaaggacatcctatagaattggagacacctggagcaagaaggataatcgaggaaacctgctccagtgcatctgcacaggcaacggccgaggagagtggaagtgtgagaggcacacctctgtgcagaccacatcgagcggatctggccccttcaccgatgctcgtgcagctgtttaccaaccgcagcctcacccccagcctcctccctatggccactgtgtcacagacagtggtgtggtctactctgtggggatgcagtggctgaagacacaaggaaataagcaaatgctttgcacgtgcctgggcaacggagtcagctgccaagagacagctgtaacccagacttacggtggcaactcaaatggagagccatgtgtcttaccattcacctacaatggcaggacgttctactcctgcaccacagaagggcgacaggacggacatctttggtgcagcacaacttcgaattatgagcaggaccagaaatactctttctgcacagaccacactgttttggttcagactcgaggaggaaattccaatggtgccttgtgccacttccccttcctatacaacaaccacaattacactgattgcacttctgagggcagaagagacaacatgaagtggtgtgggaccacacagaactatgatgccgaccagaagtttgggttctgccccatggctgcccacgaggaaatctgcacaaccaatgaaggggtcatgtaccgcattggagatcagtgggataagcagcatgacatgggtcacatgatgaggtgcacgtgtgttgggaatggtcgtggggaatggacatgcattgcctactcgcagcttcgagatcagtgcattgttgatgacatcacttacaatgtgaacgacacattccacaagcgtcatgaagaggggcacatgctgaactgtacatgcttcggtcagggtcggggcaggtggaagtgtgatcccgtcgaccaatgccaggattcagagactgggacgttttatcaaattggagattcatgggagaagtatgtgcatggtgtcagataccagtgctactgctatggccgtggcattggggagtggcattgccaacctttacagacctatccaagctcaagtggtcctgtcgaagtatttatcactgagactccgagtcagcccaactcccaccccatccagtggaatgcaccacagccatctcacatttccaagtacattctcaggtggagacctaaaaattctgtaggccgttggaaggaagctaccataccaggccacttaaactcctacaccatcaaaggcctgaagcctggtgtggtatacgagggccagctcatcagcatccagcagtacggccaccaagaagtgactcgctttgacttcaccaccaccagcaccagcacacctgtgaccagcaacaccgtgacaggagagacgactcccttttctcctcttgtggccacttctgaatctgtgaccgaaatcacagccagtagctttgtggtctcctgggtctcagcttccgacaccgtgtcgggattccgggtggaatatgagctgagtgaggagggagatgagccacagtacctggatcttccaagcacagccacttctgtgaacatccctgacctgcttcctggccgaaaatacattgtaaatgtctatcagatatctgaggatggggagcagagtttgatcctgtctacttcacaaacaacagcgcctgatgccccacctgacccgactgtggaccaagttgatgacacctcaattgttgttcgctggagcagaccccaggctcccatcacagggtacagaatagtctattcgccatcagtagaaggtagcagcacagaactcaaccttcctgaaactgcaaactccgtcaccctcagtgacttgcaacctggtgttcagtataacatcactatctatgctgtggaagaaaatcaagaaagtacacctgttgtcattcaacaagaaaccactggcaccccacgctcagatacagtgccctctcccagggacctgcagtttgtggaagtgacagacgtgaaggtcaccatcatgtggacaccgcctgagagtgcagtgaccggctaccgtgtggatgtgatccccgtcaacctgcctggcgagcacgggcagaggctgcccatcagcaggaacacctttgcagaagtcaccgggctgtcccctggggtcacctattacttcaaagtctttgcagtgagccatgggagggagagcaagcctctgactgctcaacagacaaccaaactggatgctcccactaacctccagtttgtcaatgaaactgattctactgtcctggtgagatggactccacctcgggcccagataacaggataccgactgaccgtgggccttacccgaagaggacagcccaggcagtacaatgtgggtccctctgtctccaagtacccactgaggaatctgcagcctgcatctgagtacaccgtatccctcgtggccataaagggcaaccaagagagccccaaagccactggagtctttaccacactgcagcctgggagctctattccaccttacaacaccgaggtgactgagaccaccattgtgatcacatggacgcctgctccaagaattggttttaagctgggtgtacgaccaagccagggaggagaggcaccacgagaagtgacttcagactcaggaagcatcgttgtgtccggcttgactccaggagtagaatacgtctacaccatccaagtcctgagagatggacaggaaagagatgcgccaattgtaaacaaagtggtgacaccattgtctccaccaacaaacttgcatctggaggcaaaccctgacactggagtgctcacagtctcctgggagaggagcaccaccccagacattactggttatagaattaccacaacccctacaaacggccagcagggaaattctttggaagaagtggtccatgctgatcagagctcctgcacttttgataacctgagtcccggcctggagtacaatgtcagtgtttacactgtcaaggatgacaaggaaagtgtccctatctctgataccatcatcccagctgttcctcctcccactgacctgcgattcaccaacattggtccagacaccatgcgtgtcacctgggctccacccccatccattgatttaaccaacttcctggtgcgttactcacctgtgaaaaatgaggaagatgttgcagagttgtcaatttctccttcagacaatgcagtggtcttaacaaatctcctgcctggtacagaatatgtagtgagtgtctccagtgtctacgaacaacatgagagcacacctcttagaggaagacagaaaacaggtcttgattccccaactggcattgacttttctgatattactgccaactcttttactgtgcactggattgctcctcgagccaccatcactggctacaggatccgccatcatcccgagcacttcagtgggagacctcgagaagatcgggtgccccactctcggaattccatcaccctcaccaacctcactccaggcacagagtatgtggtcagcatcgttgctcttaatggcagagaggaaagtcccttattgattggccaacaatcaacagtttctgatgttccgagggacctggaagttgttgctgcgacccccaccagcctactgatcagctgggatgctcctgctgtcacagtgagatattacaggatcacttacggagaaacaggaggaaatagccctgtccaggagttcactgtgcctgggagcaagtctacagctaccatcagcggccttaaacctggagttgattataccatcactgtgtatgctgtcactggccgtggagacagccccgcaagcagcaagccaatttccattaattaccgaacagaaattgacaaaccatcccagatgcaagtgaccgatgttcaggacaacagcattagtgtcaagtggctgccttcaagttcccctgttactggttacagagtaaccaccactcccaaaaatggaccaggaccaacaaaaactaaaactgcaggtccagatcaaacagaaatgactattgaaggcttgcagcccacagtggagtatgtggttagtgtctatgctcagaatccaagcggagagagtcagcctctggttcagactgcagtaaccaacattgatcgccctaaaggactggcattcactgatgtggatgtcgattccatcaaaattgcttgggaaagcccacaggggcaagtttccaggtacagggtgacctactcgagccctgaggatggaatccatgagctattccctgcacctgatggtgaagaagacactgcagagctgcaaggcctcagaccgggttctgagtacacagtcagtgtggttgccttgcacgatgatatggagagccagcccctgattggaacccagtccacagctattcctgcaccagctgacctgaagttcactcaggtcacacccacaagcctgagcgcccagtggacaccacccaatgttcagctcactggatatcgagtgcgggtgacccccaaggagaagaccggaccaatgaaagaaatcaaccttgctcctgacagctcatccgtggttgtatcaggacttatggtggccaccaaatatgaagtgagtgtctatgctcttaaggacactttgacaagcagaccagctcagggtgttgtcaccactctggagaatgtcagcccaccaagaagggctcgtgtgacagatgctactgagaccaccatcaccattagctggagaaccaagactgagacgatcactggcttccaagttgatgccgttccagccaatggccagactccaatccagagaaccatcaagccagatgtcagaagctacaccatcacaggtttacaaccaggcactgactacaagatctacctgtacaccttgaatgacaatgctcggagctcccctgtggtcatcgacgcctccactgccattgatgcaccatccaacctgcgtttcctggccaccacacccaattccttgctggtatcatggcagccgccacgtgccaggattaccggctacatcatcaagtatgagaagcctgggtctcctcccagagaagtggtccctcggccccgccctggtgtcacagaggctactattactggcctggaaccgggaaccgaatatacaatttatgtcattgccctgaagaataatcagaagagcgagcccctgattggaaggaaaaagacagacgagcttccccaactggtaacccttccacaccccaatcttcatggaccagagatcttggatgttccttccacagttcaaaagacccctttcgtcacccaccctgggtatgacactggaaatggtattcagcttcctggcacttctggtcagcaacccagtgttgggcaacaaatgatctttgaggaacatggttttaggcggaccacaccgcccacaacggccacccccataaggcataggccaagaccatacccgccgaatgtaggacaagaagctctctctcagacaaccatctcatgggccccattccaggacacttctgagtacatcatttcatgtcatcctgttggcactgatgaagaacccttacagttcagggttcctggaacttctaccagtgccactctgacaggcctcaccagaggtgccacctacaacatcatagtggaggcactgaaagaccagcagaggcataaggttcgggaagaggttgttaccgtgggcaactctgtcaacgaaggcttgaaccaacctacggatgactcgtgctttgacccctacacagtttcccattatgccgttggagatgagtgggaacgaatgtctgaatcaggctttaaactgttgtgccagtgcttaggctttggaagtggtcatttcagatgtgattcatctagatggtgccatgacaatggtgtgaactacaagattggagagaagtgggaccgtcagggagaaaatggccagatgatgagctgcacatgtcttgggaacggaaaaggagaattcaagtgtgaccctcatgaggcaacgtgttatgatgatgggaagacataccacgtaggagaacagtggcagaaggaatatctcggtgccatttgctcctgcacatgctttggaggccagcggggctggcgctgtgacaactgccgcagacctgggggtgaacccagtcccgaaggcactactggccagtcctacaaccagtattctcagagataccatcagagaacaaacactaatgttaattgcccaattgagtgcttcatgcctttagatgtacaggctgacagagaagattcccgagagtaaatcatctttccaatccagaggaacaagcatgtctctctgccaagatccatctaaactggagtgatgttagcagacccagcttagagttcttctttctttcttaagccctttgctctggaggaagttctccagcttcagctcaactcacagcttctccaagcatcaccctgggagtttcctgagggttttctcataaatgagggctgcacattgcctgttctgcttcgaagtattcaataccgctcagtattttaaatgaagtgattctaagatttggtttgggatcaataggaaagcatatgcagccaaccaagatgcaaatgttttggaatgatatgaccaaaattttaagtaggaaagtcacccaaacacttctgctttcacttaagtgtctggcccgcaatactgtaggaacaagcatgatcttgttactgtgatattttaaatatccacagtactcactttttccaaatgatcctagtaattgcctagaaatatctttctcttacctgttatttatcaatttttcccagtatttttatacggaaaaaattgtattgaaaacacttagtatgcagttgataagaggaatttggtataattatggtgggtgattattttttatactgtatgtgccaaagctttactactgtggaaagacaactgttttaataaaagatttacattccaaaaaaaaaaaaaaaaaa

SEQ ID NO: 3404 - DNA, 7951 bp, Homo sapiens
ggggcccgcgccggctgtgctgcacagggggaggagagggaaccccaggcgcgagcgggaagaggggacctgcagccacaacttctctggtcctctgcatcccttctgtccctccacccgtccccttccccaccctctggcccccaccttcttggaggcgacaacccccgggaggcattagaagggatttttcccgcaggttgcgaagggaagcaaacttggtggcaacttgcctcccggtgcgggcgtctctcccccaccgtctcaacatgcttaggggtccggggcccgggctgctgctgctggccgtcctgtgcctggggacagcggtgccctccacgggagcctcgaagagcaagaggcaggctcagcaaatggttcagccccagtccccggtggctgtcagtcaaagcaagcccggttgttatgacaatggaaaacactatcagataaatcaacagtgggagcggacctacctaggcaatgcgttggtttgtacttgttatggaggaagccgaggttttaactgcgagagtaaacctgaagctgaagagacttgctttgacaagtacactgggaacacttaccgagtgggtgacacttatgagcgtcctaaagactccatgatctgggactgtacctgcatcggggctgggcgagggagaataagctgtaccatcgcaaaccgctgccatgaagggggtcagtcctacaagattggtgacacctggaggagaccacatgagactggtggttacatgttagagtgtgtgtgtcttggtaatggaaaaggagaatggacctgcaagcccatagctgagaagtgttttgatcatgctgctgggacttcctatgtggtcggagaaacgtgggagaagccctaccaaggctggatgatggtagattgtacttgcctgggagaaggcagcggacgcatcacttgcacttctagaaatagatgcaacgatcaggacacaaggacatcctatagaattggagacacctggagcaagaaggataatcgaggaaacctgctccagtgcatctgcacaggcaacggccgaggagagtggaagtgtgagaggcacacctctgtgcagaccacatcgagcggatctggccccttcaccgatgttcgtgcagctgtttaccaaccgcagcctcacccccagcctcctccctatggccactgtgtcacagacagtggtgtggtctactctgtggggatgcagtggctgaagacacaaggaaataagcaaatgctttgcacgtgcctgggcaacggagtcagctgccaagagacagctgtaacccagacttacggtggcaactcaaatggagagccatgtgtcttaccattcacctacaatggcaggacgttctactcctgcaccacagaagggcgacaggacggacatctttggtgcagcacaacttcgaattatgagcaggaccagaaatactctttctgcacagaccacactgttttggttcagactcgaggaggaaattccaatggtgccttgtgccacttccccttcctatacaacaaccacaattacactgattgcacttctgagggcagaagagacaacatgaagtggtgtgggaccacacagaactatgatgccgaccagaagtttgggttctgccccatggctgcccacgaggaaatctgcacaaccaatgaaggggtcatgtaccgcattggagatcagtgggataagcagcatgacatgggtcacatgatgaggtgcacgtgtgttgggaatggtcgtggggaatggacatgcattgcctactcgcagcttcgagatcagtgcattgttgatgacatcacttacaatgtgaacgacacattccacaagcgtcatgaagaggggcacatgctgaactgtacatgcttcggtcagggtcggggcaggtggaagtgtgatcccgtcgaccaatgccaggattcagagactgggacgttttatcaaattggagattcatgggagaagtatgtgcatggtgtcagataccagtgctactgctatggccgtggcattggggagtggcattgccaacctttacagacctatccaagctcaagtggtcctgtcgaagtatttatcactgagactccgagtcagcccaactcccaccccatccagtggaatgcaccacagccatctcacatttccaagtacattctcaggtggagacctaaaaattctgtaggccgttggaaggaagctaccataccaggccacttaaactcctacaccatcaaaggcctgaagcctggtgtggtatacgagggccagctcatcagcatccagcagtacggccaccaagaagtgactcgctttgacttcaccaccaccagcaccagcacacctgtgaccagcaacaccgtgacaggagagacgactcccttttctcctcttgtggccacttctgaatctgtgaccgaaatcacagccagtagctttgtggtctcctgggtctcagcttccgacaccgtgtcgggattccgggtggaatatgagctgagtgaggagggagatgagccacagtacctggatcttccaagcacagccacttctgtgaacatccctgacctgcttcctggccgaaaatacattgtaaatgtctatcagatatctgaggatggggagcagagtttgatcctgtctacttcacaaacaacagcgcctgatgccccacctgacccgactgtggaccaagttgatgacacctcaattgttgttcgctggagcagaccccaggctcccatcacagggtacagaatagtctattcgccatcagtagaaggtagcagcacagaactcaaccttcctgaaactgcaaactccgtcaccctcagtgacttgcaacctggtgttcagtataacatcactatctatgctgtggaagaaaatcaagaaggtacacctgttgtcattcaacaagaaaccactggcaccccacgctcagatacagtgccctctcccagggacctgcagtttgtggaagtgacagacgtgaaggtcaccatcatgtggacaccgcctgagagtgcagtgaccggctaccgtgtggatgtgatccccgtcaacctgcctggcgagcacgggcagaggctgcccatcagcaggaacacctttgcagaagtcaccgggctgtcccctggggtcacctattacttcaaagtctttgcagtgagccatgggagggagagcaagcctctgactgctcaacagacaaccaaactggatgctcccactaacctccagttgtcaatgaaactgattctactgtcctggtgagatggactccacctcgggcccagataacaggataccgactgaccgtgggccttacccgaagaggacagcccaggcagtacaatgtgggtccctctgtctccaagtacccactgaggaatctgcagcctgcatctgagtacaccgtatccctcgtggccataaagggcaaccaagagagccccaaagccactggagtctttaccacactgcagcctgggagctctattccaccttacaacaccgaggtgactgagaccaccattgtgatcacatggacgcctgctccaagaattggttttaagctgggtgtacgaccaagccagggaggagaggcaccacgagaagtgacttcagactcaggaagcatcgttgtgtccggcttgactccaggagtagaatacgtctacaccatccaagtcctgagagatggacaggaaagagatgcgccaattgtaaacaaagtggtgacaccattgtctccaccaacaaacttgcatctggaggcaaaccctgacactggagtgctcacagtctcctgggagaggagcaccaccccagacattactggttatagaattaccacaacccctacaaacggccagcggggaaattctttggaagaagtggtccatgctgatcagagctcctgcacttttgataacctgagtcccggcctggagtacaatgtcagtgtttacactgccaaggatgacaaggaaagtgtccctatctctgataccatcatcccagctgttcctcctcccactgacctgcgattcaccaacattggtccagacaccatgcgtgtcacctgggctccacccccatccattgatttaaccaacttcctggtgcgttactcacctgtgaaaaatgaggaagatgttgcagagttgtcaatttctccttcagacaatgcagtggtcttaacaaatctcctgcctggtacagaatatgtagtgagtgtctccagtgtctacgaacaccatgagagcacacctcttagaggaagacagaaacaggtcttgattccccaactggcattgactttctgatatactgccaactcttttactgtgcactggattgctcctcgagccaccatcactggctacaggatccgccatcatcccgagcacttcagtgggagacctcgagaagatcgggtgccccactctcggaattccatcaccctcaccaacctcactccaggcacagagtatgtggtcagcatcgttgctcttaatggcagagaggaaagtcccttattgattggccaacaatcaacagtttctgatgttccgagggacctggaagttgttgctgcgacccccaccagcctactgatcagctgggatgctcctgctgtcacagtgagatattacaggatcacttacggagaaacaggaggaaatagccctgtccaggagttcactgtgcctgggagcaagtctacagctaccatcagcggccttaaacctggagttgattataccatcaatgtgtatgctgtcactggccgtggagacagccccgcaagcagcaagccaatttccattaattaccgaacagaaattgacaaaccatcccagatgcaagtgaccgatgttcaggacaacagcattagtgtcaagtggctgccttcaagttcccctgttactggttacagagtaaccaccactcccaaaaatggaccaggaccaacaaaaactaaaactgcaggtccagatcaaacagaaatgactattgaaggcttgcagcccacagtggagtatgtggttagtgtctatgctcagaatccaagcggagagagtcagcctctggttcagactgcagtaaccaacattgatcgccctaaaggactggcattcactgatgtggatgtcgattccatcaaaattgcttgggaaagcccacaggggcaagtttccaggtacagggtgacctactcgagccctgaggatggaatccatgagctattccctgcacctgatggtgaagaagacactgcagagctgcaaggcctcagaccgggttctgagtacacagtcagtgtggttgccttgcacgatgatatggagagccagcccctgattggaacccagtccacagctattcctgcaccaactgacctgaagttcactcaggtcacacccacaagcctgagcgcccagtggacaccacccaatgttcagctcactggatatcgagtgcgggtgacccccaaggagaagaccggaccaatgaaagaaatcaaccttgctcctgacagctcatccgtggttgtatcaggacttatggtggccaccaaatatgaagtgagtgtctatgctcttaaggacactttgacaagcagaccagctcagggtgttgtcaccactctggagaatgtcagcccaccaagaagggctcgtgtgacagatgctactgagaccaccatcaccattagctggagaaccaagactgagacgatcactggcttccaagttgatgccgttccagccaatggccagactccaatccagagaaccatcaagccagatgtcagaagctacaccatcacaggtttacaaccaggcactgactacaagatctacctgtacaccttgaatgacaatgctcggagctcccctgtggtcatcgacgcctccactgccattgatgcaccatccaacctgcgtttcctggccaccacacccaattccttgctggtatcatggcagccgccacgtgccaggattaccggctacatcatcaagtatgagaagcctgggtctcctcccagagaagtggtccctcggccccgccctggtgtcacagaggctactattactggcctggaaccgggaaccgaatatacaatttatgtcattgccctgaagaataatcagaagagcgagcccctgattggaaggaaaaagacagttcaaaagacccctttcgtcacccaccctgggtatgacactggaaatggtattcagcttcctggcacttctggtcagcaacccagtgttgggcaacaaatgatctttgaggaacatggttttaggcggaccacaccgcccacaacggccacccccataaggcataggccaagaccatacccgccgaatgtaggacaagaagctctctctcagacaaccatctcatgggccccattccaggacacttctgagtacatcatttcatgtcatcctgttggcactgatgaagaacccttacagttcagggttcctggaacttctaccagtgccactctgacaggcctcaccagaggtgccacctacaacatcatagtggaggcactgaaagaccagcagaggcataaggttcgggaagaggttgttaccgtgggcaactctgtcaacgaaggcttgaaccaacctacggatgactcgtgctttgacccctacacagtttcccattatgccgttggagatgagtgggaacgaatgtctgaatcaggctttaaactgttgtgccagtgcttaggctttggaagtggtcatttcagatgtgattcatctagatggtgccatgacaatggtgtgaactacaagattggagagaagtgggaccgtcagggagaaaatggccagatgatgagctgcacatgtcttgggaacggaaaaggagaattcaagtgtgaccctcatgaggcaacgtgttatgatgatgggaagacataccacgtaggagaacagtggcagaaggaatatctcggtgccatttgctcctgcacatgctttggaggccagcggggctggcgctgtgacaactgccgcagacctgggggtgaacccagtcccgaaggcactactggccagtcctacaaccagtattctcagagataccatcagagaacaaacactaatgttaattgcccaattgagtgcttcatgcctttagatgtacaggctgacagagaagattcccgagagtaaatcatctttccaatccagaggaacaagcatgtctctctgccaagatccatctaaactggagtgatgttagcagacccagcttagagttcttctttctttcttaagccctttgctctggaggaagttctccagcttcagctcaactcacagcttctccaagcatcaccctgggagtttcctgagggttttctcataaatgagggctgcacattgcctgttctgcttcgaagtattcaataccgctcagtattttaaatgaagtgattctaagatttggtttgggatcaataggaaagcatatgcagccaaccaagatgcaaatgttttgaaatgatatgaccaaaattttaagtaggaaagtcacccaaacacttctgctttcacttaagtgtctggcccgcaatactgtaggaacaagcatgatcttgttactgtgatattttaaatatccacagtactcactttttccaaatgatcctagtaattgcctagaaatatctttctcttacctgttatttatcaatttttcccagtatttttatacggaaaaaattgtattgaaaacacttagtatgcagttgataagaggaatttggtataattatggtgggtgattattttttatactgtatgtgccaaagctttactactgtggaaagacaactgttttaataaaagatttacattccaaaa

SEQ ID NO: 3405 - DNA, 7299 bp, Homo sapiens
ggcccgcgccggctgtgctgcacagggggaggagagggaaccccaggcgcgagcgggaagaggggacctgcagccacaacttctctggtcctctgcatcccttctgtccctccacccgtccccttccccaccctctggcccccagcctcctccctatggccactgtgtcacagacagtggtgtggtctactctgtggggatgcagtggctgaagacacaaggaaataagcaaatgctttgcacgtgcctgggcaacggagtcagctgccaagagacagctgtaacccagacttacggtggcaactcaaatggagagccatgtgtcttaccattcacctacaatggcaggacgttctactcctgcaccacagaagggcgacaggacggacatctttggtgcagcacaacttcgaattatgagcaggaccagaaatactctttctgcacagaccacactgttttggttcagactcgaggaggaaattccaatggtgccttgtgccacttccccttcctatacaacaaccacaattacactgattgcacttctgagggcagaagagacaacatgaagtggtgtgggaccacacagaactatgatgccgaccagaagtttgggttctgccccatggctgcccacgaggaaatctgcacaaccaatgaaggggtcatgtaccgcattggagatcagtgggataagcagcatgacatgggtcacatgatgaggtgcacgtgtgttgggaatggtcgtggggaatggacatgcattgcctactcgcagcttcgagatcagtgcattgttgatgacatcacttacaatgtgaacgacacattccacaagcgtcatgaagaggggcacatgctgaactgtacatgcttcggtcagggtcggggcaggtggaagtgtgatcccgtcgaccaatgccaggattcagagactgggacgttttatcaaattggagattcatgggagaagtatgtgcatggtgtcagataccagtgctactgctatggccgtggcattggggagtggcattgccaacctttacagacctatccaagctcaagtggtcctgtcgaagtatttatcactgagactccgagtcagcccaactcccaccccatccagtggaatgcaccacagccatctcacatttccaagtacattctcaggtggagacctaaaaattctgtaggccgttggaaggaagctaccataccaggccacttaaactcctacaccatcaaaggcctgaagcctggtgtggtatacgagggccagctcatcagcatccagcagtacggccaccaagaagtgactcgctttgacttcaccaccaccagcaccagcacacctgtgaccagcaacaccgtgacaggagagacgactcccttttctcctcttgtggccacttctgaatctgtgaccgaaatcacagccagtagctttgtggtctcctgggtctcagcttccgacaccgtgtcgggattccgggtggaatatgagctgagtgaggagggagatgagccacagtacctggatcttccaagcacagccacttctgtgaacatccctgacctgcttcctggccgaaaatacattgtaaatgtctatcagatatctgaggatggggagcagagtttgatcctgtctacttcacaaacaacagcgcctgatgccccacctgacccgactgtggaccaagttgatgacacctcaattgttgttcgctggagcagaccccaggctcccatcacagggtacagaatagtctattcgccatcagtagaaggtagcagcacagaactcaaccttcctgaaactgcaaactccgtcaccctcagtgacttgcaacctggtgttcagtataacatcactatctatgctgtggaagaaaatcaagaaagtacacctgttgtcattcaacaagaaaccactggcaccccacgctcagatacagtgccctctcccagggacctgcagtttgtggaagtgacagacgtgaaggtcaccatcatgtggacaccgcctgagagtgcagtgaccggctaccgtgtggatgtgatccccgtcaacctgcctggcgagcacgggcagaggctgcccatcagcaggaacacctttgcagaagtcaccgggctgtcccctggggtcacctattacttcaaagtctttgcagtgagccatgggagggagagcaagcctctgactgctcaacagacaaccaaactggatgctcccactaacctccagtttgtcaatgaaactgattctactgtcctggtgagatggactccacctcgggcccagataacaggataccgactgaccgtgggccttacccgaagaggacagcccaggcagtacaatgtgggtccctctgtctccaagtacccactgaggaatctgcagcctgcatctgagtacaccgtatccctcgtggccataaagggcaaccaagagagccccaaagccactggagtctttaccacactgcagcctgggagctctattccaccttacaacaccgaggtgactgagaccaccattgtgatcacatggacgcctgctccaagaattggttttaagctgggtgtacgaccaagccagggaggagaggcaccacgagaagtgacttcagactcaggaagcatcgttgtgtccggcttgactccaggagtagaatacgtctacaccatccaagtcctgagagatggacaggaaagagatgcgccaattgtaaacaaagtggtgacaccattgtctccaccaacaaacttgcatctggaggcaaaccctgacactggagtgctcacagtctcctgggagaggagcaccaccccagacattactggttatagaattaccacaacccctacaaacggccagcagggaaattctttggaagaagtggtccatgctgatcagagctcctgcacttttgataacctgagtcccggcctggagtacaatgtcagtgtttacactgtcaaggatgacaaggaaagtgtccctatctctgataccatcatcccagaggtgccccaactcactgacctaagctttgttgatataaccgattcaagcatcggcctgaggtggaccccgctaaactcttccaccattattgggtaccgcatcacagtagttgcggcaggagaaggtatccctatttttgaagattttgtggactcctcagtaggatactacacagtcacagggctggagccgggcattgactatgatatcagcgttatcactctcattaatggcggcgagagtgcccctactacactgacacaacaaacggctgttcctcctcccactgacctgcgattcaccaacattggtccagacaccatgcgtgtcacctgggctccaccaccatccattgatttaaccaacttcctggtgcgttactcacctgtgaaaaatgaggaagatgttgcagagttgtcaatttctccttcagacaatgcagtggtcttaacaaatctcctgcctggtacagaatatgtagtgagtgtctccagtgtctacgaacaacatgagagcacacctcttagaggaagacagaaaacaggtcttgattccccaactggcattgacttttctgatattactgccaactcttttactgtgcactggattgctcctcgagccaccatcactggctacaggatccgccatcatcccgagcacttcagtgggagacctcgagaagatcgggtgccccactctcggaattccatcaccctcaccaacctcactccaggcacagagtatgtggtcagcatcgttgctcttaatggcagagaggaaagtcccttattgattggccaacaatcaacagtttctgatgttccgagggacctggaagttgttgctgcgacccccaccagcctactgatcagctgggatgctcctgctgtcacagtgagatattacaggatcacttacggagaaacaggaggaaatagccctgtccaggagttcactgtgcctgggagcaagtctacagctaccatcagcggccttaaacctggagttgattataccatcactgtgcatgctgtcactggccgtggagacagccccgcaagcagcaagccaatttccattaattaccgaacagaaattgacaaaccatcccagatgcaagtgaccgatgttcaggacaacagcattagtgtcaagtggctgccttcaagttcccctgttactggttacagagtaaccaccactcccaaaaatggaccaggaccaacaaaaactaaaactgcaggtccagatcaaacagaaatgactattgaaggcttgcagcccacagtggagtacgtggttagtgtctatgctcagaatccaagcggagagagtcagcctctggttcagactgcagtaaccaacattgatcgccctaaaggactggcattcactgatgtggatgtcgattccatcaaaattgcttgggaaagcccacaggggcaagtttccaggtacagggtgacctactcgagccctgaggatggaatccatgagctattccctgcacctgatggtgaagaagacactgcagagctgcaaggcctcagaccgggttctgagtacacagtcagtgtggttgccttgcacgatgatatggagagccagcccctgattggaacccagtccacagctattcctgcaccaactgacctgaagttcactcaggtcacacccacaagcctgagcgcccagtggacaccacccaatgttcagctcactggatatcgagtgcgggtgacccccaaggagaagaccggaccaatgaaagaaatcaaccttgctcctgacagctcatccgtggttgtatcaggacttatggtggccaccaaatatgaagtgagtgtctatgctcttaaggacactttgacaagcagaccagctcagggtgttgtcaccactctggagaatgtcggcccaccaagaagggctcgtgtgacagatgctactgagaccaccatcaccattagctggagaaccaagactgagacgatcactggcttccaagttgatgccgttccagccaatggccagactccaatccagagaaccatcaagccagatgtcagaagctacaccatcacaggtttacaaccaggcactgactacaagatctacctgtacaccttgaatgacaatgctcggagctcccctgtggtcatcgacgcctccactgccattgatgcaccatccaacctgcgtttcctggccaccacacccaattccttgctggtatcatggcagccgccacgtgccaggattaccggctacatcatcaagtatgagaagcctgggtctcctcccagagaagtggtccctcggccccgccctggtgtcacagaggctactattactggcctggaaccgggaaccgaatatacaatttatgtcattgccctgaagaataatcagaagagcgagcccctgattggaaggaaaaagacagacgagcttccccaactggtaacccttccacaccccaatcttcatggaccagagatcttggatgttccttccacagttcaaaagacccctttcgtcacccaccctgggtatgacactggaaatggtattcagcttcctggcacttctggtcagcaacccagtgttgggcaacaaatgatctttgaggaacatggttttaggcggaccacaccgcccacaacggccacccccataaggcataggccaagaccatacccgccgaatgtaggacaagaagctctctctcagacaaccatctcatgggccccattccaggacacttctgagtacatcatttcatgtcatcctgttggcactgatgaagaacccttacagttcagggttcctggaacttctaccagtgccactctgacaggcctcaccagaggtgccacctacaacatcatagtggaggcactgaaagaccagcagaggcataaggttcgggaagaggttgttaccgtgggcaactctgtcaacgaaggcttgaaccaacctacggatgactcgtgctttgacccctacacagtttcccattatgccgttggagatgagtgggaacgaatgtctgaatcaggctttaaactgttgtgccagtgcttaggctttggaagtggtcatttcagatgtgattcatctagatggtgccatgacaatggtgtgaactacaagattggagagaagtgggaccgtcagggagaaaatggccagatgatgagctgcacatgtcttgggaacggaaaaggagaattcaagtgtgaccctcatgaggcaacgtgttatgatgatgggaagacataccacgtaggagaacagtggcagaaggaatatctcggtgccatttgctcctgcacatgctttggaggccagcggggctggcgctgtgacaactgccgcagacctgggggtgaacccactcccgaaggcactactggccagtcctacaaccagtattctcagagataccatcagagaacaaacactaatgttaattgcccaattgagtgcttcatgcctttagatgtacaggctgacagagaagattcccgagagtaaatcatctttccaatccagaggaacaagcatgtctctctgccaagatccatctaaactggagtgatgttagcagacccagcttagagttcttctttctttcttaagccctttgctctggaggaagttctccagcttcagctcaactcacagcttctccaagcatcaccctgggagtttcctgagggttttctcataaatgagggctgcacattgcctgttctgcttcgaagtattcaataccgctcagtattttaaatgaagtgattctaagatttggtttgggatcaataggaaagcatatgcagccaaccaagatgcaaatgttttgaaatgatatgaccaaaattttaagtaggaaagtcacccaaacacttctgctttcacttaagtgtctggcccgcaatactgtaggaacaagcatgatcttgttactgtgatattttaaatatccacagtactcactttttccaaatgatcctagtaattgcctagaaatatctttctcttacctgttatttatcaatttttcccagtatttttatacggaaaaaattgtattgaaaacacttagtatgcagttgataagaggaatttggtataattatggtgggtgattattttttatactgtatgtgccaaagctttactactgtggaaagacaactgttttaataaaagatttacattccacaacttgaaaaaaaaaaaaaaaaaaa

SEQ ID NO: 3406 - DNA, 9157 bp, Homo sapiens
cataatgcattagcgttatggccatgatgttgtcatgagttttgtatgggagaaaaaaaatcaatttatcacccatttattattttttaaccttcttcatgcaagcttattttctactaaaacagttttggaattattaaaagcattgctgatacttacttcagatattatgtctaggctctaagaatggtttcgacatcctaaacagccatatgatttttaggaatctgaacagttcaaattgtaccctttaaggatgttttcaaaatgtaaaaaatatatatatatatatatattccctaaaagaatattcctgtttattcttctagggaagcaaactgttcatgatgcttaggaagtcttttcagagaatttaaaacagattgcatattaccatcattgctttaacattccaccaattttactactagtaacctgatatacactgctttattttttcctctttttttccctctattttccttttgcctccccctccctttgctttgtaactcaatagaggtgccccaactcactgacctaagctttgttgatataaccgattcaagcatcggcccgaggtggaccccgctaaactcttccaccattattgggtaccgcatcacagtagttgcggcaggagaaggtatccctatttttgaagattttgtggactcctcagtaggatactacacagtcacagggctggagccgggcattgactatgatatcagcgttatcactctcattaatggcggcgagagtgcccctactacactgacacaacaaacgggtgaattttgaaaacttctgcgtttgagacatagatggtgttgcatgctgccaccagttactccggttaaatatggatgtttcatgggggaagtcagcaattggccaaagattcagatagggtggattggggggataaggaatcaaatgcatctgctaaactgattggagaaaaacacatgcaagtattcttcagtacactctcatttaaaccacaagtagatataaagctagagaaatacagatgtctgctctgttaaatataaaatagcaaatgttcattcaatttgaagacctagaatttttcttcttaaataccaaacacgaataccaaattgcgtaagtaccaattaattataagaaatatatcaccaaaatgtaccatcatgctcttccttctaccctttgataaactctaccatgctccttctttgtagctaaaaacccatcgaaatttagggtagagtggatgggcattgttttgaggtaggagaaaagtaaacttgggagcattctaggttttgttgctgtcactaggtaaagaaacacctctttaaccacagtctggggacaagcatgcaacattttaaaggttctctgctgtgcatgttcacttgtaagtagaattcactgaatggaactgtagctctagatatctcacatggggggaagtttaggaccctcttgtctttttgtctgtgtgtatgtatttctttgtaaagtactgctatgtttctctttgctgtgtggcaacttaagcctcttcggcctgggataaaataatctgcagtggtattaataatgtacataaagtcaacatatttgaaagtagattaaaatcttttttaaatatatcaatgatggcaaaaaggttaaagggggcctaacagtactgtgtgtagtgttttatttttaacagtagtacactataacttaaaatagacttagattagactgtttgcatgattatgattctgtttcctttatgcatgaaatattgattttacctttccagctacttcgttagctttaattttaaaattacattaactgagtcttccttcttgttcgaaaccagctgttcctcctcccactgacctgcgattcaccaacattggtccagacaccatgcgtgtcacctgggctccacccccatccattgatttaaccaacttcctggtgcgttactcacctgtgaaaaatgaggaagatgttgcagagttgtcaatttctccttcagacaatgcagtggtcttaacaaatctcctgcctggtacagaatatgtagtgagtgtctccagtgtctacgaacaacatgagagcacacctcttagaggaagacagaaaacaggtcttgattccccaactggcattgacttttctgatattactgccaactcttttactgtgcactggattgctcctcgagccaccatcactggctacaggatccgccatcatcccgagcacttcagtgggagacctcgagaagatcgggtgccccactctcggaattccatcaccctcaccaacctcactccaggcacagagtatgtggtcagcatcgttgctcttaatggcagagaggaaagtcccttattgattggccaacaatcaacagtttctgatgttccgagggacctggaagttgttgctgcgacccccaccagcctactgatcagctgggatgctcctgctgtcacagtgagatattacaggatcacttacggagaaacaggtacagcagtaaaatgctattttacactctgattaaatcagattctgttgtggataacctgaaagcccaacagtgaacaaagaattaaagaaactttggcaagtccattcaacggagcccttgttttttccaagaaaatacgtaagatatagatgatataatttgttctaaaacccaaataaaaagttgtttatatactacaactagagggggaacggcagagctgaggaaataaaaggattgtaaattcacaaacatattatcagtggtggaaataagtgatttttattttttcttctctttacttttctgtattttccaaattttatttaaaaggaatgtattctgttaaaagttttaaaaaggacacaatgcatgcaatcctgggttgagggcttaccttctcccacttctaatgctactctactactcagtgacattttaaagctgaaatgttaaaacagcgctaactgtaattttctctcaatgtttatacacttaccaaggtttgctacatgcataaatacccctttctgttcaagatagcgctctttaaaagggaataagcaagaagatgtgatttacatgctgctataaatgtggtaattcaattaatcagtaatacccaagtagctctaaacccctcacactctgaactaaccctttttcatacaggaggaaatagccctgtccaggagttcactgtgcctgggagcaagtctacagctaccatcagcggccttaaacctggagttgattataccatcactgtgtatgctgtcactggccgtggagacagccccgcaagcagcaagccaatttccattaattaccgaacagaaattgacaaaccatcccagatgcaagtgaccgatgttcaggacaacagcattagtgtcaagtggctgccttcaagttcccctgttactggttacagagtaaccaccactcccaaaaatggaccaggaccaacaaaaactaaaactgcaggtccagatcaaacagaaatgactattgaaggcttgcagcccacagtggagtatgtggttagtgtctatgctcagaatccaagcggagagagtcagcctctggttcagactgcagtaaccagtacgtaaccactgcttggtttccattttcaaagtcaaattttgttcttgggtgtctgaatgcccacgacatgtcttttgcaattacacatagggaaagtgaacttgttggttagtatatgtcttgagctgagccctttacgaacatcttttttccttctcagtgccaagcgaggaatttacagagaaagaagttgtgaaaccaccatagttagttgctgtgctttgaatttcttttgctcaaatggcctcagcgaaatcttatttgcctatagcaaatctacaaaaaattttcctagaccgtcttttctacaactggatggtaaagttgattgaagtgtgcctcatgtagctttatgtttggggcatttgaagggctatggctggaccagagtgtaatataaatgcttaatagagaggggaaaagaagagtgtaagaaccattatagggctgggctcacgcctgtaatcccagcattttgggaggctgaggcaggcggatcacgaggtcaggagttcgagaccagcctgaccaacatggtgaaaccccatctctactaaaaatacaaaaattagccagtcgcggtggcacgtgcctgtaatcccagctactcaggaggctgaggcagaagaatcacttggacccaggaggcagaagttgcagtgagccaagatcatgcctctgcaccccagcctaggtgatagagtgagactccatctcaaaaaaaaacaaaacaaaacaattataacaatttgaatctgacattgcaaatcagctttaccacttccaaggtatagaaaatccaggtctatgagactaacatcacattgtaaaaatcaaatcgtggtagaatacctttaaattaatataaatacatccccattgtggggacattttgcagggtatctgcttatctcacatacacctatgttttaataagtgatgcaacattgtatattttctaaaccaagaaaaattaagcaagtgtttaagtgatttttccttttgatagtgggttaattggacttcatcaaagaaaatggtatctgcaaaactgctttgcatgttataaaaatgcttatttcacaacttgcttttcacataacctcttaccattaatttgcctaacagacattgatcgccctaaaggactggcattcactgatgtggatgtcgattccatcaaaattgcttgggaaagcccacaggggcaagtttccaggtacagggtgacctactcgagccctgaggatggaatccatgagctattccctgcacctgatggtgaagaagacactgcagagctgcaaggcctcagaccgggttctgagtacacagtcagtgtggttgccttgcacgatgatatggagagccagcccctgattggaacccagtccacaggtatatggttaattgcaccaccaggtgcccatgggagcagcggctttatgccctactgaatgaattatgcttcactgggctattgattcccgtgtaagggtgaaaaagaattattaggaaagatcctctttaaagaggaatggtaagaaacaataaaacttaggtgatatttaaggaaacaagtctgattaaaagaaattttggagtatcctggcttatacacaagaccataaagcaagacatttgaagaggatactaaagttgtggattatttcctaagctctgactccctgtgattaccctcactatgtataaagaaaagaagtttggcattacagagcttacttataaaaaggaacccaaactcgggcatttcatagcagcatgattctgagcacacgtgggtaagacctttcttctctggttagatatcatatgctggtgtataattagcttaaatgattgtgatttagacacctaggaaataatcaatagggcaattgctttccataatactttatcttcttgtgctttatttctgaagcagagtagaatgctaaagatgtatcctagtgacagcataaaccctagaggtgacagtctgtattattgcttttcgcttctcttttcttcttctgttgggagccagttttcttcttacgccgcattacagagagaacgtcaaatttagcagccatatctgccatagggtccaaataaagagacaataaaaacattattctctcttttttggatggaatactgcgtgaaatggttatccatacaaagatactttatgtagaatagaaaaaggaggccgggtgcagtggctcacacatgtaatcctagtgctttgggaggctaagccgggagcactgattgaggccaggagttcatgatcagcctgggcaatgaagtgagaccccgtctctacaaaaaaatatgaaaaaattagcgaggtgtggtgacacatgcctgtagtcccagctactcaagaggctgaggtagaggatcacttgagcctacgagttcaaggctgcagtgagctatgataactccactgcactgctgcctggatgacacagagagaccgtttctaaattaattaattaacaattttaagaaagaaaaagggccattgcttatttttccatacaaaagtaaaataaatcataatggccaataagccaatgtaactttttttttaagggaaagcaaaacttgtaaaacctaaaatctcttagagttttggcatttacccaaatgttttcagtgattctgagaattggtggatataaaacacatttctcagcaaacactttcttcattttgcatcccttactgtactttcttgtactgaatctttgcttgaccagggaacccacctagcccaacaagaacaatccattctacttcttggaactcactttattttccttttcccccatttcctataagataacctctaaccaatgacaatctcgacagctattcctgcaccaactgacctgaagttcactcaggtcacacccacaagcctgagcgcccagtggacaccacccaatgttcagctcactggatatcgagtgcgggtgacccccaaggagaagaccggaccaatgaaagaaatcaaccttgctcctgacagctcatccgtggttgtatcaggacttatggtggccaccaaatatgaagtgagtgtctatgctcttaaggacactttgacaagcagaccagctcagggagttgtcaccactctggagaatgtcagcccaccaagaagggctcgtgtgacagatgctactgagaccaccatcaccattagctggagaaccaagactgagacgatcactggcttccaagttgatgccgttccagccaatggccagactccaatccagagaaccatcaagccagatgtcagaagctacaccatcacaggtttacaaccaggcactgactacaagatctacctgtacaccttgaatgacaatgctcggagctcccctgtggtcatcgacgcctccactgccattgatgcaccatccaacctgcgtttcctggccaccacacccaattccttgctggtatcatggcagccgccacgtgccaggattaccggctacatcatcaagtatgagaagcctgggtctcctcccagagaagtggtccctcggccccgccctggtgtcacagaggctactattactggcctggaaccgggaaccgaatatacaatttatgtcattgccctgaagaataatcagaagagcgagcccctgattggaaggaaaaagacagacgagcttccccaactggtaacccttccacaccccaatcttcatggaccagagatcttggatgttccttccacagttcaaaagacccctttcgtcacccaccctgggcatgacactggaaatggtattcagcttcctggcacttctggtcagcaacccagtgttgggcaacaaatgatctttgaggaacatggttttaggcggaccacaccgcccacaacggccacccccataaggcataggccaagaccatacccgccgaatgtaggacaagaagctctctctcagacaaccatctcatgggccccattccaggacacttctgagtacatcatttcatgtcatcctgttggcactgatgaagaacccttacagttcagggttcctggaacttctaccagtgccactctgacaggcctcaccagaggtgccacctacaacatcatagtggaggcactgaaagaccagcagaggcataaggttcgggaagaggttgttaccgtgggcaactctgtcaacgaaggcttgaaccaacctacggatgactcgtgctttgacccctacacagtttcccattatgccgttggagatgagtgggaacgaatgtctgaatcaggctttaaactgttgtgccagtgcttaggctttggaagtggtcatttcagatgtgattcatctagatggtgccatgacaatggtgtgaactacaagattggagagaagtgggaccgtcagggagaaaatggccagatgatgagctgcacatgtcttgggaacggaaaaggagaattcaagtgtgaccctcatgaggcaacgtgttatgatgatgggaagacataccacgtaggagaacagtggcagaaggaatatctcggtgccatttgctcctgcacatgctttggaggccagcggggctggcgctgtgacaactgccgcagacctgggggtgaacccagtcccgaaggcactactggccagtcctacaaccagtattctcagagataccatcagagaacaaacactaatgttaattgcccaattgagtgcttcatgcctttagatgtacaggctgacagagaagattcccgagagtaaatcatctttccaatccagaggaacaagcatgtctctctgccaagatccatctaaactggagtgatgttagcagacccagcttagagttcttctttctttcttaagccctttgctctggaggaagttctccagcttcagctcaactcacagcttctccaagcatcaccctgggagtttcctgagggttttctcataaatgagggctgcacattgcctgttctgcttcgaagtattcaataccgctcagtattttaaatgaagtgattctaagatttggtttgggatcaataggaaagcatatgcagccaaccaagatgcaaatgttttgaaatgatatgaccaaaattttaagtaggaaagtcacccaaacacttctgctttcacttaagtgtctggcccgcaatactgtaggaacaagcatgatcttgttactgtgatattttaaatatccacagtactcactttttccaaatgatcctagtaattgcctagaaatatctttctcttacctgttatttatcaatttttcccagtatttttatacggaaaaaattgtattgaaaacacttagtatgcagttgataagaggaatttggtataattatggtgggtgattattttttatactgtatgtgccaaagctttactactgtggaaagacaactgttttaataaaagatttacattccacaaaaaaaaaaaaaaaaaaaaaaaaaaaaaa

SEQ ID NO: 3407 - DNA, 3176 bp, Homo sapiens
gctggaggttcgctagccgaagcggctgcatctggcgccgcgtctgccccgcgtgctcggagcggattctgcccgccgtccccggagccctcggcgccccgctgagcccgcgatcacttcctccctgtgaccaaccggcgctgcaggttagagcctggcaatgccgtttgggtgtgtgactctgggcgacaagaagaactataaccagccatcggaggtgactgacagatatgatttgggacaggtcatcaagactgaggagttttgtgaaatcttccgggccaaggacaagacgacaggcaagctgcacacctgcaagaagttccagaagcgggacggccgcaaggtgcggaaagctgccaagaacgagataggcatcctcaagatggtgaagcatcccaacatcctacagctggtggatgtgtttgtgacccgcaaggagtactttatcttcctggagctggccacggggagggaggtgtttgactggatcctggaccagggctactactcggagcgagacacaagcaacgtggtacggcaagtcctggaggccgtggcctatttgcactcactcaagatcgtgcacaggaatctcaagctggagaacctggtttactacaaccggctgaagaactcgaagattgtcatcagtgacttccatctggctaagctagaaaatggcctcatcaaggagccctgtgggacccccgagtatctgggcaagcagggggtggggcaggggcagggggataatggggggcagccttcagggagctgctctgggcagggggaaaatgtgctcatctcaggaagctggtgtggatggtactggacctggctaggcctgatactgaccagcagatgggcgctgtgtttgtagccccagaggtggtaggccggcagcggtatggacgccctgtggactgctgggccattggagtcatcatgtacatcctgctttcaggcaacccacctttctatgaggaggtggaagaagatgattatgagaaccatgataagaatctcttccgcaagatcctggctggtgactatgagtttgactctccatattgggatgatatttcgcaggcagccaaagacctggtcacaaggctgatggaggtggagcaagaccagcggatcactgcagaagaggccatctcccatgagtggatttctggcaatgctgcttctgataagaacatcaaggatggtgtctgtgcccagattgaaaagaactttgccagggccaagtggaagaaggctgtccgagtgaccaccctcatgaaacggctccgggcaccagagcagtccagcacggctgcagcccagtcggcctcagccacagacactgccacccccggggctgcaggtggggccacagctgcagctgcgagtggagctacctcagcccctgagggtgatgctgctcgtgctgcaaagagtgataatgtggcccccgcagaccgtagtgccaccccagccacagatggaagtgccaccccagccactgatggcagtgtcaccccagccaccgatggaagcatcactccagccactgatgggagtgtcaccccagccactgacaggagcgctactccagccactgatgggagagccacaccagccacagaagagagcactgtgcccaccacccaaagcagtgccatgctggccaccaaggcagctgccacccctgagccggctatggcccagccggacagcacagccccagagggcgccacaggccaggctccaccctctagtaaaggggaagaggctgctggttatgcccaggagtctcaaagggaggaggccagctgagtaggcagcctggtgagggggggcaggggatgggcaggagggtgggagagtggatgaggggcttctcactgtacatagagtcactggcatgatgccctcgctcccccatgcccccacatcccagtggggcattactaggggtcacgggagagcagtctcgtctcctgtgtgtatgtgtgtgagtggtgggcaggccagtggcagggccggccccagcccctgcatggattccttgtggcttttctgtcttttgctagcttcaccagtttctgttccttgtgggatgctgctctagggatactcagggggctcctgctctccttccccttcccttcttgcctcaccattcccctaggcaggccctgcaggtcccacactctcccaggccctaaacttgggcggccttgccctgagagctggtcctccagcgaggccctgtcagcggtcttaggctcctgcacatgaaggtgtgtgcctgtggtgtgtgggctgctctaggagcagatacaggctggtatagaggatgcagaaaggtagggcagtatgtttaagtccagacttggcacatggctagggatactgctcactagctgtggaggtcctcaggagtggagagaatgagtaggagggcagaagcttccatttttgtccttcccaagaccctgttatttgtgttatttcctgcctttccgagtcctgcagtgggctgccctgtaccctgaacctcatgagcctctaagggaaaggaggaacaattaggacgtggcaatgagacctggcagggcagagtacaagcccagcacccagtgtcccagccttactgggtccttaccctaggccaaacagggagggctgatacctccttgctcttcctagatgcccacctcctacaatctcagcccacaagtcctctccaccctagggggcttgctgcatggcaataactcataatctgatttggaggtttgccctttacaggggcagattttctgctcagttcaacaatgaaatgaagaggagctccctctttctacagctcacttctatcagaggcccaggtgcctcagagccacattgagttgctttttctgggatgaggaagtagggttaaactccccagtttcctgagggaggctcctgacaggtgccctttgtcagaccctaccacagcctggataggcagccacattggtcctcgcccttgctcggcactccgtggtggtcctgcccttctccctgcatgcctgtgggtctgctctggtgtgtgaaggtcggtgggttaactgtgtgcctactgaacctggcaaataaacatcaccctgcaaagcctaaaaaaaaaaaaaaaaaaa

SEQ ID NO: 3408 - DNA, 4901 bp, Homo sapiens
ggaggtagatacctggaggtgccacatccaagctccagttctgtgtgcactggctttggccagggggacagccaggggttctcagccagggattctctcccctctggccggcctcagggccagcatctcacagcacacagcaccaggcgactgcctgctgccacacctgcctgatgggaggtttccttcacggttactttgcgattgggatgggtcagaatgtgtgtgctgggacaggacggtgggtcttgtctcaagctcagcagcggacacagcatgtgcctagaacagatggccacgtgggaggcctccaggctgctgttctgccctatatgaggtccctgggcctgcactctctgcactgatgaggtgtgccctgcaccaccctctggtgagcttccgggaggcccacatgctctcaatgcacaggaaaacagcagctacctttctgtgcggttgcctggatccctgccaattcaaaggagtgacatcttacacggagttaggcttagagttggcaccagagatggaatcactgtgaagctaatgaagttaaacttccatcgtctttcactcactgacagaagcctcacaaggccctaactttgtatgtatcattttccattctttttggggcctccgaaactgtataaatttcaggttttagaaaacctgggtgtgtccctggttggcatataaagcggaatcacacatagtccccttgctccttgaaggttgctgaggaacggcacacattagagagtaaacaggcctttcagtgagttctctgcagtttgtccacagtgttgaaaaaagattacagctttcccagctgtgcacctgaggaagtacataggtgatttgcatttggggaccttgcaatatgagaaatgcatgtgtttaaacagtggattccattcagctcagccggaggccggctctgagatgctcactgagagacagttgggcctgagaaccatagggtggggttgagagcatggcagattcttgtttcccatctcatcttcagcctcacagcgcacatactgagtgcaagcagaaagaaatatctgtaccatttaaactgcctcaacactccctcacctttctctctttgccagcacacagttaactgtgcatatgttatgttgatgctgctgttcttctgtgttatctcatttcttactcataacagctccctgcagaagcagtccttgtttctgataaggacaccaagccccaagggaattctgtagcatgccccactctacataggttgaaagacccggaatggctgtttgatcccatctccatgctctctgggactgcctcctggggatgctctacaggacatcctggtccacacgccttctgtccttgccctccttgcccctccaggctccaccgctgaggctgcccgcatcatctaccccccagaggcccaaaccatcattgtcaccaaaggccagagtctcattctggagtgtgtggccagtggaatcccacccccacgggtcacctgggccaaggatgggtccagtgtcaccggctacaacaagacgcgcttcctgctgagcaacctcctcatcgacaccaccagcgaggaggactcaggcacctaccgctgcatagccgacaatggggttgggcagcccggggcagcggtcatcctctacaatgtccaggtgtttgaaccccctgaggtcaccatggagctatcccagctggtcatcccttggggccagagtgccaagcttacctgtgaggtgcgtgggaaccccccgccctccgtgctgtggctgaggaatgctgtgcccctcatctccagccagcgcctccggctctcccgcagggccctgcgcgtgctcagcatggggcctgaggacgaaggcgtctaccagtgcatggccgagaacgaggttgggagcgcccatgccgtagtccagctgcggacctccaggccaagcataaccccaaggctatggcaggatgctgagctggctactggcacacctcctgtatcaccctccaaactcggcaaccctgagcagatgctgagggggcaaccggcgctccccagacccccaacgtcagtggggcctgcttccccgcagtgtccaggagagaaggggcagggggctcccgccgaggctcccatcatcctcagctcgccccgcacctccaagacagactcatatgaactggtgtggcggcctcggcatgagggcagtggccgggcgccaatcctctactatgtggtgaaacaccgcaagcaggtcacaaattcctctgacgattggaccatctctggcattccagccaaccagcaccgcctgaccctcaccagacttgaccccgggagcttgtatgaagtggagatggcagcttacaactgtgcgggagagggccagacagccatggtcaccttccgaactggacggcggcccaaacccgagatcatggccagcaaggagcagcagatccagagagacgaccctggagccagtccccagagcagcagccagccagaccacggccgcctctcccccccagaagctcccgacaggcccaccatctccacggcctccgagacctcagtgtacgtgacctggattccccgtgggaatggtgggttcccaatccagtccttccgtgtggagtacaagaagctaaagaaagtgggagactggattctggccaccagcgccatccccccgtcgcggctgtccgtggagatcacgggcctagagaaaggcacctcctacaagtttcgagtccgggctctgaacatgctgggggagagcgagcccagcgccccctctcggccctacgtggtgtcgggctacagcggtcgcgtgtacgagaggcccgtggcaggtccttatatcaccttcacggatgcggtcaatgagaccaccatcatgctcaagtggatgtacatcccagcaagtaacaacaacaccccaatccatggcttttatatctattatcgacccacagacagtgacaatgatagtgactacaagaaggatatggtggaaggggacaagtactggcactccatcagccacctgcagccagagacctcctacgacattaagatgcagtgcttcaatgaaggaggggagagcgagttcagcaacgtgatgatctgtgagaccaaagctcggaagtcttctggccagcctggtcgactgccacccccaactctggccccaccacagccgccccttcctgaaaccatagagcggccggtgggcactggggccatggtggctcgctccagcgacctgccctatctgattgtcggggtcgtcctgggctccatcgttctcatcatcgtcaccttcatccccttctgcttgtggagggcctggtctaagcaaaaacatacaacagacctgggttttcctcgaagtgcccttccaccctcctgcccgtatactatggtgccattgggaggactcccaggccaccaggccagtggacagccctacctcagtggcatcagtggacgggcctgtgctaatgggatccacatgaataggggctgcccctcggctgcagtgggctacccgggcatgaagccccagcagcactgcccaggcgagcttcagcaggtagcgcattcttgggtgtgggcggcaggtatgggacacccaggagggagtggctgggctgccttggggggcctcctccctcctagggtctcaggctgggctgctgggccaggctttctttagtcaggagcagatgctcctgttgttgagtgaagactggaaagttacctggactccccgccgtggccgtctcattactcttccttttgagcagcagagtgacaccagcagcctgctgaggcagacccatcttggcaatggatatgacccccaaagtcaccagatcacgaggggtcccaagtctagcccggacgagggctctttcttatacacactgcccgacgactccactcaccagctgctgcagccccatcacgactgctgccaacgccaggagcagcctgctgctgtgggccagtcaggggtgaggagagcccccgacagtcctgtcctggaagcagtgtgggaccctccatttcactcagggcccccatgctgcttgggccttgtgccagttgaagaggtggacagtcctgactcctgccaagtgagtggaggagactggtgtccccagcaccccgtaggggcctacgtaggacaggaacctggaatgcagctctccccggggccactggtgcgtgtgtcttttgaaacaccacctctcacaatttaggcagaagctgatatcccagaaagactatatattgttttttttttttttaaaaaaaaaagaagaaaaaagagacagagaaaattggtatttatttttctattatagccatatttatatatttatgcacttgtaaataaatgtatatgttttataattctggagagacataaggagtcctacccgttgaggttggagagggaaaataaagaagctgccacctaacaggagtcacccaggaaagcaccgcacaggctggcgcgggacagactcctaacctggggcctctgcagtggcaggcgaggctgcaggaggcccacagataagctggcaagaggaaggatcccaggcacatggttcatcacgagcatgagggaacagcaaggggcacggtatcacagcctggagacacccacacagatggctggatccggtgctacgggaaacattttcctaagatgcccatgagaacagaccaagatgtgtacagcactatgagcattaaaaaaccttccagaatcaataatccgtggcaacatatctctgtaaaaacaaacactgtaacttctaaataaatgtttagtcttccctgtaaaaaaaaaaaaaaaaaa

SEQ ID NO: 3409 - DNA, 7951 bp, Homo sapiens; identical to SEQ ID NO: 3404

SEQ ID NO: 3410 - DNA, 2124 bp, Homo sapiens
actgtaagtatatatgtatggatatggttgtaacattttccctccctctccctctaatttaaaaggtgagtgtttctatggttggctagaacctctgttggccagaatagctgagaactacacggctgtcgtaagtccagatattgcatccatagatctgaacacgtttgaattcaacaaaccttctccttatggaagtaaccataaccgtggaaattttgactggagtctttcatttggctgggagtcgcttcctgatcatgagaagcaaagaaggaaagatgaaacctacccaattaaaacacccacttttgcaggaggacttttttccatatcaaaagaatattttgagtatattggaagctatgatgaagaaatggaaatctggggaggtgaaaatatagaaatgtctttcagagtatggcaatgtggtgggcagttggagattatgccttgctctgttgttggacatgtttttcgcagcaaaagccctcatagctttccaaaaggcactcaggtgattgctagaaaccaagttcgccttgcagaagtctggatggatgaatacaaggaaatattttataggagaaatacagatgcagcaaaaattgttaaacaaaaagcatttggtgatctttcaaaaagatttgaaataaaacaccgccttcagtgtaaaaattttacatggtatctgaacaacatttatccagaggtgtatgtgccagaccttaatcctgttatatctggatacattaaaagcgttggtcagcctctatgtctggatattggagaaaacaatcaaggaggcaaaccattaattatgtatacatgtcatggacttgggggaaaccagtactttgaatactctgctcaacatgaaattcggcacaacatccagaaggaattatgtcttcatgctgctcaaggtctcgttcagctgaaggcatgtacctacaaaggtcacaagacagttgtcactggagagcagatatgggagatccagaaggatcaacttctatacaatccattcttaaaaatgtgcctttcagcaaatggagagcatccaagtttagtgtcatgcaacccatcagatccactccaaaaatggatacttagccaaaatgattaagtgttccttaaaattaagttgaaaaaggaaatattctttctcataaaactgtgactaggcatacactgtagtttttgaaaattatgcaaaagcagctaaatgtaacttattccaagtgcatttttcttatttatatctttatgtagcactactacagaaattctgcaagtttctgtttcaaagcacaataactagtaataccaaagactatttcaaaatgtccagatgtaggggaagagatgtttacagtatgatgaaaataattttccaagtaaagtgaagtttgtgtgttttgtacacttagggatatatatatatagctacattcacacactcacaatttaaaatatttcccctagttttttggggggataggaagaaagatttgttactgtatttttttaactacataaaaatagatcaataaatgtcagcattggcctctgtgtacaaaccaagagcttttacagatccagaatttattagtttaaaatgcaggtgaacttttttttgcgtttggtttacttgtctgtcaaatgtttccttaaacatgaaactgaataaggagaagagtatttttaacacttaaatttcttggcaaattttaaaacattttttagtctgtaatacactccacttgaagcacttaagtcttccttaaatgacttttcttaagtaatgatactgtgtgttttcccaaagcacttttaaaaaaatttttataaattactatctgttgaaaaggtgtccttttcctttcttctagtatttttttcttaccaaaattcactaatcttgaatgtttgtgatattaaatttcaaatgcagaatacttgactcatttaaagctaaattttgttactgattcaattataattgtaatggatttttgactttgtaatggattcttttcatcaaaaagccttatttttttatctatgtggaaaacacaataaaaaatcctcaacactattgtaaaaaaaaaaaaaaaaaaa

SEQ ID NO: 3411 - DNA, 4848 bp, Homo sapiens
gacacaagggtcaagtagtccagcattctacagtttgtgtgtttgagagagaaataagcccataaaaacattctaaccttcagattaagggacctgcagcaaagtttgtaactgaccagtttgctgggctggcttgaacagcgggcttacaggagtcctaagcctgtgttctatcttaagtgttttctgcattctctcccagcggatctgattcctgttctgaagaattgaagttgagcatcgttagttaaattcagctgctgcctgactgtataccacagcaaaggctttggaaacatttttcagttaaaacaataatgactttcttggagtgtaatcccagtggaggctgttctacgtatagcctgaaagaatacttaactaccatacgcaattctgcagagaccttgtaaaaatcacactttacaccaaacaactgagtgattctgaattggttgggggaatcttagttgtagatatcaattcaccttcttgaagattcaaccactgctactcagagctgctgctgaaataccatgtctaagaactcagagttcatcaatctgtcatttttattagatcatgagaaggaaatgatcctgggcgtcctaaagagagatgaatatttgaaaaaagtggaggacaagagaataaggaagctgaaaaatgaactcttagaagcaaaacgtagaagtgggaaaactcaacaagaggccagcagagtttgtgttcactgtcacagaaacctgggcctaatctttgaccggggagacccttgtcaggcttgctcactgagggtatgcagggagtgtcgagttgcaggccccaatggcagctggaagtgcactgtctgtgacaaaatcgcgcagctaaggattataactggtgagtggttttttgaagaaaaggcaaaacgtttcaagcaagtcaatgttctcggcactgatgttgtccgacagtccattttaagaagaagtccaggagctgaagaagtacagagccaagagcaaacccgccaggatgcagaaaagtcagacacttcacctgttgctgggaagaaggccagccatgatgggcccaagagaaagggatttcttcttagcaagttcagatcggcaaccagaggagaaatcataactcccaaaactgacactgggcggagctatagcttggacttagacggtcaacattttcggagtttaaaatcacctcctggttcagacaggggaagcactggctcatcagatctcaatgaccaggaacctggtcctaggaccccgaagagcagtcggagcaatggtgtgaccccaggcactcagagttcaccagccccaagcacacgaactgtgacctcagtcatcagtagagagtatggttttgaaaattccatggatttggctgctattgaaggtacctctcaggagctcacaaagagtcaccgcagaaacacttctggcacaccttccatagcagtgtctggaacctctctctcctcagatcagagtcgatctgagttagatttgagtgagtcatttacagaagactcagaggatactgtaagcataagaagcaagtctgtccctggggctttagacaaggactccttggaagagactgaagaaagcattgatgccttagtgtcctcgcagttatctacaaacactcaccgtctggcaagtggcctatcaactaccagccttaacagcatgatgagcgtttacagtgaaacgggagactatggcaacgtgaaagtcagtggtgaaatccttctccatatcagctactgctacaaaactggtgggctgtacatttttgtcaagaattgcagaaatctggccataggagatgaaaagaaacagtggacagatgcttatgtcaagtcatatcttcttcctgacaagtcccggaacaacaagcgtaagaccaaaatcagaacaggcaccaatccagaattcaatgaaacactaaagtacactatcagccatacccagctggaaacaagaactctgcagctctcagtctggcactatgatcgatttggacgtaatagcttcctcggggaagtagagattccttttgactcatggaactttgaaaatccaactgatgagtggtttgtgcttcaacccaaggtggagtttgctcctgatattggccttcaatacaaaggagagctgacagttgttttacgttacattcccccagaagagaacctgatgcttccaccagaacaactccaaggaaataagacttttaaaaagggaaagaagaaggagtcacctgtaatctctggaggaatactagaagtgttcatcaaagaggcaaagaatttgacagcagtgaagtcaggaggcacttctgatagctttgtgaagggctacctgctccctgatgatagcaaagccaccaagcacaaaactctggtaataaaaaagagtgttaaccctcagtggaatcatacattcatgttcagtggcatccatccccaggatataaagaatgtttgcctagaacttactatctgggacaaggaggccttttccagcaacatctttctgggaggagttcgtttgaattctggaagtggtgtgagccatgggaagaacgtggattggatggactctcagggggaagagcagcgcctttggcagaagatggccaacaaccctggaactccctttgagggtgtactcatgcttcgttccagcatgggaaaatgtaggctctaaagggaccagttctccaagaatgaggccaccaggacctatctggctgtcttttcctaccattagcaaactgagacctgggattctgcttccctgccatttctcacctgacagtgttgggacatgaggggagagatgtcagtagtatgaacatttagggtcttgctgagtgcctaaaaaacatatatttccatccaatcaaggccttcttgattggatgatagaaagtgtactacttgtcctgtcaacaagcaaattgtgcaaaggcttatagggtttatgccataaaagaaatggcacaagcctccatttgctaattataagttactttagatttcctcaaatcctttgaagagaaagaggaccactgagaaggtagatcacttgaaaagtcagaagaaaggatactggccaacttttactcaccctaggaatccacatgatctcaagaaggcatggtggagatggttgcttgagcaaggggattgtcctgttattgcagcaaacttgtggattaaccaagtagtatttcaagatggattgacagggctttctatgattactatagaatttatcatctaaatcagtttactttttagaacaaagagagctaaataactacatcagaacgattgatgttgattagaattgacctgggaaaattgggatgtagggtcaccctactgatgacctaagagagctctgttttaaacatttattttataaaatgttctaagccattaactaaaaggaaatgagatataatggtcaattgatataccttttcacattgtgttcactgacgagactagtttaatgaaaaaggaggtactctacctgctattttacttctgttcctcttctgccctgttatgggagagaatcaaagactccatctgctctcttcccccttgttttctccttcactgagtttttcttatctccttttgcagtggttaactattgtcacaataatgctgaatgaaaaaacacaccaaatgtcagtggcttaaaatgaccatcctttttctcacagttatgaagattggctatggcacctctgcttcctgctataggcctgaggttctagggcttcttatgcctcatcctctttaagccaaagggatagccagagcatcttgatggcagaagtgcaataagatgagccccactgctcgggtacattttcagcccctggttgtgtcatgtctactgatatctcattggtcaaaggaagtcagagggccaagatgaagaggcagggaaatatgcactgcccacagtgaagccatgacaagagtgaggatgcaggaaggcatgaagaattggggccaacagttcaatctaccataccttctctcacctggaattccagatgcttgagctacgaaacttagatgcaaagaaagttaaagctagaaggaacctcaggcccagttgctcattttgcagattccaaatgtgaatttcagagagctgagataacttgcccaaggccatatagaggctgtgactaaatctggacttaaatccagactatcaatcttaggccagtgttcttttttcaatatagtccttggcataatgctatgcttattaggtagataaaagggcttatgtcaagaaatttggagcagagtctgattacttgagcatgaacatacccgaccaaggtatgttctggagtcatattctagcctctgagctcattttttcatgcgagttcatataaaatcctcgaaagtttagaaactaggttttagtagtaacggagctagaatcatcttcgggcttattcctgctagttgttccatatttctagatttcatcttgaattttgaaaactgatttaagaatatatttagtattattattagtaagggaatacgcaatccagtttcaattttattcagaagtaggtcacctaattctagaaaatggttattagtctagtgtcgcttagcaaggtacttaaaagaaaatctgcacatatccttgtgctgcccttcttaaaaacagaaaacaaaaagtgtaagatcatcattgcctcccacataggaaaaataaaatgtcttcagactttaaaaaaaaaaaaaaaaaaaaaaaaaaaaaaaaaaaaaaa

SEQ ID NO: 3412 - DNA, 5880 bp, Homo sapiens
ctttcaggatttcacaagatgccgcatgcagcttgttcgagaaattaggaaggaggaagtagatctttctgcaaagtcagacaactcctgtacaaagaagctgagggatagaattgcttcctggcccacgagcagtgacaacagtttgggtgccttatcagcagccagggagagctgggaatacgactctggtgccagggacctccagagcccggatgtgcagagccagtcagccctccagaagctgctcgagtatggcggaagctctttgcatcagcaggctgctctccacaaactgctcacacagtccccgcacattggcaactctgtaggaggaagctatctagagctggccaacacactccattcagcagccctggcatcactaaagggagatatagtggaacttaataaacgtctccagcaaacagagagggaacgggaccttctggaaaagaaattggccaaggcacagtgcgagcagtcccacctcatgagagagcatgaggatgtccaggagcgaacgacgcttcgctatgaggaacgcatcacagagctccacagcgtcattgcggagctcaacaagaagatagaccgtctgcaaggcaccaccatcagggaggaagatgagtactcagaactgcgatcagaactcagccagagccaacacgaggtcaacgaggactctcgaagcatggaccaagaccagacctctgtctctatccccgaaaaccagtctaccatggttactgctgacatggacaactgcagtgacctgaactcagaactgcagagggtgctgacagggctggagaatgttgtctgcggcaggaagaagagcagctgcagcctctccgtggccgaggtggacaggcacattgagcagctcaccacagccagcgagcactgtgacctggctattaaggatcactaaatggccttctgcctggttgtgtgtatccaccaactctggaactcaagtgaaggaaataagcattgtgtggatgtgtcagctagcaccacagacagactcagctgccaggagaggactcactgtttttcttactctgaaggttgccagacagtcgaggagattgagggggtgcttggccgggacctgtatcccaacctggctgaagagaggtctcggtgggagaaggagctggctgggctgagggaagagaatgagagcctgactgccatgctgtgcagcaaagaggaagaactgaaccggactaaggccaccatgaatgccatccgggaagagcgggaccagctccggaggagggtcagagagcttcaaactcgactacagagcgtgcaggccacaggtccctccagccctggccgcctcacttccaccaaccgcccgattaaccccagcactggggagctgagcacaagcagcagcagcaatgacattcccatcgccaagattgctgagagggtgaagctatcaaagacaaggtccgaatcgtcatcatctgatcggccagtcctgggctcagaaatcagtagcataggggtatccagcagtgtggctgaacacctggcccactcacttcaggactgctccaatatccaagagattttccaaacactctactcacacggatctgccatctcagaaagcaagattagagagtttgaggtggaaacagaacggctgaatagccggattgagcacctcaaatcccaaaatgacctcctgaccataaccttggaggaatgtaaaagcaatgctgagaggatgagcatgctggtgggaaaatacgaatccaatgccacagcgctgaggctggccttgcagtacagcgagcagtgcatcgaagcctacgaactcctcctggcgctggcagagagtgagcagagcctcatcctggggcagttccgagcggcgggcgtggggtcctcccctggagaccagtcgggggatgaaaacatcactcagatgctcaagcgagctcatgactgccggaagacagctgagaacgctgccaaggccccgctcatgaagctggacggcagctgtgggggagcctttgccgtggccggctgcagcgtgcagccctgggagagcctttcctccaacagccacaccagcacaaccagctccacagccagtagttgcgacaccgagttcactaaagaagacgagcagaggctgaaggattatatccagcagctcaagaatgacagggctgcggtcaagctgaccatgctggagctggaaagcatccacatcgatcctctcagctatgacgtcaagcctcggggagacagccagaggctggatctggaaaacgcagtgcttatgcaggagctcatggccatgaaggaggagatggccgagttgaaggcccagctctacctactggagaaagagaagaaggccctggagctgaagctgagcacgcgggaggcccaggagcaggcctacctggtgcacattgagcacctgaagtccgaggtggaggagcagaaggagcagcggatgcgatccctcagctccaccagcagcggcagcaaagataaacctggcaaggagtgtgctgatgctgcctccccagctctgtccctagccgaactcaggacaacgtgcagcgagaatgagctggctgcggagttcaccaacgccattcgtcgtgaaaagaagttgaaggccagagttcaagagctggtgagtgccttggagagactcaccaagagcagtgaaatccgacatcagcaatctgcagagttcgtgaatgatctaaagcgggccaacaggtaaaaatctccctatacccagcccccaccgccctccacctgtggtacttggactgacaccctgcatgtagacacagcaccagggatggacatttccctaactcttaagaactaactctagaaagtgggtgagtccctacctggctctctaagagcctggtcttccttagagtggcatctcccaagatggtctgtggaaactaagaaatgctcagtaacaacatcctttggccaaatgtagcatactgtggtatatgcctcctggtattatgtatcttaaatgttctgagaagtcatataataaaaaatctgtttaagccagtattttccaaacaaaattagccatggaatttatttgagcaacacaatatccactggaatacttcaggaaatactgctctaagactgggctcaggactcttctctataaaaaacggaggacctcagagagcttttgttcctcaacctggtggctgcctatgagaaagcaaagaaaaagcatcaaaacaaactgaagaagttagagtcgcagatgatggccatggtggagagacatgagacccaagtgaggatgctcaagcaaagaatagctctgctagaggaggagaactccaggccacacaccaatgaaacttcgctttaatcagcactcacgcaccggagttctgcccatgggaagtaaactgcagcaggccactggggacagaagggcccatgtacttgttgggaggaggaggaaagggaaggctggcaggtaggtcggcacttggacaatggagtgccccaactcaacccttggggcgactggccatggtgacattgtggactgtatccagaggtgcccgctcttccctcctgggcccacaacagcgtgtaaacacatgttctgtgcctgctcagcagagcctcgtttctgctttcagcactcactctccccctcctcttctggtctggcggctgtgcatcagtgggatcccagacatttgtttctgtaagattttccattgtatcctctttttggtagatgctgggctcatcttctagaatctcgtttctcctctttcctcctgcttcatgggaaaacagacctgtgtgtgcctccagcatttaaaaggactgctgatttgtttactacagcaaggctttggtttccaagtcccgggtctcaactttaagatagaggcggccataagaggtgatctctgggagttataggtcatgggaagagcgtagacaggtgttacttacagtcccagatacactaaagttacaaacagaccaccaccaggactgtgcctgaacaattttgtattgagagaataaaaacttccttcaatcttcattttggaggcagggctgggaagggagcgctctcttgattctgggatttctccctctcagtggagccttattaatatccaagacttagagctgggaatctttttgatacctgtagtggaactaaaattctgtcaggggtttcttcaagagctgagaaacattattagcacttcccgccccagggcactacataattgctgttctgctgaatcaaatctcttccacatgggtgcatttgtagctctggacctgtctctacctaaggacaaggcactgaggagatactgaacattttgcaaaacttatcacgcctacttaagagtgctgtgtaacccccagttcaagacttagctcctgttgtcatgacggggacagagtgagggaatggtagttaaggcttcttttttgcccccagatacatggtgatggttagcatatggtgcttaaaaggttaaatttcaagcaaaatgcttacagggctaggcagtaccaaagtaactgaattatttcaggaaggtcttcaatcttaaaacaaattcattattctttttcagttttacctcttctctctcagttctacactgatacacttgaaggaccatttactgtttttttctgtagcaccagagaatccatccaaagttccctatgaaaaatgtgttccattgccatagctgactacaaattaaagttgaggaggtttctgcatagagtctttatgtccataagctacgggtaggtctattttcagagcatgatacaaattccacagccttctgttcgctggaggatactccagccaccagttcggagggcagacagctgtatcctaaaagcaaccactgagaggccagcagtgaggctgcccatctccaaaacgaaacaacagatcaactggtatcagtctagaaggaccagctttggggtgctttgatcactatgaaaatgttcactggtttctgtcaatcatttggtcaaagttagttcctgtgattttttttttttttttgagatggagttttgctcttgtcaccaggctgaagtgcagtggcgtgatcttggctcactgcaacctctgcctcctgagtagctggaattacaggtgcccgccaccatacccagctagtttttttgtatttttagtagagacagggtttcaccatgttggccaggctggtctcgaactcctgaccactgatccacccacctcggcctcccaaagtgctgggattacaggcatgagccaatgtgcctggccattcctgtgattttttagaatttttcacttttcatataaagttgcattttatcatgaggaaaatgttttggctgaaaaacatatgcccccaaaaaaaaaaaatcagttttcactatttttccagcttgcctagggaaacgtcctcccctgagcaaagtgggatgtgcatggctcttttttgtgattaagcaggcatcaaatgggcagttttcattttcactgacacagaaacatgtggctgaagcaggaataaaatcctgcctactgacttctgtctccattcttgctccaggtaaaatcagagaacctccccttcttggccctttaattcccccaggcagaggcggctccagctcctgttaagggccccagttttactcatgctacctgaccttagttttagtactttcaaatgtgatttgggtaaaaactattttgcaggcaaaagtgttaattttttataaatatgtataataaaaaagctataaaagttaaaaaaaaaaaaaaaaaaa

SEQ ID NO: 3413 - DNA, 7307 bp, Homo sapiens
gaggaagagatgaactttctggaagcagacccatctatgctttgacctgatcatggaaggccctgagccctataaactcctttgaatccctgtcccgggaacagggacacccaatcaatgcctcacacacagcctggggaatccacagctgagccagccctcctacaacatttcttggacaaagagtactgaaaaatttggtgcggcatgaaaggatgaaagactccgaagggccccagaggcccccgctgtgttttttatctacattgctttcccagaaggttcctgagaagtcagacgctgtgcttcgctgcataatatctggtcagcccaagccagaggtaacttggtataagaatggtcaggccatcgatgggagtggcattatttccaactatgaattctttgagaatcagtatattcatgtgttacatctctcttgctgtaccaaaaatgatgctgctgtctatcaaatctcggctaaaaactcttttgggatgatctgttgttctgcttccgttgaggttgagtgctcatcagagaacccacaattgtctcctaacctggaagatgacagggacaggggttggaaacatgaaacagggacacatgaagaagaaagggcaaatcagattgatgagaaggaacatccttataaggaagaagaaagcatctccccgggcactcccaggtcagctgactcctccccctccaaatccaaccattcactctccctccagtcattgggcaatcttgacattagtgtgtccagttctgaaaatcctttgggtgttaaaggaacaaggcacactggagaggcttatgatccaagtaacacagaagaaattgcaaatgggttgctttttcttaattcaagtcatatttatgaaaaacaagacagatgttgccacaagacagtgcattccatggcatcaaagttcacggatggtgacctgaacaatgatggtcctcatgatgaaggcttacgctctagtcagcaaaatcccaaagtacagaaatacattagcttcagcctcccgctatctgaggcaactgcacacatttacccaggtgacagtgccgtggccaacaaacaacccagcccacagctttccagtgaagactctgacagtgactatgaactttgcccagagataaccctaacctacaccgaggagttttcagatgatgacctggagtatctggaatgttctgatgttatgacggattactctaatgcagtttggcaaaggaacctgctggggactgagcatgttttttttattagaaagcgatgacgaagagatggaattcggtgagcattgcctgggtgggtgtgagcatttcctcagtggaatgggttgtgggtctcgggtgtcgggtgacgctgggcctatggttgccactgctggcttctgtggtcatcactcacaaccccaagaagttggggtgaggagcagcagagtctccaagcacggtccctcatccccacaaacagggatgactctcattttgggacctcaccaggatggaacgtcttcagtgacagaacaggggagatataaactccccactgctcccgaggctgctgaaaatgattatccaggaattcaaggagaaaccagagacagccaccaagcaagagaggaatttgccagtgacaatctgctcaacatggatgaatcagtaagagagacagagatgaagctcttgtctggtgagtcagaaaactcagggatgagccagtgttgggagacggcagctgacaagagagtggggggaaaggacttatggagcaagaggggttcaaggaaatctgccagggtgaggcagccgggaatgaagggaaatcccaagaagccgagtgccaacctgagagaaagtacaacagaaggtacccttcatctctgctctgccaaagaatctgctgagcccccactaacccagagtgataaaagagagacttctcacaccacagcagcagcgactggtcggagttcccatgctgatgcaagagaatgtgctatttcaacccaggcagagcaagaagcaaaaacccttcaaacttcaacagactcagtctccaaagaaggcaacacaaattgcaagggagaaggcatgcaagttaatactctatttgaaacaagccaggttccagactggagtgatcctcctcaggtacaagttcaggaaacagtcagagagacaatctcttgcagccagatgccagctttctcagagcctgctggggaggagtccccattcactgggaccacaacaatttccttctcaaacttaggaggggtccacaaggaaaatgcatcattagctcaacactcggaggtcaaaccctgtacctgtggtccacagcaggaagaaaaacaagacagagatggcaacatacctgacaatttcagggaagacctaaaatatgagcagagcatctcagaagccaatgatgagactatgtccccaggtgtgttctcaaggcatctccccaaggatgctcgtgctgacttcagggagcctgtggctgtctctgttgcttcccctgaacccacagatactgccctcaccctggaaaatgtgtgtgatgagccaagggacagagaagcagtgtgtgcaatggagtgttttgaggctagtgaccaaggaacatgttttgataccatagattctcttgttgggacaccagttgataactattcgcctcaagaaatttgctctgtagatacggaactggcagaaggtcaaaacaaagtatctgatttatgttcttctaatgacaagacactggaagtcttttttcagacacaagtgtctgagacttcagtgtctacgtgcaaaagcagcaaggacggcaactcagtcatgtcccctctttttatcagtactttcaccttgaacatttcacacacagctagtgaaggtgccacaggagaaaatctaaccaaggtggagaaatccacctacccactggcctccacagtacatgctggccaggagcagccaagccccagcaactcaggagggcttgatgaaacacagctcctttcttctgagaacaatcctttagtgcaatttaaagaaggaggtgacaagagccccagtcctagtgccgcagacaccacagccacaccagccagttatagttcaattgtgagttttccttgggagaagccaacaacattaactgctaataatgagtgctttcaagcgaccagagagactgttaccattgccaccgaagtccacccagccaaataccttgctgtgtcaattcctgaggacaagcatgcaggtggcactgaggagaggttccctcgtgcatcccatgaaaaggtttcccaatttccttcccaagtgcaggtggatcatattttaagtggtgctaccatcaaatctacaaaagagctactttgcagggcacccagtgtgccaggagtcccacaccatgtcctgcagctcccagagggagagggtttctgcagtaattcccctcttcaggttgataacctgtctggagataagagccagactgtggacagagcagactttaggagctatgaagagaatttccaagaaagaggaagtgaaacaaagcagggggtccagcagcagagcctgtcccagcagggttctctttctgcacctgatttccaacaaagtttgcctacgacatctgctgcacaagaggaaagaaacttggtgcccacggccccctcaccagcaagctctagggaaggagcagggcagcgctcaggttgggggacgagggtctccgtggtggctgaaactgctggggaagaagacagtcaggctctgagcaacgttccatctctctctgatatccttttggaagagtctaaagaatatagacctggaaattgggaggcaggcaacaagctgaagattataactctagaggcttccgcttctgaaatctggccaccacgacaactgacaaattctgagagcaaggcatcagacggtggtctcataattcctgacaaggtctgggctgtacctgatagtctaaaggcagatgctgttgtgcctgaattggccccctctgaaatagcagcattggctcacagtccagaggatgctgagtcagcccttgctgatagcagagaaagccataaaggcgaagagcccaccatcagtgtacactggagaagtctttcttcccggggtttcagccaaccgagactcctggagtcatccgtggaccctgtagatgaaaaggagttatctgtcacagattcactgtcagcggcttctgaaactggagggaaggaaaatgttaacaatgtgagtcaagaccaggaggaaaaacaactcaagatggatcacactgccttctttaaaaagtttctgacctgccctaaaatcctagagtcccctgtagatcccattgatgagataagtgtgatagagtacaccagggctggaaaaccagagccctctgaaaccacaccacagggcgccagagaaggaggtcaatcaaatgacggaaacatgggccgcgaagcggaaatccagtcggccattttgcaagttccatgtctccagggaaccattctgagtgaaaatagaatcagcagaagccaagaaggcagtatgaagcaggaggcagaacaaattcaacctgaggaggcaaaaactgccatttggcaagtcctgcaacccagcgaaggcggtgaaagaattccaagtggatgtagcataggccaaatacaagaaagcagtgatgggagcttaggggaggctgagcaaagcaaaaaggacaaagcagaattgatttcccccacttcacctctttctagttgtcttccaataatgactcactcttctcttggggttgacacgcacaactccacaggccaaattcatgacgtccctgaaaatgacatagttgagcccagaaagcgtcagtatgtgtttcctgtttcacagaaaaggggaactattgagaatgagcgtgggaaacctttgccctcttctcctgatcttaccaggttcccttgtacttcatctcctgaaggaaatgtcacagactttttgataagccacaaaatggaggaacctaaaatagaggtgcttcaaattggggaaaccaaacccccaagctcatctagctcctcagcgaagaccttggcatttatttcaggagaacgtgagttagagaaagcccctaagttactgcaggatccatgtcaaaagggcaccctgggctgtgcgaaaaagtccagggagagagagaagtccctggaagcccgagcaggcaaatcgccagggaccctcacagcagtgacggggtcagaggaggtcaagaggaagccagaagccccaggcagtggacatttagctgagggagtaaagaagaaaattttgtccagggtggcagcactgaggctgaaactggaagaaaaggaaaatatcagaaagaactcagcctttcttaaaaagatgcccaaactcgaaacatcattatcacacacagaagagaaacaagacccaaaaaagccatcttgcaaaagagaaggaagagctccagtattactgaaaaaaatccaagctgagatgttccctgaacactctggaaatgtaaaattaagctgccaatttgcagaaattcgtgaagattctactatctgctggacaaaagattcaaagtccatagcccaagtgcagagaagtgcaggggacaactccactgtttcctttgccatcgtgcaagccagtccgaaggaccagggactctattactgctgcatcaagaacagctacggaaaagtgactgctgaatttaacctcacagctgaagttctcaaacagctgtcaagtcgccaggatactaaaggatgtgaagagattgaattcagccaactcatcttcaaagaagacttcctccatgacagctactttgggggccgcctgcgtggtcagatcgccacggaggagctgcactttggagaaggggttcaccgcaaagccttccgcagcacagtgatgcacggcctcatgcctgtcttcaaacctggccatgcctgtgtgcttaaggtgcacaatgccattgcctatgggaccagaaataatgatgagctcatccaaaggaactacaaactcgctgcccaggaatgctatgttcaaaatactgccaggtattatgccaagatctacgctgctgaagcacagcctctggaaggctttggagaagtacctgagatcattcctatttttcttatccatcggcctgagaacaatatcccgtatgctacagtggaggaggagctgattggagaatttgtgaagtattccatcagggatgggaaagaaataaacttcttgagaagagaatcagaagctggtcagaaatgttgcaccttccagcactgggtgtaccagaaaacaagtggctgcctcctggtgacggacatgcaaggtgtaggaatgaagctaactgacgttgacatagcaacgctggctaaagggtacaagggatttaaaggcaactgttccatgaccttcattgatcagtttaaagcactacaccagtgtaacaagtattgcaaaatgctgggactgaaatcccttcaaaacaacaaccagaaacagaagcagccgagcattgggaaaagcaaagttcaaacaaactctatgacagtaaagaaggcagggcctgagaccccaggcgaaaagaaaacctaacgtccccgggtaacctaatggccactggctagcagcacacaatctcgccagggaaaatctgaggccacacaggagagaatatacagcctgcagagagtgcgtggcaatccttactcccagccgactgtgcgccaagatgcttctaaacccatcacctgctgtcttcactcaaatgatttcagaacaggatttgcgaccaggtttatggggagattgaatcaacgattggtctcaaagacagtccattctttatatacacgtttagcatttttagcaacctcacatcatgtgtatatttgtgtatttgcgcatggttgtgctgtcgaggacctggtgctgagaagagtctgttcacagccaaaattcttcccactgtcattcctaacctgggatttctagacacatcctgctgtgatgtaaacagaaatcacgaattcgctcactggatcaagttgttccactggtgtctaatacgctattgttgccggaggtgggttctgtgacgtgaagccatttcccatcattcaacagccagttacaattttctgtttaattaaattcatatttaaacagaaaaaaaaaaaaaaaaaaca

SEQ ID NO: 3414 - DNA, 7930 bp, Homo sapiens; identical to SEQ ID NO: 2424

SEQ ID NO: 3415 - DNA, 4158 bp, Homo sapiens
gagtcgcccagagaagcgggagtgggagaagctttgagagttgcaggggactacttttttccggtcgggcggcgggcctcatgggtgcttgtttaccgggctgggagcagggcattcaaaagctgggtgtcggagcgcactgaagtccaacacgcctgcagagaccgccctaagcctggaggtgtgtctggcttgcatccagaaccacagggtggattctcgccaccgacttggctggatgacggctggctggtggtgagctcccctgcccactggctgacctcaagcagttggccccggtaggtggaggctattcgagggggacaagctggggacgcagcgtcagctcctgccagcgcgcgggtctcctccacctccaagcagtgtggtgcgtgggacgcgcatcttcccggactatccctttccagcgcggtctgtgcggaccccgagcccggcagccaccagggacggagggcggggtgcctttctctgggctcatccgctgtcagccgtgggaactcttaactttatccagagggatctgtgcaggcgggggtgggagaggttctcctcccctggcggttacctccccctcccgggccgcccctcccccgcctcccatggcctcgctttcagagcatcctcactccgcccagttcggtgccagctgcgtgggctccagcttcgatcgttttccttggaatgctccaaaactcagcagcgactaagggaattccattggaatttgccgggcgtgctctcaccccgcacggcacccgcgccgtcagtcctcggatcccatcacttcagcccgaagattgcaactttgcagagacgaagaaatagcatggcatgaaacatggctcagttctattacaaaagaaatgttaatgctccctatagagaccgcatccctctaaggatagtaagagcagaatcagaactctcgccatcagaaaaagcctacttgaatgctgtggaaaagggagattatgccagtgtcaagaaatccctagaggaagctgaaatttattttaaaatcaatattaattgcattgatcctctcggaagaactgctctcctcattgcaattgaaaatgagaacttggagctcatcgaactactcttaagctttaatgtctatgttggagatgctctattacatgctatcagaaaagaagtcgtcggagctgttgagctgttattgaaccacaaaaaacctagtggagaaaaacaggtgcctcctatactccttgataagcagttctctgaattcactccagacattacaccaatcattttggcagcccatacaaataattatgagataataaaactcttggttcagaaaggagtctcagtgcctcgaccccacgaggtccgctgtaactgtgtggaatgcgtgtccagttcagatgtggacagcctccgtcactcacgctccagactcaacatctacaaggccttggccagtccctctctcattgcactgtcaagcgaagatccttttctcacagcctttcagttaggttgggaacttcaggaactgagcaaggtggaaaatgaattcaagtcggagtatgaagagctgtcacggcagtgcaaacaatttgctaaggacctactggatcagacgagaagttccagagaactggaaatcattcttaattaccgagatgacaatagtctcatagaagaacaaagtggaaatgatcttgcaagactaaaattggccattaagtaccgtcaaaaagagtttgttgcccagcccaattgtcaacagctgctggcatctcgctggtacgatgagtttccaggctggaggagaagacactgggcagtgaagatggtgacatgtttcataataggacttctttttcctgtcttctctgtgtgctacctgatagctcccaaaagcccacttggactgttcatcaggaagccatttatcaagtttatctgccacacagcctcctatttgacttttttgttcctgctgctgcttgcctctcagcacatcgacaggtcagacttgaacaggcaaggtccaccaccaaccatcgtcgagtggatgatattaccgtgggtcctgggcttcatatggggagaaattaaacagatgtgggatggcggacttctggactacatccatgattggtggaatctaatggactttgtaatgaactccttatatttagcaacaatctccttgaaaattgttgcatttgtaaagtacagtgcccttaatccacgagaatcatgggacatgtggcatcccactctggtggcagaggctttatttgctattgcaaacatcttcagttctctgcgtctgatctcactgtttactgcaaattctcacctgggacctctgcaaatatctctgggaagaatgctcctggacattttgaagtttctattcatatactgccttgtgttgctagcatttgcaaatggcctaaatcaattgtacttctattatgaagaaacgaaagggttaacctgcaaaggcataagatgtgaaaagcagaataatgcattttcaacgttatttgagacactgtagtccctgttttggtcaatatttgggctcatcaatttatatgtgaccaatgtcaaagcacagcatgaatttactgagtttgttggtgccaccatgtttgggacatacaatgtcatctctctggttgttctactcaacatgttaatagctatgatgaataattcttaccaactgattgctgatcatgcagatatagaatggaaatttgcacgaacaaagctttggatgagttattttgaagaaggaggtactctgcctactcccttcaatgtcatcccgagccccaagtctctctggtacctgatcaaatggatctggacacacttgtgcaagaaaaagatgagaagaaagccagaaagttttggaacaatagggaggcgagctgctgataacttgagaagacatcaccaataccaagaagttatgaggaacctggtgaagcgatacgttgctgcaatgattagagatgctaaaactgaagaaggcctgaccgaagagaactttaaggaactaaagcaagacatttctagtttccgctttgaagtcctgggattactaagaggaagcaaactttccacaatacaatctgcgaatgcctcgaaggagtcttcaaattcggcagactcagatgaaaagagtgatagcgaaggtaatagcaaggacaagaaaaagaatttcagcctttttgatttaaccaccctgattcatccgagatcagcagcaattgcctctgaaagacataacataagcaatggctctgccctggtggttcaggagccgcccagggagaagcagagaaaagtgaattttgtgaccgatatcaaaaactttgggttatttcatagacgatcaaaacaaaatgctgctgagcaaaatgcaaaccaaatcttctctgtttcagaagaagttgctcgtcaacaggctgcaggaccacttgagagaaatattcaactggaatctcgaggattagcttcacggggtgacctgagcattcccggtctcagtgaacaatgtgtgttagtagaccatagagaaaggaatacggacacactggggttacaggtaggaaagagagtgtgtccattcaagtcagagaaggtggtggtggaggacacggttcctataataccaaaggagaaacatgcaaaagaagaggactctagtatagactatgatctaaacctcccagacacagtcacccacgaagattacgtgaccacaagattgtgatacttgaaggaggaagcgtttaccatacacatacgtattttccgtagtgctctgggtgggggaaaatgtctaaattgtattagcaaatgctaacttacactttatagcatttatcagctgtggcatattacctgtaacatgtttaaataaggcaaaggcaatcaaaaacctttttgttttgtagcctgcttttgctttcacaatttgtcttacaattgtttttgttaataaataaatgcaccttgtattcttgtactgttgcaataaaaaaaaaaaaaaaaaaaaaaaaaaaaaaaaaaaaaaaaaaaaaaaaaaaaaaaaaaaaaaaaaaaaaaaaaaaaaaaaaaaaaaaaaaaaaaaaaaaa

SEQ ID NO: 3416 - DNA, 4496 bp, Homo sapiens
ggacttccgggtcgcggtgcttgaagggagtgttccgtcgtttccgttgccggctgtttgcagtggggaaaccgaggcagctcctgccccccctagttcttccgctcctgtgaggaaaaaaaaatgtttatttctttgtgggagttcttctatgggcactttttttcgattttggatgaaatggctattacgacagatgactgggaagtgtggattgcagcgaatatttgatacctatgtaggtgcacaaaggacacacaggatagaaaattccttgacatactccaagaataaggttttacagaaggcgacacatgttgttcagagtgaagtggacaaatatgtagatgatattatgaaggaaaagaatattaaccctgagaaggatgccagttttaaaatatgcatgaagatgtgcttactgcagataactggttataaacagctgtatttggatgtagaaagtgtgaggaaaaggccatatgattctgataacctacagcatgaagagctactcatgaagctttggaatcttctaatgcccacgaagaagttaaacgctagaatctccaagcagtgggctgaaattggtcttcagggtgatgatcccaagacagacttcagaggcatgggcatacttgggttaatcaatcttgtgtatttcagtgaaaattacactagtgaagctcatcagattctttcccgttcaaatcatccaaaattagggtattcttatgcaatagttggaatcaatcttacagagatggcttatagcttactgaagagtgaagctttgaagtttcatctctataaccttgttcctggtataccaacaatggaacactttcatcagttttactgttatcttgtctatgaatttgacaagttttggtttgaagaagaaccagaaagcattatgtatttcaatttgtatagagagaagtttcatgaaaagattaaaggacttttactggattgtaatgtagcacttactttaaaagtataaatcatccactgtatcttctatttctaccacattttgcacattcaacagaatttatatgttgtaataggaattatctgatcaattacactcttatatataatttcctacaaaaatatttcagaaattctatttaagaaagctagtggacaatcagtgtatgtttacaattgtttatacactgttctccaaaggtaccttatccttccaaagatcccctctgtagagtcatgcgaactacagtttggaacttgggacttagcccgttggtgtaaaagtataaatcaggtatttgtattaaattgattaaaatgtgtaaaatcaattttcgtttttatgtgttatagggtcaagttggtatctttttcaaagctctttaagatttttttggtttttagtttggaaatggctgtttttaattttctttgtctgatttttatttctaggttaattaacagcaagtgtttctttatggttttctttgtttgcatcttaattacatgtcataacgttgcttcattagtagcaaatagagcagagatacagcagagagaataaagaattagggcctccttttgggtttctgtgattattgagcataactgatgagagaatgacagtattggtgactagcttttttgtttttaaataacacactttaaaatgccacagtgttatttgaaagcttaaaggcattttctcatcttcagtatttgctttttatcagttgtagaaaagaaccttagtgttttcttctctacctatgtatgcttatgaaaccgctctacctacatatgaaacttctctacctatgtatgtttacgaaaagagatgtatttgccaagaaaatcttgattatataaaagacaaaaagattataaaagacagtttctgtttaagtaaaactgtctttgaaacttaagaaagcttaagttttaaaaaaatctcagttaaacatcattggtttatttgacttactgttaactcttgcttctctttgactccatggtgtttttagataaccatgtatgaactttatgttaatggtttgtgggatactaaaatagcttgaagatgacttgatgactgtgcattttatatagttttattctcctaaaatctcaggagggcagcaagtgctgtcaacgattatatagtgatgagatttttatgggaatgatttcttcttggtgcgttttacacatttgtactgatagcaaaactaaagtttaaagcagcaaagtttaagttctccttaaatcctacagaaaccaaccttttaaggacataatttcatctaaaacatgacgatatttagcacaccttttaatgtgggtatatatcaagtgtttaaggactggctagtatgtgatagagcaagacctgagactttataagtatttgctcgtgtctgttgacagacctctttctttcaaacttgttagaagagtggtaagacatatccaattggaaaataagatgcagtgttgtatagcacatacatttaaagtgcttgcgttaaaattagtttctcaataagataaaattattttaaaaatttggttcactttattacaatagtggcaatttagcttttcagtattacagggatttaaaaattggtttcttgtaggggacatctcaactttgggaatatcttcacttaatttttaaaaaatattttcatgctttattgtccagctatacaatatatcgcaaaatcctgacaagttcattgtattaaggtattaactattacatggaaagcaattctgttcatcttttgatgtttgtgttgaaaatgcttatctttgtgttttgatcttccaacagctgagggcttgaactgatttaaacatttgtcaatatacttaagaatgctttaagtaaagaaggggaaaattttaagtaagttttttcccttctaggaagaaaaactatgatgatgttaagaaaatgtcattatagagcttgctcaataatatgttctttaaatccacctccatttgtacattataggtatcattctgtttttgcttaaaataatctgcaaccatttcagatagttttacagcaaattgatctaaaagccactaataaattctagggtttgagtctagaagccaagcaaactgtcaccaatgtcagttgtaaattagaatgcaacatgaggcttcagactcatgacaatgatatacatgaaaacaaaaatataattgtgtctaccttcctactttcccttttgacatatgtagttggaattttacatagtcttaaaatccatatttagaatcttacctgtttctataataattagtaaaatgccaaagtagtgatagaatattgtggcattgaagtagccgaaaaattgttagttttagcatcaaaaaagtaaatagatgttgaaatgaatttttgtatgtgccaggttgaagagagtgtgccagtgacaggaagtagtctaaaaaattaacagttatggttttaataggatctgaaagacaatctttaaagaaatgggagaaattgggggtatcagtgaacctataccaacctctctttgtacataaatatggtgatgtagctagatataaaaatcagtgtcttactggcaccatttacagtttagaaaacaatctttttcttaaaaatgcccatctgatttctatttttaggagctacttggatttgtatgtattttttctacgtgaaaatatatgtactcttcacttttgttccagtactataattgctcatgtactctttctcccctttgagaacattcagtgaaatacaacttcatcaaagatttgctcaaaggagaagaatcgcatgagtgtgaaaagtagatgctcgtagccagaacagaaaaggttacacatgatcatggcacagaagataggaggtttgacttggtgggccataatgtttattatcctttttgaaataacagggaccagcagcagttttctcaggataaatgctctaccccacttctctatgaacaggtgtggggaggcttactttccattttcatatttatacacctctctacaaaagcaatttttaatgaaggttagtggaattgttaaaaatctgagaggaatgatgactggaggtgtttggggtttttttctgtattcattttttaatgagaaaagttttaaatgtagtacaggttagacccaactactaccttactattataggacgattctatgtttctgttaaagtattcaagtagctttctctgggggaaaaagtaccacttggacacttaaaggaattgggatttttgtctactttggataaggcagttgacttcttaagtaaaagcaatagtgtaaaatgtcattttgtttggaatgttaagtgagcaaataaaaaacatgttgaaattgtaaaaaaaaaaaaaaaaaaaaaaaaaaaaaaaaaaaaaaaaaaaaaaaaaaaaaaaaaaaaaaaaaaaaaaaaaaaaaaaaaaaaaaaaaaa

SEQ ID NO: 3417 - DNA, 1904 bp, Homo sapiens
gacagccatgaacagcacactgaggaggacacaaaagaagtagacagaatctctgcctctgcttaggagtatgcaatttagttggggcgacaaaacttaaatgctagaaccaataaaagaagattacaaagcaactcgcaaattctggacaatcaggaagtccaagccacaatgatcctgccaagaatcctccaggttaccttgaggatagttttgtaaaatctggagtcttcaatgtatcagaacttgtaagagtatccagaacgcccataacccagggaactggagtcaacttcccaattggagaaatcccaagccaaccatactatcatgacatgaactcgggggtcaatcttcagaggtctctgtcttctccaccaagcagcaaaagacccaaaactatatccatagatgaaaatatggaaccaagtcctacaggagacttttacccctctccaagttcaccagctgctggaagtcgaacatggcacgaaagagatcaagatatgtcttctccgactactatgaagaagcctgaaaagccattgttcagctctgcatctccacaggattcttccccaagactgagcactttcccccagcaccaccatcccggaatacctggagttgcacacagtgtcatctcaactcgaactccacctccaccttcaccgttgccatttccaacacaagctatccttcctccagccccatcgagctacttttctcatccaacaatcagatatcctccccacctgaatcctcaggatactctgaagaactatgtaccttcttatgacccatccagtccacaaaccagccagcctaacggcagtggtcaagtagtagggaaagtgcctggccatttcactcctgtcttggcaccctctccccatcccagtgcagtgcgacctgtgacccagagcatgacagatactaaacccatcactacatccactgaagcctacacagcctcaggcacatctcaagccaatcgatatgtgggactaagcccaagagacccatccttcctacatcagcaacagctgaggatttgtgactggaccatgaatcaaaacggcaggcatttataccccagtaccagtgaggatacattgggaattacttggcaaagtcctggtacctgggctagcttggttcctttccaagtgtcaaataggacacccatcttaccggccaatgtccaaaattacggtttgaacataattggagaacctttccttcaagcagaagcaagcaactgagggaaaaagaaacacaacaatagtttaagaaattttttttttaaataaaaaaaaaggaaaagaggaagactggacaaaacaacacaaaggcagaaaggaaagaaactgaagaaagaagataatagaccagcaattgcagcacttacaatcactaattcccttaaggttgaaactgtaatgacataaaaagggtcgatgatatttcactgatggtagatcgcagcccctgcaacgtagcctttgttacatgaagtccgctgggaaatagatgttctgtctctatgacaatatattttaactggctttctagatgccttaatatttgcatgataagctagttttattggtttagtattcttgttgtttacgcatggaatcactattcctggttatctcaccaacgaaggctaggaggcggcgtcagaggtgctgggtgacagagccatgagccagccattttataagcactctgatttctaaaagttaaaaaaaatatatgaaatctctgtagcctttagttatcagtacagatttattaaatttcggcccttaacccagccttttccagtgtgtaacccagtttgaaatcttaaaaaaaagaaaaaatgaaaaaaaaagaaaaaaaagaaaaaaaaaaca

SEQ ID NO: 3418 - DNA, 6104 bp, Homo sapiens
ggttcttttgttcttttctctctgcccccattttgtgggcccccaaattattatgggtcctgggcaccgtccctaatggataagccagccctgatctgagacacagagaggctgagggtctctaagaccactaagctagctacagcagagctcagacaagagcaactaggtctagacctctttctacatttgcgactatgaaaactatggagaaggctctgctcaagaggattcgcccaaaatgaggacttccctgcaggcagtggctctctggggacagaaggcccctccccacagcatcactgccatcatgatcactgatgaccagcgaacgattgtgactggaagtcaagagggtcagctctgtctctggaatctctcacatgaactaaagatttcagcgaaagaactcctatttggtcattcagcttcggtaacatgtttggcaagagcaagggacttctctaaacagccctacattgttagtgctgctgaaaatggggagatgtgtgtttggaatgtcaccaatggacagtgcgtggagaaggctacacttccttacaggcacactgcaatctgttattaccactgctcattccggatgacaggagaaggctggcttctttgttgtggagaatatcaagatgtccttataattgatgccaaaactttggctgttgttcacagttttagatcatctcagtttcctgactggatcaactgcatgtgcattgttcactccatgagaattcaagaagattctctcttggtggtatcagtagctggtgagctcaaagtatgggatctttcctcatctatcaacagcattcaggaaaagcaagatgtctatgaaaaagaatccaagtttcttgagtccttgaactgccagacaattcgattttgcacatatactgagagacttctattggtggtattttctaaatgttggaaggtttatgattattgtgatttttcccttctgctgactgaagttagtagaaatgggcagttctttgctggtggagaagtgattgctgctcacagaatcctcatctggacagaagatggtcacagttacatctatcagctgctgaacagtgggcttttcaaaaagcatataccctgctgatggaagagtgcttaaagagaccatttatcctcatttactgtgctctacttctgtgcaggaaaataaggaacagagccgtccctttgttatgggctacatgaatgaaaggaaagagcctttttacaaggtacttttctctggagaagtctcaggaagaattactttgtggcacatctctgatgttcctgtatccaagtttgatggttctcctagagagataccagtaactgccacctggactcttcaagataattttgataagcatgatactatgtcacaaagtattattgactatttctctgggcttaaagatggggcaggaactgctgtagtcacttcatcagagtatattccaagtcttgataaactaatatgtggctgtgaagatgggacaattatcattacccaggctttgaatgctgccaaagcaagacttctggaaggtggttctttagtaaaagattctccccctcataaagttcttaaaggccaccaccaaagtgtcacttcattactctacccacatggtctctcttcgaaattagaccaaagttggatgttgtctggggacctggactcatgtgtgatcttgtgggatatctttactgaagaaattttgcataaattctttttggaagctggtccagtaacaagtcttttgatgtcaccagagaagtttaaactaaggggtgagcagataatttgctgtgtgtgcggtgaccattccgtggctctccttcaccttgagggaaagagttgcctcctgcatgcccggaagcacctttttcctgtgaggatgataaaatggcacccggttgagaattttttaattgttggatgtgcagatgactcagtttatatctgggaaattgaaacaggcactttggaaagacatgagacaggagaaagagcacgaattattcttaattgttgtgatgattcacagcttgtgaagtctgtacttcccattgcctcagagacacttaagcacaaaagtatagaacagagatcctccagcccctaccagcttgggccattaccttgccctggtctgcaggtggagtcttcatgtaaggttactgatgccaaattttgcccaagaccttttaatgtcttgcctgtgaagacaaaatggagtaacgttggctttcatattcttctatttgatctggaaaaccttgttgaacttttgctaccaactccactcagtgatgttgactcttccagttcattctatggtggtgaggtcctgagaagagccaagagcacagtggagaagaagacactgacactgagaaaaagtaaaactgcctgtggtcctctttcagcagaggcactagccaagcctattactgaaagcctggcccaaggagataataccatcaaattctcagaagaaaatgatggcattaaaaggcagaagaaaatgaagatctccaaaaaaatgcagcctaagccatcaagaaaagtagatgccagtctcacaatagacacagcaaaattgtttctgtcttgccttttgccatggggagtggataaagatttagattatctttgcattaagcacttcaatattttaaagcttcagggtcctatttctttgggaatttctttgaatgaagataatttctcactgatgttgccaggttgggatttatgcaatagtggaatgataaaagactattcaggagtaaatttattttccaggaaagttttggacttgtcagataaatacacagccactcttccaaatcaggttggaattccaagaggattggaaaataattgtgattctttgcgagagtcagatactatagtttatttgttgagcagactatttttagttaataaattagttaacatgcctttagaattggcatgtagagttggcagttctttcagaatggaaagtatacataataagatgagaggtgctgggaatgacattttaaatatgtcaagcttctacagttgcttacgaaatggtaagaatgaatcccatgtacctgaggctgacctttcacttttgaagctaatttcctgttggagagaccagtctgtgcaggtaactgaagcaatacaagctgttctcttggcggaagttcaacaacacatgaagagtttgggaaagatacccgtcaatagtcaaccagtgtccatggcagagaatggtaactgtgagatgaagcagatgctgccaaagctggaatggacagaagaactagagttacagtgtgttagaaacactttgcctctgcaaactccagtcagcccggtcaagcatgacagcaactcaaactcggcaaacttccaagacgtggaggacatgcctgacagatgtgccttggaagagtctgagagtccaggtgagccaaggcatcattcatggatagcaaaggtctgcccctgcaaggtgtcttaaatggaatctcatcagtaggagctgaatttggacaaattaagaaatccaaaagatgccatttgtttattactgtataaaagcattgttgttattggtcaagttattaggctgtagtggatttgctaatactttagccaacatgtattaaagtgattttaatacatgctgattacaatgcaatacatactgattgaaaatattcatattcatctaattttagaaaaatattgcctagatcattctctattcctgtttcttactttttctgttaatatttccaacagggaatgccagtccacagacacaaatttaatactgctttaaattttctcctatccttttagtccctgaattatataataaacaatgttaaaaccaatgtagtacacaatacttacttacaaatttaatactgcttcaaggtatttaatctaaaattttaccaactttgatttgtctggttaggatattttgttttagtggatatgctttaattcggatcaattactgcagtaaatctcatccctaagcatgaaatgttgtcaacaaatacccagttccatttagttatcaattagcccaaataagagatacaaagtataacagtgaccaaccttgtactgttgagttaatttgaacttctaatgacattgaggctagtgtctttagctcaaggttgatcttgttggccatatagatgtgaactagggaaggggaatcaacttacagcatatcacaattgatccttattaagtataaactcttgtaggtcttttcccagaaagaagcttgactagcaggaattctaaaactgaaatatatcaaacagcataaataggaatagacataaagtgctcttctattaaagcctttggtgatctatttactatgatttatattgtacagttcctcgatttacagaaaatcatcaaaattattaatctacatatcttatgtatataaatattgcctaatccatagaaaaaaggatataaagtattaaatatgtgatatatagctatatctatctatctatgtatctaatagggaagttcaagtcacttcaattgaagaaacatatctctgagcataggagcagcctcaggtcctatggtgggatgcagtggacaggagagggggaaattagaaaagagaactatataattgaaaaagggatataaagcattaaatatatgatatatagctatatctatgtatgtatctaacagagaagttcaagtcacttcaattaaagaaacatttttgagcatgggaccagcctcaggtcttatgctgggatgcagtagacaggagatggggaaattagaaaagagaactgtgtaattgaaatgacgtgggctgcacccttaaggaacttataattaatgatgatctgaataaacataccaggataaagatgtcaaatgagtgtgactcccttaaagtagattaaagtgtgcattctttgtttcctaaaatatgattttactgcttgaaattacatttgagttgaagtttagaaactaacatagtattaatatgaataatcatggaaaattattatcctttgaaaactgattgataaatatattccccctcctttagaaacagtcaaaagccacttcaaacaagtttcaaaataaaggaaggtagcaagttaggcgatggattatattttcttgcttgttgtataccagttgtcaaggacattataaggactcccaaaagcattttgaaggatggcaatatcaaataagtgtatgtcctctcaaatgaggcatttttaattgttaaaatctatttggacgctcaggttatgatatgtttatgaaaaatgagcttcattatttttatagctacatcctattattcccttttagaaacaagaataacaataagttttaatagttgccatacttagcatttatcaggtctaatgaagccaatattgaatctctgataaatattttctgatgttactagctatgggaaattagaactggcacaaccctgacattactaagtggaaatgttaggatttttcggcatcgcatgttagaatctctaaaatttaaacattcctgttaaatgactaaggtttgcttttatcaatatgaattctgaaggccaatatcataccattaactatgaaagcttttaattcctaaaaatagttttagagatattcaagcaatgctctcctaatatccatacgcaagtgtgtttatgacacaaattcactagtctgtttaaaaatgaattctttatattgactggtgttccacatatttcagtaatttctgttatgagaggacttgaaatagcaaattgccacacagttaactggatagaccacgtacgtggtgatcataaccacttggtactacacccagaaactcaaaattgtctttctcctgatgagatatgggtgtccttttgtacgtctaggcctaggtaaccagtggagtgattatattagcaaatgtgtttgtatccagagtcttcctgtcattgtaataaaaaatttatttaaaaaaaaaaaaaaaaaaaaca

SEQ ID NO: 3419 - DNA, 3047 bp, Homo sapiens
gatactgacagggaggggtagagactaagggccatttggcggtcagcataccaccccagcagtcacaagcccactgcacccaggcctggcagggaacaagggctgaaaaaggctgtgtcaggaggagataactgaggattaaatgcctcatggaacaaccccacccactcaatccagcaagaatagaggcttgaagcagccagagtaactactcttttaagagcttaatgtttctgtaaaatcttttggtactcaaatgttgacagctgtgttgatcagggtcatggcaggtggcagaaggacctgcaaacgattaactggagaaagtttaatagagtgatatctctggaggtacaggcagggcaatgagatggtgcagtgccctaggactagcaaggatggggacctgttatcccccagcctgagggacgagaggaggcactggctttgcaggaggcctggtgagagatggaactggaggtggggctgctggcaggagctgtggcctcagaaagagggttccagccactgcctcacttgtgaccaaaccaggagggagcaggggtggtggggatcagatacctaaacctccctctcctcccacccccctgtctcctgccaaggcttaaccagagggcaaggggcccagggccccatgcagggagaggaagttgtggggaaaggcagaataacaagcagagaaactaattttttaaaaaggtttttaaaatgttgtgggtgaaataaaacacgagctatcagttaatctgtataaccaatgccaagtttcattacctctcttgtccaacttcctcatcaagaaaatgagcatagccacatctttttttgccttaaggggagagggagaatcctaacaatcataagacatgattcctgatgtgtgcgtgatccccactgaatctgagagtcaagcactgttgcctcggtcatacaacatgtatgtgttgattctgactttgcaccaggtcctattctcaccctagtggagaagttaaggctcagagagttaaggagtttgcctaaggtcacacagcacagaagagtcagtaaattcatttgctggcgggacacggtggctcactcctgtaatcccagtactttgggaggccaaggtgggaggatggcttgagcccaggggttcaagaccagcatgggcaaaatagcaagaccctgtctctacacaaataattttttttacttaaaaaaaaaagaatcagtgaaggattggacccaggtttgtgtgagagcagagcctgaacgttagctctggggccatgtatttttccaacagcaaatatttgtgggcacctagtctgtgccaaacctgtgctgggtgatgctgggggcatggtggtgacaagcagccctggtccctgtcctcaggagctcacatctggtcgaagatgataagcaaataaatgcatgaatgagtggatacagagaaagatatttgccaaataaagcagagtgacagggaagagaggggtggggagagaagccctccctggagtggtgaaattggaactgatccctgatgatgagatgaatcaccaggtagagagagcagcaagtgccaagccctggaggcaggaatgagccgcgcccattgctatagcagcagaggaggcaaagtagccaggacagggtaggttgggggagaggagaagacgaggccagagagctgaggggctggaggaggcaagggtggcaggtgttttctaaagtacccttggcttctaagttccccctccctcactctggagcagccacagatgagtctctggaacccatctgtgtcctcgtacctcaaggcctttgcgctgctgttccctctgcctgtaacacccttcctccaggtgtctcccttacgtccttcagacctttgttcaaatgtcacctccttggcaggccacagtggttcacgtatgtaatcccaggactttgggaggctgaggcaggtggatcccttgaggccaggagttcaagaccagcttggccaacatggtgaaaccctgtctttactaaaaatacaaaaattagctgggcttggtggcacatgcctgtcatcccagctactcgggaggctgaggcgggagaatcgcttgaatccaggaggtgggggttgcagtgagctgagattgtgccactgcattccagcctgggtgacacagcaagactctgtctcaaaaaaaaaaaaaaaaagtaacctcctcattgaagccccagtagccatccctgtgaggatgagcccagctcctgggcctccatgcctccttcctggccttatttccctttgtaggacttaacaccctcccacttagcaccttcatacatttgattttgtaatttttctccttgttggtctttccccatagaaagacgactctgccagggcagggatttttttctttgtcctcaactgtgttcttagtgcctgaatgaatgaataagtgagatacaaaataatgggagtttccaaacggctcatctgtgagcctgtgtgggaagggcctctcgcagggccccagcactggctgttctcggtgtgtttctccatcatttgtttatggagttgcctttgagtttcccgaggggcagggttgatcaatctggttccccagccccacaacacacgataagaatcaatatcactctagctcgtgactgaatcatttccttcacccacaggtggcaagtgcaggcagctgtcccggttatgccggaatcattgcaggtgagtccatcagaaacaggagctgacaacctgctgggcacccgaagaccaagccccctgccagctcaccgtgcccagcctcctgcatcccctcgaagagcctggccagagagggaagacacagatgatgaagctggagccagggctgccggtccgagtctcctacctcccccaaccctgcccgcccctgaaggctacctggcgccttgggggctgtccctcaagttatctcctctgctaagacaaaaagtaaagcactgtggtctttgcaaaaaaaaaaaaaaaaaaaaaa

SEQ ID NO: 3420 - DNA, 2920 bp, Homo sapiens
catcttccctggtgctagactttcatcctgatcagtctcatatactcttgtggctcccttactacccatatactgttgatttccaaaactgtctttggcctgagttcacttccttcatgccatcaacccgctagacattgctactcatctggtcgcccaagacagaaaccctcattttgtttgtttttcctgtcttttaattatcattctccctcccacccagcaagttggttacctcattttatcagtttcatctctgacatgcctttcaaatgtatttccttatctctattccacccaccaccataacttagtttaggcctcagtttctccagccttgactgttattcataactgagctaatatccccttttatctatgctgtcatctccctcttaaaaaagatctccagaaataaataaaatggaagctttatgaggagaggagttttgtctctctgttccctactgcacttgcacatgcagtaataaacccctgtaataaaaaaacaaaacaaaacaactacaaaaaaaaccccacacaatccaaatcctttaatatggcattcactgtgttttcactatctgtcccaacttacagtctcctctctcctacctcttcctctccttgccactcccccttacctgattatgtacttcagttcctcttgtatttcaatccttgtgttctcagtcccctccatctttgcttttctgtttctttggtccagactgactcagcctcaggtctagcttccccttactcattttcctttcttttggcttgggaaactcctattcatccctgagggcccagttcatcgtctctgtggaactttatctgaccatggcaggcaatcaaaccttaaccttttttctctgtattctatgatttatttctgctaatgtgttacttagcccattactttatagctatgactgtagtatttcccatctttctcactagttttgttttgagctccctatgtttgtatttgtattcctggtacctagtgcaatcccgggcacagggattcatttgtgtgcgtgtgttaaaataaaatgaatataatgtagatgtgtgtagctttttgtaagagccagcgtccaacatccaagagcccaaaagagttagtgcatcaaacagatgataaaccatttagaacaaaaccaaatgcactaaaacaacaaaaatcatgcaaaaccgaacagctaatgatatcttcttttgctttttgtttattaataaaaatgggagccccctgggggtttggggcttttgatttattgtttctttatgaaagtttattttacagatagaaaattttcagctaagtattttatactcaagttgagtctagcacctgaaaattccagacaaactttatttcactacagcaatgtatttagtacaaatttttatcagtttagatgttctggctggtaccttggaattacatcatgattatataattagattatttaaaattttgcattattagtctcaaagatgtagcatttatatatcatttgaaacatatttctataatatcttgtacagatagtagctattttacagtttttcacttgctatcttactctacatttctcttttattatatagaagtatgttggtgagaaaggaattgatataattattgaaatgttagctaatgtaaatcttagtaaagacttgagtcttctgtcacatggaggacgagtgatagtaagtattccttttcttttttttttttaccactttaatgttttaccacaatttaacactattttacagtaatctttaactgtagaattgctgtttttcatgttaggttgttggcagcagaggtactattgaaataaacccacgagacaccatggcaaaggagtcgagtataattggagttactctcttttcctcaaccaaggaggaatttcagcaatatgcagcagcccttcaagctggaatggaaattggctggttgaaacctgtgataggttctcaatatccattggagaaggtggccgaggctcatgaaaatatcattcatggtagtggggctactggtaaaatgattcttctcttatgatgatcaattctttcatggatttcctatgtaattagaggtactgtctttcccccagttgtacttaccctatcttttctttaattaacattcgattccatgagcttcttatgtgaaaaaataagatttttctttagagagcagaagcagaagagtaaaatttattgtatagctagcaatatttttttatgccatctgtctcaaatcaaagagtcatcatagtaggaaatagcatgttagttgtcatttggcatgagtgtgcattccagtaattcttaattgatatttgattaattccatacctttgattaaaacatgctagttcaaaataagactgctcagtttccaagggttttcaagcctacttacctttataaaggttctctagtctctgattagccatgactgtattggactttgaacattttctgaactaaaaacctctattctaaactaatctcatttggatgtgtaagtcttttgtaaaggcaagaataaataatatccaggacaatttattagttttctcagtattttcccaaatattagaatatttacctcattattggttggctgccaatgaccccatatgttctgtgagaatagtagctttatctttgatataatacatagtctccaaataggcaatacttcgcaattgattagattttcagagtagatttagagttatctgtttttctggtgagggtcaaatatttttgttaattaagctcacaaatttgataaattaagaattatctgcatttgtcttgtaacataataatgtgtaataaagtctatagaaaattaataaaaaaaaaaaaaaaaaaaaaa

SEQ ID NO: 3421 - DNA, 3648 bp, Homo sapiens
gccggggaaggacagacggacggcgcttcctccttcggcgagcggttcccgggcacctcggcttggcccgggcgcgagtggagcgcgcctggctggccgccggcctcctgaaggtcccgttgcgtaccccctgggctggatatgttcatgttcacgtgaagatggatttactgtacggtctcgtgtggctgctgacagtcctcctggaggggatctctggccaaggagtgtacgctcctcccacggttcgtattgtgcactcaggcttggcctgtaacattgaagaggagcgctactccgaaagggtctacactatccgggaaggagaaacccttgagttgacttgtctagtcacaggacatccacgtccacagatcaggtggaccaaaacagcaggaagtgcctctgacagattccaagactcaagtgtcttcaatgagactttgaggattacaaatattcagcgacaccaaggaggccggtattactgtaaagcagagaatggcttggggtctccagcgataaagtcaatcagagtggatgtatactatttggatgatccagtagtaactgttcatcaaagtataggtgaagctaaagaacaattttactatgagagaacagtgttcctccggtgtgttgccaattccaatcctcctgttcggtatagctggagacgtggccaggaggtcttgctgcaaggatctgataaaggagttgagatttatgaaccattctttacccagggtgaaacaaagatcttaaaactaaagaatcttcgacctcaggactatgctaattatagctgcattgcttcagtgaggaatgtatgtaatattcctgataagatggtgtcgtttagactgtccaataaaacagcatcaccgtcaattaaactcttggtggatgatcctatagttgtaaatcctggagaggccataacattagtatgtgttacaacaggaggagagcctgcaccttctctcacctgggtcaggtcctttgggactctgcctgaaaagactgttttgaatggaggaactttgaccatacctgccatcacctcagatgatgctggtacttacagctgcattgccaataataatgtgggaaaccctgcaaaaaagtccaccaacatcattgtgagagcattaaaaaaaggacgattttggatcacaccagatccttatcacaaagatgacaacatccagattggccgtgaggtgaaaatatcttgccaagtagaagctgttccttctgaggagctaacatttagttggtttaaaaatggtcgtccattaagaagttctgagcggatggtcattacacagactgatcctgatgtctctccgggaacaacaaacttggacatcattgatttaaaattcacggattttgggacgtacacatgtgtagcatctctgaagggaggaggaatatctgatatcagtatcgatgttaatatatccagcagcacagttccacccaatctgactgttccacaggaaaaatcaccattggtcaccagagaaggagacacaatagaactgcaatgtcaagtaactggcaaacctaaaccaatcatcctttggtctagagcggataaagaagttgcaatgcctgatggatcaatgcaaatggagagttatgatggaacactgaggattgtgaatgtatctagggaaatgtcaggaatgtacagatgtcagaccagccaatacaatggatttaacgtgaaaccaagggaagccttggtgcagctcatcgttcagtatccccctgcagtggaaccagcattcttggaaatccggcaaggacaggatcgaagtgtcactatgagttgcagagtactgagagcctatccaatacgggtgctgacctatgagtggcgcttgggcaataaattattacggacgggtcaatttgactctcaggaatacacagagtacgctgtgaagagtctttccaatgaaaactatggggtttataactgtagcatcataaatgaagctggagctgggagatgcagctttcttgttacaggaaaggcctatgctccagaattctattatgatacctacaatccagtatggcagaacagacaccgtgtttattcttacagtctacagtggacacagatgaatcctgatgcagtggatcggattgttgcataccggttgggcatcaggcaggctggacagcagcgctggtgggagcaggagattaaaataaatgggaatattcaaaagggagaattaattacatataacttgacagagctaattaaaccagaagcttatgaagtccgactgactcctctcaccaaatttggtgaaggagattcaacaattcgtgtgatcaaatatagtgctcctgtaaatcctcatttgagagaatttcattgtggatttgaagatggtaatatttgtttgttcactcaagatgatacagataattttgactggacaaagcaaagtacagcaacaagaaatacaaaatatactcctaatacaggacctaatgctgaccgtagtggctccaaagaaggtttttatatgtacattgagacatcacgacccagattggaaggcgaaaaggctcgacttctcagccctgttttcagcatagctcccaaaaacccttatggacccacaaacactgcatattgtttcagcttcttttatcacatgtatggacaacatataggtgtcttaaatgtttatctacgtttgaaagggcaaacaacaatagagaatccactgtggtcttcaagtgggaataaaggacaaagatggaatgaggctcatgttaatatatacccaattacttcatttcagctcatttttgaaggtatccgaggtcctggaatagaaggtgacattgctattgatgatgtatcaattgcagaaggagaatgtgcaaaacaagacctagcaactaagaattccgttgatggtgctgttgggattttggttcatatatggctttttcccattatcgtcctcatctctatcttaagtcctcgaaggtgaccttatcctggcagaggctataaaagattcaccaggcactggcatgaagaaagagtctttgtaaatggacattgaacaaacaaactaccaaagattcctccactgactactgactcaaaaataaaataataaaaacaaatttttttaagcactggggataaaaagacatcatggaagtataacttattccagactaaacataaaagataatcttgacctgagtagagaagagaccttcaggtgcttttgtggctaaaaagattacagcgtcatctggttgaactctggaaaaaaaaaaaaaaatgaaaaaaagaaaaaaaaaagagctatagaaatccttgtcaaagcacaaagtcatggctggttttgtttcaaatgaatagtttgcttgttaccatggaaacctaatggcctgccaacaaaaacctcactgtaaacagggtacgtgaagagctggcatttattttccttacgagaaggttttcgtagagaattaaataaatgtaggcccttttacctttggctgttacccttccttgaaaataacccgaactcagaattatttaaagcattcatgtttctccccaccttatccccatcccacctttattattat

SEQ ID NO: 3422 - DNA, 2205 bp, Homo sapiens
atacccatgaccaacctcctactcctcattgtacccattctaatcgcaatggcattcctaatgcttaccgaacgaaaaattctaggctatatacaactacgcaaaggccccaacgttgtaggcccctacgggctactacaacccttcgctgacgccataaaactcttcaccaaagagcccctaaaacccgccacatctaccatcaccctctacatcatcgccccgaccttagctctcaccatcgctcttctactatgaacccccctccccatacccaaccccctggtcaacctcaacctaggcctcctacttattctagccacctctagcctagccgtttactcaatcctctgatcagggtgagcatcaaactcaaactacgccctgatcggcgcactgcgagcagtagcccaaacaatctcatatgaagtcaccctagccatcattctactatcaacattactaataagtggctcctttaacctctccacccttatcacaacacaagaacacctctgattactcctgccatcatgacccttggccataatatgatttatctccacactagcagagaccaaccgaacccccttcgaccttgccgaaggggagtccgaactagtctcaggcttcaacatcgaatacgccgcaggccccttcgccctattcttcatagccgaatacacaaacattattataataaacaccttcaccactacaatcttcctaggaacaacatatgacgcactctcccctgaactctacacaacatattttgtcaccaagaccctacttctaacctccctgttcttatgaattcgaacagcatacccccgattccgctacgaccaactcatacacctcctatgaaaaaacttcctaccactcaccctagcattacttatatgacatgtctccatacccattacaatctccagcattccccctcaaacctaagaaatatgtctgataaaagagttactttgatagagtaaataataggagcttaaacccccttatttctaggactatgagaatcgaacccatccctgagaatccaaaattctccgtgccacctatcacaccccatcctaaagtaaggtcagctaaataagctatcgggcccataccccgaaaatgttggttatacccttcccgtactaattaatcccctggcccaacccgtcatctactctaccatctttgcaggcacactcatcacagcgctaagctcgcactgattttttacctgagtaggcctagaaataaacatgctagcttttattccagttctaaccaaaaaaataaaccctcgttccacagaagctgccatcaagtatttcctcacgcaagcaaccgcatccataatccttctaatagctatcctcttcaacaatatactctccggacaatgaaccataaccaatactaccaatcaatactcatcattaataatcataatggctatagcaataaaactaggaatagccccctttcacttctgagtcccagaggttacccaaggcacccctctgacatccggcctgcttcttctcacatgacaaaaactagcccccatctcaatcatataccaaatctctccctcactagacgtaagccttctcctcactctctcaatcttatccatcatagcaggcagttgaggtggattaaaccaaacccagctacgcaaaatcttagcatactcctcaattacccacataggatgaataatagcagttctaccgtacaaccctaacataaccattcttaatttaactatttatattatcctaactactaccgcattcctactactcaacttaaactccagcaccacgaccctactactatctcgcacctgaaacaagctaacatgactaacacccttaattccatccaccctcctctccctaggaggcctgcccccgctaaccggctttttgcccaaatgggccattatcgaagaattcacaaaaaacaatagcctcatcatccccaccatcatagccaccatcaccctccttaacctctacttctacctacgcctaatctactccacctcaatcacactactccccatatctaacaacgtaaaaataaaatgacagtttgaacatacaaaacccaccccattcctccccacactcatcgcccttaccacgctactcctacctatctccccttttatactaataatcttat

SEQ ID NO: 3423 - DNA, 1896 bp, Homo sapiens
ggcttgtgtcatactttccaatatggaggtgaagaactttgcagtttgggattatgttgtatttgcagccctctttttcatttcctctggaattggggtgttctttgccattaaggagagaaaaaaggcaacttcccgagagttcctggttgggggaaggcaaatgagctttggccctgtcggcttgtctctgacagccagcttcatgtcagctgtcacggtcctggggaccccttctgaagtctaccgctttggggcatccttcctagtcttcttcattgcttacctatttgtcatcctcttaacatcagagctctttctccctgtgttctacagatctggtatcaccagcacttatgagtacttacaactacgattcaacaaaccagttcgctatgctgccacagtcatctacattgtacagacgattctctacacaggagtggtggtgtatgctcctgccctggcactcaatcaagtgactgggtttgatctctggggctctgtgtttgcaacaggaattgtttgcacattctactgtaccctgggaggattaaaagcagtggtgtggacagatgcatttcagatggttgtcatgattgtgggcttcttaacggttctcattcaaggatcaacccatgctgggggattccacaatgtattagagcaatcaacaaatggatctcgactacatatatttgactttgatgtagatcctctcaggcgacacactttttggactatcacagtgggaggaacttttacttggctcggaatctatggggtcaatcaatcaactattcagcgatgcatctcttgcaaaacagaaaagcatgctaagcttgccttgtattttaacttgctgggtctctgggtcattctggtgtgtgctgtcttctctggcttaatcatgtactctcactttaaagactgtgacccttggacttctggcatcatctcagcaccagaccagctgatgccgtactttgtcatggagatatttgccacaatgccaggactgccaggactttttgtggcttgtgccttcagtggaactctgagcaccgtggcttccagcatcaatgccttggcaacagtgacctttgaggattttgtcaagagctgttttcctcatctctccgacaagctgagcacctggatcagtaaaggcttatgtctcttatttggcgtgatgtgtacctctatgtctgtggctgcatctgtcatgggaggtgttgtgcaggcttccctcagcattcacggcatgtgtggaggaccaatgctgggcttattctccctgggaatcgtgttcccttttgtgaattggaagggtgcactaggaggtcttcttactggaatcaccttgtcattttgggtggccattggggccttcatttaccctgcaccagcctctaagacatggcctttgcctctatcaacagaccaatgtatcaaatcaaatgtgacagcaacagggcctccagtactatccagcagacctggaatagctgatacctggtactcgatttcctacctttactacagtgcagtgggctgcttaggatgcattgttgctggagtaatcatcagcctcataacaggtcgccaaagaggtgaggatattcaaccactgttaattagaccagtttgtaatttattttgcttttggtctaagaagtacaaaacactatgctggtgtggagttcagcatgacagtgggacagagcaggaaaaccttgagaatggcagtgcccggaaacagggggctgaatctgtcttacagaacggactcagaagagaaagcctggtacatgttccaggctatgatcctaaggacaaaagctacaacaatatggcatttgagactacccatttctaaggcaatacctgtaaagc

SEQ ID NO: 3424 - DNA, 1950 bp, Homo sapiens
aatacacattttacgcgggagaaaatatgacatctggaaaacttactgtggcaggtggggccatctccaagccactcacagatcagaccgtagctgaatcccaggaagctgtgtttgaatgtgaagttgccaacccagattccaaaggcgaatggttgagggatggcaaacacctaccactgactaacaacatcagaagcgagtctgatggccacaaaaggagacttatcattgctgccaccaaattagatgacattggagaatatacctacaaggtggccacctccaaaacatctgccaaactcaaagttgaagctgtcaaaattaagaagactctgaagaacctcacagtgacagaaacacaggatgctgttttcactgtcgagcttacacaccctaatgtcaaaggtgtccagtggatcaaaaatggagttgtgctggaatccaatgaaaagtatgctatctctgtcaaaggaacaatttactctctgaggattaaaaactgtgccatcgtggatgagtctgtttatggcttcaggcttggaaggcttggagccagtgccagactgcacgtggagactgtcaagatcattaaaaagccataggatgtgacagccttggaaaatgccactgttgcctttgaagttagtgtttcccatgacactgttccagtaaaatggttccataagagtgtggaaattaagccaagtgacaaacacagactggtctcagaaaggaaagcccacaagctgatgctgcagaacatctccccctcagatgctggggaatacacagctgtggtcgggcaattggaatgcaaagcaaaactgtttgtggagacattacatattacaaaaaccatgaaaaatatcgaggtgcctgagaccaaaactgcctcttttgagtgtgaggtgtcccacttcaatgtcccttccatgtggctgaagaatggtgtggaaattgagatgagtgaaaagttcaagatagttgtgcagggaaaactccatcagctgatcatcatgaacaccagcacagaggactcggcagaatacacatttgtctgtggcaatgaccaagtcagtgccaccctgacagtcaccccaatcatgattacttccatgctgaaagacatcaacgctgaagaaaaagacactattacttttgaggtgacagtgaactatgaaggcatctcttacaaatggttaaagaatggtgtggaaatcaaatcaactgacaagtgccagatgagaaccaaaaagctcacacactcactgaacatcaggaatgttcactttggggatgctgctgactacacctttgtggctggaaaagcaacatcaacagccacactttatgtggaagctcgtcatatagaatttaggaaacacattaaggacattaaggtactggagaagaagcgagccatgtttgaatgtgaagtttctgaacctgacatcactgtacagtggatgaaagatgaccaggaactgcagatcacagacagaataaagattcagaaggagaaatatgtccaccgccttctgatcccatccacccggatgtctgatgctgggaagtacacagtggtggcaggaggcaacgtgtcaactgcaaaactctttgtagaaggcagagatgttcgcatccgaagtattaaaaaggaggttcaggtcattgagaaacagcgtgctgttgttgaatttgaggtcaatgaagacgatgttgatgcccactggtataaagatggcattgaaatcaatttccaagttcaagaacgacacaaatatgtagtggaaagaagaatccaccgaatgtttatctctgagaccagacagagcgatgcaggagaattgcttgaacctgggaggtggaggttgcagtgagctgagattgagccattgcattccagcctgggtgacagagtgagaatctgtctcaaaaaaaaaaaat

SEQ ID NO: 3425 - DNA, 3786 bp, Homo sapiens
agatcgcaagtcctgcaaacttacgtggcatttctgaagtcatcagaggaggtagagatgcagtttcagagcttaaaagaattttatgaaaccgaaatccctcagaaggagcaggatgatgctaaagccaagcattgttctgactcggctgagaagcagtggcagctatttttaaagaagagttttataacacaagatctagggcttgagttccttaatttaataaatatggcaaaagagaacgagatattagatgtgaaaaatgaagtgtacctcatgaagaacaccatggaaaaccagaaagcagaacgggaagaacttagcctccttcggctggcatggcagcttaaagccacggaaagcaagcctggaaaacagcagtgggcggcattcaaagagcaacttaaaaagacttctcacaacttaaaacttcttcaggaagcacttatgcctgtgtctgcacttgacctcggagggagcctccagttcattttagatctacgacaaaaatggaatgacatgaagcctcagttccagcaattgaatgatgaggttcagtacattatgaaagaatcagaggagttaactggcagaggagcccctgtaaaagaaaagtctcaacaactgaaggaccttattcacttccatcaaaaacagaaagagagaatccaggattacgaggatatcctgtacaaggtggtccagttccatcaagtcaaggaagagctgggacgtctcatcaaatcaagagagctggagtttgtagagcagccgaaggaactgggtgatgcccatgatgtgcagattcacctccggtgctctcaggaaaagcaagcccgtgtagaccatctccacagactggccctttccttaggagtcgacatcatctcatcagtgcagcggcctcactgctctaatgtttctgcaaagaacctacagcagcagctggagctccttgaggaggacagcatgaagtggcgtgccaaagctgaggagtatggacggaccctgtcccgtagtgtggagtactgcgccatgagagacgagataaatgagctcaaagactcattcaaagatatcaaaaagaaattcaataatttgaagtttaattacactaagaaaaatgaaaaatctcggaatctgaaggcgcttaaatatcaaattcagcaagttgatatgtatgctgaaaaaatgcaggctttgaaaaggaaaatggaaaaagttagtaataaaacctctgattctttcttaaattatccaagtgataaagttaatgtccttttggaagtcatgaaggatttgcaaaaacatgtggatgactttgacaaagttgtgacagattacaagaagaatttggacctgactgagcatttccaggaggtgatagaagagtgtcatttttggtacgaagatgcaagtgccacagttgtaagagttggaaaatattccacagagtgcaagacaaaggaagctgtgaaaattctccaccagcagtttaataagtttattgcaccctcagtgccgcagcaagaagaaaggattcaggaggccactgaccttgctcagcacttatatggtttggaagaaggacagaaatatattgagaaaatagtgacaaaacacaaagaggttcttgaatctgtgactgaattatgtgagtccctcacagagctcgaagaaaaactgaagcagggagatgttttaaagatgaatccgaatttggaagacttccattatgattacattgacttgctaaaggaaccagcaaaaaataagcagacaatattcaatgaagaaaggaataaggggcaggtgcaggtggcagatcttttgggcatcaatggaacaggggaagagcgactaccacaagacctgaaggtgtccactgacaaggagggtggcgtccaggacctgctcctgcctgaagacatgctctcaggggaagaatatgagtgtgtctcacctgatgacatctccttgcctcctctcccaggaagccctgagtccccccttgcaccatctgacatggaggtggaagagcctgtcagctcctccctcagccttcacataagcagctatggggtgcaggctgggaccagcagcccaggggatgcccaggaatctgttcttccaccacctgttgcctttgcggatgcatgcaatgataagagagaaacattttcaagtcattttgagaggccttacctccagttcaaagctgagcccccactaacctccagaggattcgtggaaaagagtactgccttacacagaatcagtgctgaacatccagagagcatgatgagtgaagtgcatgagagagctttacagcagcaccctcaggctcagggtggtttgctagaaacacgggagaaaatgcatgctgataataacttcactaaaacccaagataggctgcatgcttcctctgatgcattctcgggcctcaggtttcaatcaggcaccagcaggggctatcagaggcaaatggttcctcgagaagagattaaaagcacatcagcaaagagcagcgtggtcagcctagctgaccaggcacctaatttctccaggctcctgtctaatgtaactgtcatggaaggttctccagtgactttggaagttgaagtaacaggatttccagagcctacactgacatggtgggtagcctataatgacaagccataaatggaaacaaattcaatcacagagaaaaatcattctgtgagcactaactgaaaggtttagggctagctgattaatattctatgacactgcaactctgcatgattcaatctcacatcagacccctctcattttagtagcagcatagttaatacctttaagaaaaataaaaggtaaccatataaagtactaataatttaacaaatttccaaagcactgtaggttggttgtgcttgttttcttctgtgtttaacattccacatttctaaagattgtgggttgaaattattttttattgtctatttccatataagcatggcatctgcttgctttaactacctttatgcaattgaaaatataagaatttgtttttatttccctttactctcatttacctctttcatctttttcctctttccaacagagtcacacgtgtcatctttgtaacattttgttttactaggatttctttttacaaattttttcaatgtgagaggtggaatataaatatttctgtcacagttcctccaggtgacaggcaataaactcatttttgaaaggtagtataataactgagctgtaaacaatatgatttcactctggagacatcattattttttagcctctttttttcagtaaaagcaaactgtagaatactggttttggatcacctactattggtaacaaaagcagttctttctcaatatgtgggttacttttaaacatttagaaaattctcatccttaagtaaatttatttcaggacaaagttacaaatctgcaaaagccagtttatacttataaactaagattaagtaaaatagcatttattgatcacaatgtttcagtagatattaaatgatcagtttcagttattgtgtgtgcccattgatggtacttgaaatatgaaccagttatctaaggaacttatgagaaaactttggtttctcaaattatttaaaaaactgcacttgtgctatattagtgcagtcacttttgctttttgttttattgtctttactgttgcatgttttttacaaatcaagagtgtcatatttatgaattttaaagatatttaattcattattaaatctcagttcactcc

SEQ ID NO: 3426 - DNA, 1352 bp, Homo sapiens
tatgaaactaggttttccatctagtgccactgattaccagtagctcatgagagctctgtgcttgagtagagttgtaaagccaagtcctgagtttgtatgctggtgttagatcatgctgactgcccggagtgtggtgtggagaaggagacttgacagtgccctcagtttcccctcctgggttacctgatcctcaactctaatttttaatgtcaaaaagaaggaaagatgaaggagggacgaaaagagtgggagagaaggagaaaaaaaatgaaaaaaaacaagaaggatgaggatgaaatttttaaaaaaccaggtcaatggactattcttcccagcataaaattaaagaaggcagagagatacttgagtctgcctgctgaatccaagcatgtagtaatactgttgagacagttatggttgaataattttttcttcattcttaaaatgctcgtctgcattttaatacagacaattgcataaattatctcttataggaataaactctctttccacaaagattaaccctgcccagtatcatggggagcttttaaagagtttattagctgtgatataggaaataaacacttcagatgattgtggaaagaaaatagatacaactgtagctataaatgctaaaataccaactcagcatgttaggatcccttccccaacacacacttcaccactatgtaggttcccaccaaaatcccgtatgtgacagtaaatgacaactagttaattcttttggtaggttaagaagggcttttagggtatggacagtaatatcaggcatgaaattactttatcagtgtaatgtttatcagaatcacttgccaactcactatgcttcctctgagacttatatccaaaacatttccctgaaaggcagttctaccgtacaaccctaacataaccattcttaatttaactatttatattatcctaactactaccgcattcctactactcaacttaaactccagcaccacgaccctactactatctcgcacctgaaacaagctaacatgactaacacccttaattccatccaccctcctctccctaggaggcctgcccccgctaaccggctttttgcccaaatgggccattatcgaagaattcacaaaaaacaatagcctcatcatccccaccatcatagccaccatcaccctccttaacctctacttctacctacgcctaatctactccacctcaatcacgctactccccatatctaacaacgtaaaaataaaatgacagtttgaacatacaaaacccaccccattcctccccacactcatcgcccttaccacgctactcctacctatctccccttttatactaataatctt

SEQ ID NO: 3427 - DNA, 2055 bp, Homo sapiens
aaaagctctacagaccagtgtccggagcgttcagaggcggggcggctctcgctgttggcagcggcccggaccaatgggcacgtcgcccgcggcctataagagtccgctgggccgcgggctgcaggcgctagggtcggttagtcgtcgccgtctgaggtgttccctggctttgtctcgccgtcgttgccgccccgtccctgccttcgtgccccccgccttggcccctgcccagccgctctccctgtcctcctccccttaaccacccccacggtttctgccgtcggggcccgggggccgggcggatgatgccgtcggagagcggagctgagcgcagggaccgggcggctgctcaggtggggacggctgcggccacggcggtggccacggcagccccggcaggcggcggccccgacccggaggccttatcggccttccccggacggcacctgagtgggctgagctggccacaggtgaagcgactggacgctcttctgagcgagccgattcccattcacgggcgcggcaacttccccacgctgagcgtgcagccccggcagatcgtgcaggtggtccgcagcaccctggaggagcagggactacatgtgcacagtgtgcggctgcatggttcagctgccagccacgtgctgcaccctgagagtggcctgggctacaaggatctggacctggtgttccgggtggacctgcgcagtgaggcatccttccagctgaccaaggcagtggtgctggcctgcctactagacttcctgccggccggtgtgagccgggccaagatcacgccactgacactcaaggaggcatacgtgcagaagctggtgaaagtgtgcacagactcggaccgctggagcctcatctcactgtccaacaagagcggcaagaacgtggagctcaagtttgtggactcggtgagacgccagtttgaattcagcatagactccttccagatcatcctggactccctgttgctctttggccagtgctcgtccactcccatgtctgaggccttccacccaacggtcacaggcgaaagcctgtacggggacttcaccgaggccctggagcacctgcggcaccgtgtcatcgccacgcgcagtcccgaggagatccgaggtggtggcctcctcaagtactgccacctcctggtgcggggcttccggccccggcccagcaccgatgtgcgcgccctgcagcgctacatgtgctcccgcttcttcatcgactttccagacctggtggagcagcggcgcaccctagagcgctacctggaggcccacttcggtggggcagatgcagcccgccgttacgcctgcctggtgacactgcaccgggtggtcaacgagagcaccgtgtgcctcatgaaccacgagcgccgccagacgctggacctcattgccgcactggcgctgcaggcactggctgagcagggcccagctgccactgccgccctggcctggcgccctccaggcactgacggggttgtgccagccactgtcaattactacgtgacccccgtgcaacctctcctggctcacgcctatcccacctggctgccttgtaactgactcagaccctggccagaagggaagggactgggcctcacggggtggggtggggcctccaagagtgtgtggaggacatgaccagaggcgcagaatgtgccaggaggcccagcactgcagggttgggcctttgattgaacagaccagactttcccgagcacgaggcccctgtgggcttaatgccagcctggggctctcagcaggaggaccctttggttattgcatcacacttttggaccagcatgccggtggggtgcaggcgccatttgtcttggaagtcaatttccttcaggaggcaaagcaagtttggggctgagcctgaatttgccacagtcaagtcaacgttcccaccccactggcttggttacagggctctcacatggggtaggggagccatactcccacccccttgcgtattcccctgggtttgttgatattttgcactcttaacacctgccaataaagacggtctacactg

SEQ ID NO: 3428 - DNA, 2174 bp, Homo sapiens
agctaaggcgcgctggatccccggagggcggaggacctccacggtgcacccagcttttcccagccaccttccagcggggccctcccccgcgtacccccatttggcagatgagaaaattgaggctcccagaggccaagtgattctcaaggtcacacgaggaagcggtagagccaggcggggacggctctgggtggctcttaggaaaagtccgcctgagaactccgtacaggagctcccctgtcctccagcctgggggagtgagtatgtgtagggccggggtacctttccgtggggcaaggctctgccaaaatctgggagtgaggggagtcagggagctggggccgcagggcgggccctgcaccgcaaatgggaggggggcgacggaatgggcgtgcgcacccatgggggtgtgtgcatgtgtgtgggagtgtacatgcgtggagaggcactgccttgcgtgtgtgcacacgtgtgaggatgtcagcgcctgtgtggccgcgggactcaaggctggcctggctcaagtgaacagcacgtccaggaggcgacctcgcccgcgggtttgcattctggggtggacgagctgggtatgtgtgcctgagggtttcttcgtgcaggtgtgcacagggtgtgggtgccattgtgtgtgagagacggaggatgggaggccggtgcctgtggcccggtgcgtgtaagtgcggacgcctgcacctccacttaggtccccggcctccgacgactaacttgggtgtggagtgtttgcccctgccagggtgcgtatgaccccgccagtgaccggagttgctaatggtgtcatgcacccaccggccacccttggcgcgagcgcccccctctggacaccctgctccgtgcgcgctcacagttcgcctgtgcggggccggggccagggtcaggagccggggatagggaggaagagggcctgtggacaagctgagccgggacccctgggacctttgcggaggtggcctgggagcgctcagttcccaggctgaggcttcccgctgacgcctcctggccgcagcgggctccccccgccccaggaatgttcctctcccatccagtccgcctcccctagggcaggccccctgggggctgccgcagccccgcctcgccttcctgggctcccgggagggggcgaggcgagcaggacgcctgggttctctccccccacctcccataccagggagaaattcctccgaggtcccctcaggctctgggttcccaaaataaccctgcgggggaagggaggctgtggagggagggaagcgggaggggcgcagagccgagctgcggggtgctgcaggtgcctctggggagagggcgcgaggagaaggcgccctgcggggggctgggcgccagccagtcctgggatcttggttcgtccccatcctcgtgaagcccctcggccttcccgcgactccgagggtgggccggaagcctctctgcgggtccgtttcccaactggcgggttgcaccatcccgggccagaccgtttaaccccgggagtggccgcgggggacaactccgcccctgtccagcagggggcgtgcccgccccgccccgtttctgcccgcggggccgctcccccgcccgcgactccgcagactcccgctctgcctctcccgggacaggggttcggtccgagcccggtgggaggctcccggagcgcagcctgggcccagcccaccccgcgccggcggccatggcaggcaccctggacctggacaagggctgcacggtggaggagctgctccgcgggtgcatcgaagccttcgatgactccgggaaggtgcgggacccgcagctggtgcgcatgttcctcatgatgcacccctggtacatcccctcctctcagctggcggccaagctgctccacatctaccaacaatcccggaaggacaactccaattccctgcaggtgaaaacgtgccacctggtcaggtactggatctccgccttcccagcggagtttgacttgaacccggagttggctgagcagatcaaggagctgaaggctctgctagaccaagaagggaaccgacggcacagcagcctaatcgacatagacagcgtgtgcgtggggggagcacagagggctgggggggcactcagtatcctataccatctgtgcttaataaatgtctgttgaactg

SEQ ID NO: 3429 - DNA, 2284 bp, Homo sapiens
acggggccgcctggagaggtgctgggagctgggtggagcttagaggaattaaactttggccctgcgcctcgtccagcctaggttccacccttttctgggaacaatgaatctcgctgtgttgtccaggctggagtgcagtggcaccatctcggctcactgcaacctctggctcccaggttcaagcgattctcctgcctcagccccctgagtagctgggattacaggcacgcgccaccactcccaggctccggtagattgcaaatgacctgctttctttctgttcccgggcgtttggacccctgtcttggaccgctgtcggatagtaaatcccaagtaaggtacctgccgtcggcagatttgagctttcttcttggacacctaatacccagagtcctccaggctccggtagattgcaaatgacctgctttctttctgttcccgggcggcatcggacccgtcggagagtaaatcccaagtaaggtacctgccgttggcagatttgagctttcttcttggacacctaatacccacagtcctccaggctccggtagattgcaaatgacctgctttctttctgttcccgggtggcatcgacccgtcggagagtaaatcccaagtaaggtacctgccgttggcagatttgagctttcttcttggacacctaatacccacagtcctccaggtgagtcctaaggatcttaggatacgcgatgggggtcctaaggcagggggggaagaggggatggctgtcacccaacccaaaatgggcggcctttatgttcaggttttgcccaagagtcagcttatttgcttcttgtactatcagggcagttgatgccacggccctcaaacatgaggggccatcctttagaaaccctctctagttgtttagacaactaggccaccggcctcagccagggccccagagtttcggttaaaagtccagctgccatcttttctctatctgacgcattcaatggaaaaggctttgtcagatcgggtagccccagggctggggctgccagaagtttttcctttaactcctgaaagactttttgttcttgggatccccattccaaaggttccgttccccgccccctttgtgacctcatacaaaggcttggctaatactgcaaagtttgggatccagtctacaaaaccacacagctcccaagaattcccttacctgccttctgcccttaggctccggtagattgtaaataacctgctttctttctgttcccgggctgcgttcggacccctgtcggatagtaaatcccaagcaaggtacctgccgtcagcagatttgagctttcttcttggacacctaatacccacagtcctccaggctccggtagattgcaaatgacctgctttctttctgttcccgggctgcgttcggacccctgtgggatagtaactcccaagtaaggtacctgccgtcggcagattggagctttcttcttggagacctaatacccacagtcctccagaaaaacaaacaaagacatggatttactgtgcatattagcagatccatactggaaaatgcatggaggtttcatatacaccacttacagttttcagctcctcagtagtgacaaagccatacccatcattgtcgattcgatcaacaatcttccctagcctctcctcgctctcgtccggggtgagctcgtcgaagttcttggagtccttcttgcccaggaaggcctcgtggtcgtactggaagctctggttgtcctcagggggccgctcgcccagctccgagtcgggccgcaccacgcgctctttgcgcaccgtgggcttggcccgcagaacccgcggcgccagcaccagcgccagcagcagccccagggctaaccccggcggccaccgcgcgccatcgtcccgaggagagggcggccgggagggagacgctgagcgagcgacaacagcggcagctcgggaatgggggctcggagcgcggcggccaagttttatgttatgtatattttacaagtaaaaaaattttttcacctcagcctgaactgaacactagctgacagacgttttgatttctttgaccatcacggaatcgtggccaagcgcggtggctcacatctgtaatcccaacactttgggaggtcaagatgggcggattgcttgggtccaggtgtttgagatcggcctgggcaacatgacaaaaccctgtttctagtaaaaatacaaaaattaaccaggctcaagccatgaccatgcaccattgcactccagcctaggcgacagagcaggaccctgtctc

SEQ ID NO: 3430 - DNA, 3862 bp, Homo sapiens
ttggtttcatgaacggggccacatatttcgggaagcactcgggcattgtcaccagctatggcaagtgtcgctggtgtagtagcctctccagcatgggcggtgctggggctttacagaggaggctccggaagcctgttctggcaccactgggttcttgacctataatctatgctgagtactgaagattttcctatctactttccttccttctgtatgttcataatgccccaacaggctgtcattgcagtagacagggctttccgggacttagagctccgcttcacacatctggtatactgccctgttggcttgaacctctgaagagaggcagggtaggaacggtgactgctgtaaaggcacagacctgcacggccgggcgatacagactgagcaaagaaaagagtacccgttgaaggggtgtccactcttttggcttccctgggccacactggaagaagaagaattgtcttgggccacacatgaaatacactaacactaatgatagctgatgagcttaaaaaaaaaacacaaaatgttttaagaaagtttatgaatttgtgttgggctgcattcaaagccatcctgggccgcctgtagcccatgagctgtgggttgaacaagtttgcattagaaagtgaagaagtgggggcaagcccagtgtcatggcttgacactggaagccagtggaaggtgcccaggaagagttgtggggaatgtccttagactggcatcacacacccacgtgggatggaaggtgtcttccttttgtctcactcacggtggccctggccatctcctgccagcggtgctgaaacagggcctcctgcagagactgcatggctggtgactggccctggtgtcttgcagactatgatgcagtgctcacggaggctggagattacacagaaaaatatctgaagcttcaaaaactctttcaatctgtctcaggtactcagcacccatttaacttacgggccagccctcctcatgtggagtctctgttctgtggaaaagtgaggaaggcgtgggtctcccttgtgggcagcagttacaccaagctcctgagaacaagggcaaccttaacttcgaaccctgggcttaaaatctgtgtgattttttaaaatcagggtttctaagcattttataagcctcagtttcttcactgaagcataaaggtagtaaccttggtctcctgtgatgactgcgaagattgagttactctttgtaaagctcttataccatggatgacatagtaacccccaatatgaaaggaaaagccatgctggataggcatggggggcttagagaaggcagtggtcatctcaggcactttttgccctgtgccccatctccattgcagcaactcccctgccccgagtacccaaacttcctcccaaggctgtgtatccccccgtgagaccgtcgctgtacctcccgctgtgggacgccctatcctacttaaatgaggtgcgtgctgcctggccacaggaggcggagtggccattggagggatgggggagggattccttcaggaaacttcttattaggaagtgggaaaacaaatcctctgcatttcattcaaatttagaactgtgggacaagagccaccagctccttccgggtggactgtgaaggggtttgaccttggagtcagtgtgcaggggaggggcagcaggacgtcggaggatcccgggttcccgcttagatgaacctgtctggagatgctcttgtttggactgcgtggtccttacggaatccacgtaggaaaagctgctgagctggaatcgggagactagcttctgcccgtgcttcaccagcagctgggcctgaacttcctgggtcactgctcccccttttccatcagccttcctgtcctattttgaagaaaggtgaaagctgtttggaactgaaactgtagcccttggattcacattggttttacctctgctatcactattttagagaaaaggtagtgactggtacactaaagaaactacatttatttaatgtaactaaatttaatttaatgaaataaacatttgcttggtgcctcattcattgctagacttcaactattttagaatacaatttatttactctttttttttcttgagacagggtcttgcttggtggctgtggctggaatgcggtggcacaatcatggctcactgcagccttgaactcctgggctgaagcaatcctccggcctcagcctcttgagtagctgggattacaggagggcaccaccacgcccagctacatttttaagttttttgtagatgtgggtctcactatgttgcccaggctgctctcaaactcctggcctcaagtgatgcacctgctgcggcctcccaaagtgctgggattacaggcgtgagcccctgcgccccatccatttcctctgttaatcagttcttaggattataacgattgctccctcgtcaccatgccctgcatttccctgagtttccttcctgggcagtggagacgtaagcacagagcagtgtcacatggcatctgtttcatcatttcccattcgaagaacccttggggaccattaggcaggaccaaatgacagggtcttaggaaggaggatcctgactgctcagcccttggacttctgctcttgccatttctcctcatagccagtcaggtcgcgtcagcccgtcaacatggagaaccttcccataaacaatgggagcggccagtcctatgggcttgtcctgtatgagaagtccatctgctccggaggccgcctccgtgcccacgctcatgacatggcacaggtgtttttggatgagacaatgatagggattctgaatgagaataataaggacctgcacattcctgaactcagggaataactggatctgtcagcatcaataactcttccctggagggctttaccatctattccctggagatgaaaatgagcttctttgagaggctccgctctgccacctggaagcctgtcccagacagccaccagggcccggccttctactgtgggaccttgaaggctggcccttctcccaaggacaccttcctgagcctgctgaactggaattatggatttgtgttcatcaatggacgtaaccttgggcgatattggaatattgggcctcagaaaacactgtaccttcctggagtttggcttcatccagaagacaatgaggtcatcttgtttgagaagatgatgagtggctcagatatcaaatctacagacaagcccacgccgtaaaactgtgtctgaacatttttttttttttttgagatggagtctcactttgtcgcccaggctggagtgcagtggcacaatctccgctcactgcaagctcagcctctcgggttcacgccattctcctgcctcagcctccccagcagctgggactacaggtgcacgccaccacgcctggctaattttttgtatttttagtagagatggggtttcaccaagttagccaggatggtcccaatctcctgaccttgtgatctgctctcctcagcctcccaaagtactgggattacaggcgtgagccaccactcccggccgtgaacatattttttgggttgctggagttcatctataagtcatttttgaggaataagatttatgttaagactatcaaacacagtgttgcctacaatagcaaaaatgtgaaaataacaacaacaacaaaacagcagaggaattgttatgtattttgtagtctatctatatgatgcctatttttaggctttaaaaagtcttcaaaatctttaatgactgatttatctagttaaatgcttaatccttagcaggctcttattctttaattaaacgtgcctttgagtagatgtgaataaaataaaaacaagtttc

SEQ ID NO: 3431 - DNA, 2091 bp, Homo sapiens
gcacccgccgtcatgctccgggccgcgctgcccgcgctcctgctgccgttgctgggcctcgccgctgctgccgtcgcgggtaagcccttacgtagtccctcgccgggaccgtgcgcgaccgccttcgcccccttcccaacgcacgctcttcgtccccgcgcacccgagggcggcccgcagacgcaacacccggccggacatcccgcccttccctgcacgcccgtcccccgtgggtcctggctccgggtcacctctcacccgcctgccctcggggaggggaggtggccgagaataagggagggctctgtcttcctcggagtccacatcctcaccgcagaccccactccgcggggagggaacccccaaattaggccagttggccggagaactgagggacttggagtcgcacgacgggcgccgtttcagggcaatttcgggctgaaatgagaagcggggacgttggtggcgatttcccctgctggtgcgcggccggagtggggttgctgggatgggggtgggggccggaggaagtaggccctcttttgcaagcagcgctgtttgtctagttggttggtgttcaagttgtttaaacaggaaaacagttcagccaaataacccctggatggaagaggaacgggaataggcaaagcttggatttcactgaaatcaaggagttttaaagttctagtctgctgttgtgcaagtgacatctgaaaaatcacacacgtgatcattcatttacaaaacgactcgtgaggaaaatgcacaattctattgaccgtggtctttatttttaaaaaatttccatacaagcatgtcaaaaatatgtggatggggagactctggagaacacagacttccaaaaacaccactgactgaataattccaggaattaaagagcaaaataaacaagaactaaatgagtacttgtgtgggcttaaataaagtgcaagagatttaaataaaatgcaagagattccccccccccaccccttgccccagatttcactgcgtttttataataactgcctgctcgaagtctactgacaggaatatttcagtggacctcagtgttggaggcagcagcagctcagaacttggatacaaacccaaggttcctttcttgaaaacttctgtggacctgcatttatgactggttgtgacatctgctgcctatcaaaggggcagaaacaagatgtgcccatgttcacattgttcagactgggaacattaattttgtctaagacaaagctgggctgtctctgaaccctccttctgcacaccctcattttgcgagccagtaacatctcaactctcatgtaaaccaccctctgcgaggctgtgcatttgtactttaggctagtcgaattttcttgtcagatttttctttcttgtcagacttttaaagaaaatcagtttctagattttggtatgtctcttcttcagtgaagctgttttgaccagcaatagagggcaaatttccctttggaaatttttgtgcatttcctttgataagtccagtgtggatcaataggcttttcaagagctttagaaaagtgcatgatgaataaattaatgttaattaatcagctcctcccagtcaggaagctttaaggattaatttggaaatgagtgtgagctttgacctagctagttaaccaacttatctgcacttcagtaaaacagagataatacttactcatggggctattgggagcattaagtgggaactccacgtctagtccctattacaggcgtggttcatcttggtttccttccctttattctcttcatacaaaatgaagggtaattgttgcaaccagaaaacgtatgaataccaccttatgtatattggatgtttatggttactgaacacattcatatgtatgctaatgttatagggctgaaaaactaagtatgtttttcataatactttacaaatctcccatccaagcaagatcaggggtcatatttggcttagaactaagtcaagaaagagtttgttgctgaataccaagatcttaatagaaaagctcttatgatgttgcataataaatatgggtattgcatataaatgtgatgttgaaacgg

SEQ ID NO: 3432 - DNA, 3472 bp, Homo sapiens
ggagccccgcccgctggcgcgggggccaggagtgcccgggggattgagttgcagccggggtggtgtcggggtttcccggctcagcacattctcccctactccccacagccgccccgatattaatagccctgccgcagcccatccagctggctcagagccgttccccatgcccgggtgtctccatcaccccagaaaacatgcaaaacagctcggcgcctctgtgttcctgactgtgaaatggggatagggctctgtgtcccaccagcgaggtgctggaagaggctcacgaggagctccagagggcagcctctagagcggcccgcggccactattattatcggcctttctattgtggagaggagtaaacagactcagagaggtcccgtggatttctcaaggtcacacagcgccccagcagcggagcaggaatgcaaacccaggatctccgccgcgagatccaccccggcgcccccgagtcccgcagttcccggcttcaggacaaccccttgccaggtccaacccgagctccttcacccccatccggcccctccctcctcccccatatttagtgcgaattcgatctggggctgggctgggccctacttaatggggcccgggtgtccgagagcgtgccgagcggagcgaagccaggagcccgatcgagatgatgatggttatgcagcccgagggtctgggggccggggaggggcgctttgcgggcggcggcgggggcggcgagtacatggaacaggaggaggactgggaccgcgacctgctgctggacccggcctggtgcaactcacacctgcgcaaggcaggcacccagatcgagaacatcgaggaagatttccgcaatggcctcaaactcatgctgctcctggaggtcatttcaggtgagaggctgcctaggccagataaaggcaagatgcgcttccacaaaatcgccaacgttaacaaggccctggacttcattgccagcaagggggttaaactggtgtccattggtgctgaagagattgttgacgggaacctgaagatgaccctgggcatgatctggaccatcatccttcgcttcgccatccaggacatctctgtggaagaaacctcagccaaggaaggcttgcttctgtggtgccagaggaagacagcaccgtaccgcaacgtcaacgtgcagaacttccacaccagctggaaggatggcctggccctctgtgccctcatccaccgacaccgccctgacctcatcgactacgccaaactgcgaaaggatgaccccatcggaaacctgaacactgcctttgaggtggcagagaaatacctggacatccccaagatgttggatgcagaagacattgtgaacaccccaaagccggatgagaaggccatcatgacctatgtgtcctgcttctaccatgcctttgccggggctgagcaggcagagacagctgccaacaggatctgcaaggtgctggcagtgaaccaggaaaacgagaagctgatggaggagtatgagaagcttgccagtgagctgctggagtggatccgccgcactgtcccatggctggagaaccgtgtgggtgagcccagcatgagtgccatgcagcgcaaactagaggactttcgggactaccggcgtctgcacaagccgccccgcattcaggaaaagtgccagctggagatcaacttcaacacactgcagaccaagttgcggctcagccaccggcctgccttcatgccctccgagggcaagctggtctcggacatcgccaacgcctggcgggggctggagcaggtggaaaagggctatgaggactggctgctctcggagatccggcgcctgcagcgactccagcacctggctgagaagttccggcagaaggcctccctgcacgaagcctggacccggggaaaggaggagatgctgagccagcgcgactacgattcggctttgctacaggaggtgcgggcgttgctgcggcgccacgaggcctttgagagcgacctggcggcgcaccaggaccgcgtggagcacattgccgcgctggcccaggagctcaatgagctggactaccacgaggcagcctcagtgaatagccgctgccaggccatctgcgatcagtgggacaacctgggcaccctgacccagaagaggcgggatgcgctagagcggatggagaagctcctggagaccattgaccagctgcaactggagtttgcccggcgggccgcgcccttcaacaactggctggatggtgccgtggaggacctgcaggacgtgtggctggtacactctgtggaggagacccagagcctgctgacagcgcacgatcagttcaaggcaacactgcccgaggctgaccgagagcgaggtgccatcatgggcatccagggtgagatccagaagatctgccagacgtatgggctgcggccctgctccaccaatccctacatcaccctcagcccgcaggacatcaacaccaagtgggatatggtccgaaagctggtgcccagccgtgaccagacactgcaggaggagctggcacggcagcaggtaaacgagaggctccggcgacagtttgcggcccaggccaatgccattggaccctggatccaggcgaaggtggaggaagtggggcggctggcagcagggctagctggctctctggaggagcagatggctgggctacggcagcaggagcagaacattatcaactacaagactaacattgaccggctggagggtgaccaccagctgctgcaggagagcctggtgttcgacagtaagcacaccgtctacagcatggagcacatccgcgtgggctgggagcagctgctcacctccattgcccgcaccatcaatgaagtggagaaccaggtactgacccgagacgccaagggactgagccaggagcagctcaacgagttccgagcatccttcaaccactttgacaggaagcggaatgggatgatggagcctgatgacttccgagcttgcctcatctccatgggctatgacctgggggaagtggagtttgctcgcatcatgaccatggtggaccccaacgcagctggggtggtgaccttccaggccttcatagacttcatgacccgagagacagccgagactgacacgactgagcaagttgtagcttccttcaagatcttggcaggagacaagaactacatcacccccgaggagctgcggcgcgagctccctgccaagcaggccgagtactgcatccgccgtatggtgccctacaagggatccggggccccggctggagccctggactacgtggccttctccagtgccctctatggggagagcgacctttgaccccaaccactgaggttctctatgcaagatggagagaggatgcaccctgtggctgatcccatccgtccctcggagcaagggcctaagagaaaagccagccaagtgcttctgaataaagatccctctctgggtctc

SEQ ID NO: 3433 - DNA, 3300 bp, Homo sapiens
tttcaaactgtcctccaacaaaggtaatataggaaaaaagatccaccagcttagaggtaaaaaggagtgaacaaataagtaacactcaatagttttaccaaattttcaaacatacttttactacatctttttcaagtaacatgctcttaagggcagttaccatcgatatgtcactatcatgtgcgtttctcaccaagctccttttacatgcaaaagcctgttatgcaaactccacccaatatagtaaacatttcattaataattacatcaatagagtttacaaacttttcacctatttacttgcatttttaatctttcttcttaagacttcatttcttttcttttaccttgtcgaatgtcttgccaaactgactaatgtttttagtgtttcagtatgtttcgtttcttcaccagcttcaaaagaattctgtcatctcaaatttcaggggcttttccacattactaaaaacagatttttctcatttagaccagaacttctagtctaagttcttcattgttaggaatttaactggccttctggctcaggtctttggcacctgtgacatgaaacgggctccaaaatgtaatttatgtaactctcaatcttgtatataaaatgaaatccatgaaggaaaaaaatataattaaaacatcaaaagtttaaaatttaaaaaatcctttactttgaatttgtaaaccaaattaatgagtcactttaaacaatatcttttaagaaaattttataaggttcagtcagaactctcacattctaaaaagacgtgaggtagaatttttccctgtgtacactaggtccttttcttgtcacctggcctcaaatttttctgaaagcagaattattaccagctttacgtatcttgcctattaactcccaacaatgccccaaagcaaagagcataatttgtggctcctggtgattagatttatactttaatttgtcaagttttaaaatttttttcaatatgcccagttacatccatttcaaatgattctggctgatgtctttcctagagacctgatcatttgtatgtgtgaaccatcatgatacttctttaatgaaaccatctgtgactgttctatttcctactttccagttgatgtttcatgtggacaatggtgcgggcagattcactgctgtctatgatgctggggttccagggcatttgtgtgatggacaatggcataaagtcactgccaacaagatcaaacaccgcattgagctcacagtcgatgggaaccaggtggaagcccaaagcccaaacccagcatctacatcagctgacacaaatgaccctgtgtttgttggaggcttcccaggtgagtgttggctaccccagcaacaatttctttgctctcttatgttactggttttgaaaacatttatatttacatgtgtctaagaatgtgtgcttatgtgtacttgcttcctagctttagaatctgcttagaatctgcaccttacctaaaatttccagtgtgtaaaatgaacatattacttatataaaccacatgggactgaacttttcatgagagcccccaaagtttccttcgtggagagattgaagctggaggaaatgaatttggcttataaaagatatgaggcatttaacagcaattggagccaaacttggtgttctttctgatttttttaaaattaatataccagaggaatcataaaatgttatggaacttatttcctcaagttctggaaatcattgggttaaacatagctaatttcccccttatgttattatagagtttatatttatattacaaagaaacgcaagcaataaatcctcattcagaatccttctctagcacattaaatatagcatgtgaactgtagagatttacctaaagtgcccataaacaagagtggccaacttgatgagaagtaagccaagtgcctcttaataagtactgtaataacatagcctcctggaatggtctttcatcattttgtcaagaggaacttttatccctgtttatataaagctcctttgctaaatgaaacaagcaaaatgtatattcagcaattgttgacagagcaatgttgatagaaatgcaatgggggcccaacgacagctcctctttccaaagtggcttctgtgttttaaaaagatcttttgcttcaatcaggataaattccaagatattatgaaggaggtaatgtacttctccattcagtctatgataatgggatcctaattaacacctagtaggcctactgaaacaagcacctctataataagaggaagattctacatgaatatccaacctacttaacctttagggatttatttttacaatgtaagaaagtgataaagtcaccttcaaaaagttctaagtcagtacttaaaagtatttgatcaattgctttgtttcatgaagtaacattttacaattttaagtcacaactataaatttgttcatcccaaaccaagttatttcatgtcttaagatgtataattctagatgttttcatatgttataactattaaaaagttgaggctggacatggtggctcatgcctgtaatcccaacactttggaattacactttgggcatagatggggagatctcttgagcccaggagttggagagcagcctgggcaacacggcgaagggaggatcgcttgagcccaggaggttgaggctgcagtaagccttgattgcgccattgcactccagcctgggcaacagagcaagaacctgtctcaaaaaattttaagttgatctttctttctctacaattctattagtaaggctaaaaacaaaaccactaactttgcataaaacagcattccaatttaatctcaagctaacagttgactttgaaacatgctcttaatatttggtgcaggacatttcaaagctgagccctcttgcattgcctttttcagatgacctcaagcagtttggcctaacaaccagtattccgttccgaggttgcatcagatccctgaagctcaccaaaggcacaggcaagccactggaggttaattttgccaaggccctggaactgaggggcgttcaacctgtatcatgcccagccaactaataaaaataagtgtaaccccaggaagagtctgtcaaaacaagtatatcaagtaaaacaaacaaatatattttacctatatatgttaattaaactaatttgtgcatgtacatagaattccttctgtattcagatggtgctaattcagactccagactgaattttaattcaagttctttctcaagtctataaatattaaactgattatttcattctaaataaat

SEQ ID NO: 3434 - DNA, 3758 bp, Homo sapiens
ctgttgattggccactgacccgtgctgcaggcacacaaaggaagctgcacccacagcagtctgttgtggatggttgctgagctgcgcattcggcattgggcttgctttgtttcctgccaggcccagcattttcttctaccagatcggcaggcttgtgggcttcttcctaggtccctcccctgcactctgaataggaaagctggaagctgtgctttagagaagctttaagacgccgaaagaaaccagaagagtgagcgccagttgtatgtgcgtggtctccatccgcaaagccggagctgggcgcaacagtgttgacttgtaattgatcaatttagatcgggcgcaggccgggggagggcagtgcttttgatttaggctgggaaaggcctcctagtgactatgttcaatttggaggaattcagatgctcttttgttatacaagtgaagctgtgtaatacaaatgaggagttttacttttcctaaatcttccccttatcattcaagtattgaggagttttacctttcctaaatcttccccttatcattccagtattatcagtgagatctggttgtgatttatgtaaatggtggctaaaaaattcaaactactgagggggagaattctcattttacagcttcacatgctgtgctgaactaaataagtagcgtgggatgttggctttgtgacaggtcttttgtcatttttcagaaagcattttgacttgttgatgtcaatttggaacagctgaaaaaatacaggaaaataagataaatacgtacatgttgagggtggggacaaaatgaaggttctgaaccagctgccggcttacagtagccatataagcaacagcagcaatgcaccaacctggtgagtaataggcctgattcactggagagatactagcacctttaatgagtcagatagatgcacaatgggtgtgggagcagttggacttgtgggcacaaagtctagcaagaagctcagacttgcaaacaactgtaggacgtgcaaagcaagctggcattggagcttgccgggcacagctgctcaggaataggcagctggttttccctttgatccctgagattccaaaggttactttcctctttgttcccttcccagggtcaattagagtagaaactgcagatgcttttcagttgagaattttcctagaattctcaaaaatgtgtatgctggcttaaaatctgccatcaagaattctgttaccttgctttaagcctccagttccttccagatgtatggtggaggaggccagagggcccttgttttggggcttcagaggatggttgttatctggatgagcactgtggaaagactgagagagcaactgagagaaagtgggcccctgaatgaaagtgatttcgcaaattttaggcagatgccaccatcagaaactgatattttctgacgtctttctcaccttcctctagagcattcagtccagaaatgaccagcctgtccaaagggggaaattactgatattgatctgttccttagagcagtgtttcagtcttttttttttttttgagatggaatctcattctgtcacccaggctggagtgcagtggcacgatctcggctcattgcaacctccaccttcctgattcaagtgattctcctgcctcagcctcccaagaagctggaattacaggtgtgcaccaccacacccggctaatttttgaattttttatagagatggggtttcaccatgttgccaggctggtctcaaactcctgacctcaagtgatcctcctgcctcggcctcccaaagcgctaggattacaggcgtgagccaccatggccggccttcagcctttgtgatattaaagcacagcaacacatttcccattacacccctgaacacacacacacagaaaacccaaaagtttcacaaaatgattcttgctcttactactctcagtacactctgtatttaaaaaaaaaaatgctggttgtggcttcctaagtggtgcgtgcagttttcaaatcaatgcccttggcgataaagtgtgccctatactgattatctctggacaaagtctgaatggggcttggctctaatctctagtcctcattggacattttacatacctggcctttgcctccaccctgatgtggagtgatcatgggggtgggaaatatagctggatccgaaagctctgaagtggggatggaggtgtcacagctgaggctaggcccattctgcagggcactcagtgtgtacagttggttttctatcaggggtcaaccggcggggggacttgagaacagatctctgggcacaaagcagggcctttgccctggggcttgctatgtggctcagcctacacggctctctccccgtcagtcctgtccaaagcccaggaaactaatgtaccacccccgaggaagagagcctacctttccatccaaggaagtgttttacctgtggtaagcacgggggacagaattcttgaggaaggagggtgctgcgtcccagtggtggaggaaaagagaggacctggtgtaagcagccatggcatggacctcatccgaggtggcacctggctagggtcctgacctccaatccttccccagtaaccatcactttgagtaaacagtggctccacccccggcatggttctttgcaccaacatttggggaatgcctaccaggggtcacacactgagctggatgctgagtgtagggtgtccacaacatcgtgcctaaaaagtctctgtatggggtataagaaggtgctggggcaatacagatgagatgagaagcatctttcagggaatgggttgatcccaattcaggcttcccagagaaggatgtctgtagacttcatattagcaagggaggaaggtagccaggccacaggactgctggtgtaaagaccagggcatatgaaatggcaagtgtgactgtgctttcagccaataatttggtattgtcaaatgatgggaccaaacagctggagaggcagatcctaaagggtcctgtgggccaggctggacttcatcttgtcactaactaatggagaggctctgaaggagttaaaagagctcagtttgtctcgtggttaaatccaagttttacaaaggtcacgctgactgtaaagtggaaggtgggctggccaggggatcatctagtctgggtgagaagtgatgataacatgaaggggtgaagagagatttagaagaagtgattcacaggattaaacatttaaataatggaagtggagaaaatggggggggcggttccagatttcaggcatagatgaaagaagtgcagttaggcacatgtaaagagaaacaggaacagcaggttttaggggagaagataacagaatgggtgagaaatgacacttgagtaccctagtgtgctaggtaatcatctgtctacttcccttcatttgtcatgtatattcccatttaatttgcataaagacttcgagttaaacggtcttaccccaatttgtcaaatttctgcgcatgatatggtacaagaaaccgtaagtggctaaggcggcattggtgttcaaattgcctgactacaaaggcagtgcttgttggctacattctgttgcttcccagtttagaacatgttacattgaggcgcctgctgcatttccaaataaaaaagtacagaaagaaggtggctgtataaatctggggctcacaaagtaattttgattactgagagtttgctttcaaggagcaaactgtgactccttgattatgaaccttaattt

SEQ ID NO: 3435 - DNA, 2548 bp, Homo sapiens
gggaatagcctcatgtggctagtggctcattggacattgtagttgtagacgtttgagactgttggttttaagttggacttaatcactttcctacccaaattctaccactcctttaagaactcctttagaactcttttagttcacataatacgccatattttttttactgtgcctgtagttcttcaaggagtggtacaatttgggtaggaaaaccaggcaggaattccagggtagtgttcaatattgacattagtaatagtctatcaataataaaatagacatctcaatcgctatacaaaatctcagaaatgtaaagctcttacagagcatgcttgtgcttgtgtaacagctggtgtaatgcctgcattttcagtaccatgtagccgcactgttaatagttttctatcactttttagttactcatgtctcattaatgatagtgccattaattgtgatgagtgttttcgattcatgtggtcaataaaaagagactacacaagctggaactttgttgccattagtcaagctagtgagatagtatatctatctatctccccagaagaaagtaagataattgatggggtgtggattcagaagagggattacttttctttgagcctcagacttctagacagtatacttcagtcagtaatggaccacatatagaacagtgtttccttagtagaccatatttttactgtaccttttctatatttagatacacaaatattgtgttacaattgtctgcagtattcagcacagtaacatgctgtgtaggtttgggacaaaataggctctaccatctgggtttgtgtaaatacaagctgattttcacacaagattccctaactatgcatttcttagaacgtatccccattgataagtgatacgtgactaatttacgtgaaatttatacattctttatctttcctgtttttggtttattgatggtgaggaaaattactcgtttcagctttttcatttttttactccccaaatgattttcacctttttcttaaaatgtacaataaatgcactgaaaactttgatcactgtcactacagttgtacttaagtgtttttcttcggtttttgcttgcacagttttcatgtcattgaaggaaaaatttataaatgcttgaggagaatgagatacatcttgtataggggaaagtacaaaaggtatggtggcaagagagaaatccttaaaggggcactataatatgtaagtgttaacctaattgccagctttctctatgccatcctggacacagcgatcatattttgtttcaaataatttataaacattcattaaaacttgagtcatttgtgataaaatggtgtgtgtaaaagtaatgaaactaaaattggtgtggggtgttaaaagttgtaaaattttcttcatctaaatcataaaaagatacacattctagaggaattatctgccaaaaaaataacaattatcaaagatatttaaatgtatgggatgtacttaaaatcacttattccccatttcatgtttactaataaacatataaactaaagtgggtcaactaaatagggaagatacagcaggcaagacaaataggctgggcttttatttttatctgcttgggctttaagctttccttcattcaagtgacagattctgcctttgacgggatgcttaaaatcactatattagatctaagatcatttctaaaacctgtttttttaatgaacctaaagacttttcacagcagatgagtacataaaaatgttactggaataaggaataccattaaagctctaatatccaatgtcaagttttatattaaaatctttcccaagttatctctgccagggcattttgttgatgtcttagtgcaagattaccaaaaacttagtcaaattgaacaggatattcattttcttctccaactaccaaaacacagtcttcattataaggtgattggggtgcggttgaaaaaactgtggtgaaacgagaatcagaatgttttttgtacaggaaccaaatgattgctcccaaaactgtcaaaattaccgtgctagcaatcaccaatgctgatattaaaatgtggttatctgaaaaggaaaagacaaaagagtatttgggaaattagggtacacaagttgcaagtatattttgatgagcacaactgtagttttgtgtaaacatttctctgtgttgagaatttcccacactgatgagaaaaccaaaaatttcgcatttgttactaacaagatttatatttcttagcctgaagaatagtactcaaattttctaggaagttgtgcacttctccactctactgaagaccccatagtggaaatcacgcaagtatataccatgctccagtttgtcttccttcgctttactttctgatctaagactacaaattcagacctactgttccctttaggaattctagtatttagataatgtgttacattattgaggtttaatggttcacctggctttggggatttaagatttgtttaactgaaaaaaacaccaagacctgcagtaaagtacctggttttgtgtg

SEQ ID NO: 3436 - DNA, 2947 bp, Homo sapiens
ctgattttatgatagcctattgaaactcaaatatacgtatgatgtctaaacattttcatttacaaattactctagtcaaagctgggctttttctaattgttagctttggaacaaaaaggaacagatttactaattgtttctctgtgctgtggaactttgccaatctgtatttattcttgacatgtgcacatatgtgtgttgtgcctatatcaaaatgagctattaaaaatagttttggaagaagttcatttttaaccactgaaaaaaggaccataaatatgtggtcattaaagtccttatgatggatggatatggttaaattagaaaaacttaccccagggcaaggaattttctgtcaccagtcctttcctggaaatggtaagtttcatccttttgaccctgctctagaaagcaacccacagcgagatggacatagactaaaggcctgtactcacagaacttcacagccaagagacttcattcaatacctgtcagagtgtaaccatggactacccaaatcacctgagctgcatgtagatatttagatttctgcacctctcctgttcctacaggatcagaacctcagaaggaggggagagaggagcctgtaaagctgcctttgagcatgcactgctgttggttcttatgtatgacaaacttaggacaacttctctggtccatatgctcatggtgtatagatgacaatactaagccccagagagaagaaataactgctccaagtgcacgcagaaccagaaatccttaccgtataacctagtggtttcgtacacctagctgtctgactgatgcctgctttgaatgccaatggatgagtcatttcctatgaatgggaaaggagaaggtggcataggttcagacccagagtgtgctacagttcttggtctttagaaccaacagaccccctgaagagtgagaaactgggtcttcctcagcctagaacttccagccagtagtccagagtttaggcacagctaaagcataattacggggttgtggggatgtggtggtatagccagcactctgaaagcttccagcaccctccccccttccctggatgggtgccttctgcaggatgccttccacggactaagggtctggcttaggccatggaaagattcttccgttttgccaaaatgagtgttaccagataactgtcactagtggaatgtatatatacaaagattgcaaatactctgtttttgaagggatttcatttttatttctgatttcttggactatgaagtcttcactcttaattagcaagaaagaaaaaatgatgtgaatgaggtgctgtcctgaaaagaatcaggagtgagtttttaggcattgacatcattgaccaagcttagggacgttgccaggagtgagctgaattagttgctaacttcgaatgtgggagggctggggtgaatggtcactgtgaaccccagctgtcagcccctgaaacctggtggacctaaccctgactccagagatagaggagttcttctcatcagcctaactctaacctgaactcactgggtcaccttgagcatgtcaccagggctttctgagccctagccccttgtctttaagataaggggtagaattagagcaccataaactgagctttatggagctccagacttccaggagtgtgtgcctggaggtggagggtggaggacaaacagagagggaacattcccttcccccagtcttgcctttaaggacagtagctctgcctctaggttttatatatttgtgtacatgtaaagttttctttgaagcaaattttaaagattaaccaccaatcaactaggtattttattctagttgtggattagaatttcctggagcatcttccaatacagaacaaaacaaaaacacacatctctacatctcttctccacttcacttccctaccaccctgcccaaatatcctgccataataggttggcagtgaggtcccaagcatcagtatttctgagtagcaaatggctcagaaatccccagagagcctgacctctgacctggtgttcctccccaggcatgccagggaagagtaacgtggcatctctgcgccaggcccctgggcagaacggaaccagcttccacggctgcatccggaacctttacatcaacagtgagctgcaggacttccagaaggtgccgatgcaaacaggcattttgcctggctgtgagccatgccacaagaaggtgtgtgcccatggcacatgccagcccagcagccaggcaggcttcacctgcgagtgccaggaaggatggatggggcccctctgtgaccaacggaccaatgacccttgccttggaaataaatgcgtacatggcacctgcttgcccatcaatgcgttctcctacagctgtaagtgcttggagggccatggaggtgtcctctgtgatgaagaggaggatctgtttaacccatgccaggcgatcaagtgcaagcatgggaagtgcaggctttcaggtctggggcagccctactgtgaatgcagcagtggatacacgggggacagctgtgatcgagaaatctcttgtcgaggggaaaggataagagattattaccaaaagcagcagggctatgctgcttgccaaacaaccaagaaggtgtcccgattagagtgcagaggtgggtgtgcaggagggcagtgctgtggaccgctgaggagcaagcggcggaaatactctttcgaatgcactgacggctcctcctttgtggacgaggttgagaaagtggtgaagtgcggctgtacgaggtgtgtgtcctaaacacactcccggcagctctgtctttggaaaaggttgtatacttcttgaccgtgtgggactaatgaatgcttcatagtggaaatatttgaaatatattgtaaaatacagaacagacttatttttattatgagaataaagactttttttctgcatttgg

SEQ ID NO: 3437 - DNA, 4163 bp, Homo sapiens
cacttgtgctgagctactggctgatccccaaggacatccttctggcctctccttcacacctgggtcccctagccctgcatggagtctcgctctatcacccaggctggagtgcaatggcgcgatcttggctcaccgcaacctccatctcccaggttaaagcgattctcctgcctcagtctcctgagtagctgtgattacaggcgtgcgccatcacacccagctaatttttgtattttttagtagagatggggtttcaccatgttggcctaactcctgacctcgtgatctgcccatcttggcctccgaaagtactgggattacaggtgtgagccactgcacccggcccaaacatttctttttcttttcttttgagacagagtcttgctctgttgcccgtggctggagtgaaatggtgcgattatagttcactgcagcctcaaactcctggccttaagcgatcctcccatcctggcctcccaaagtgctgggattataggcatgagccgcagcaaccactcctcacatttcttgagcatctgtgatgtatcaagccagatgctgggcactgaggttgcagaaggcattgttcctgtcttctaggagccccaggctagcagggaagacggatgtgtatagagttaaccacaataccaggcctcaacttcccgtctgtaacacaggtggaccatgctagattgtcccagcctgccctgtgcttcattagccggtcaacagatccatctcaaatacctcccatgggtactcactgattgctttaacccaaaccatggcactcttgaagactttccctcaggaagctcaaggactatgcatccttctgggtcagaactggacacacagccaccagtgctggacaatggcggcggctcagggacacactggagccctggcccctgcagagctcccagcatggttgggaagagagatgcaaaatgaccacacggcgggtgaggaggagctccctcggtgcggctgggatgagccctagacactctcaatcacccccacgatgaccccttcccagaggtcccctcagtcatctgccctgaaccaagctcttcctgatcctagaccctccaccctccctctatcttccagggcttggtgacattccaggcagaaatttctgacccttttactttggtccctccctccccagcccagtctctggtcaaactggattcctggctgttcccagaacgagctgcctttccccaccttgccacctctgcccttgttctctctgcctgaatgtcctccttcactagcctcgctgccttgcacatctctcctgagggctgtcatcccagaatgagctgcatttgtccagcctggcccaccgtctaccagaacgtcctccttcagcctgtcccactgccttgcaaaacttttctgggggacctgttcacgatgccttctgtagcatactccaagaatccggcgccccctggagttgtgccacacagcacccctttgcagtcaagctccctcagcaccaccacctccaccctggaagagttccccttccctttgaaatctcatgggactttgcacccactctggctttattggaaggctttgtatgtctccacagggtaaacacccatttactggggtgatgatgtctccaggatctagttcatgtttgtcgttggtgactggccccacccagttctgggcaagcaggctggatcccggcaggaacagagcccaccagcctaaacttccatggaggtggagaggggacaggcttctgtctctttttggctgaaggtgcatcatgtccaaggcccctcttctagccaagcagagaagctgggtgataaggatgggtgagagtgggtgatgtaccccggagtcctggcctcccggctcctcactcccctacacgtaactttatccggccaatgccgcaaagactgctggtgaggccagatgcatgagtgatcatactcacaacagtcgtgaaactgccagtgatgaaactggtaaggacaagaaatgacaataatcaaggtggggtttctcgtggacgtttccaagacttcattctcaaattctctccctcagggtccccaccctgtcctcccacctaagcctggaatgagggggcactggcctgtggggaccctggtcttcaggctcccaaacctggctgggtctggttgccccctggccttaacctgtgaacatccagctgtccctgggctgtgattcagtgtctgtctcccgggtgacctcagcatgggctttgaggaaggggagagagtagtttcttctgagactggatagtgactcagggacccggggctggggcctcaaaagtgcctttgttggcctgggctcaggaatccagagaaactggtcaggaggaggccccagtgacaaaaacccctccctctgcccccgcccctctgccagagccatataactgctcaacctgtccccgagagagagtgccctggcagctgtcggctggaaggaactggtctgctcacacttgctggcttgcgcatcaggactggctttatctcctgactcacggtgcaaaggtgcactctgcgaacgttaagtccgtccccagcgcttggaatcctacggcccccacagccggatcccctcagccttccaggtcctcaactcccgtggacgctgaacaatggcctccatggggctacaggtaatgggcatcgcgctggccgtcctgggctggctggccgtcatgctgtgctgcgcgctgcccatgtggcgcgtgacggccttcatcggcagcaacattgtcacctcgcagaccatctgggagggcctatggatgaactgcgtggtgcagagcaccggccagatgcagtgcaaggtgtacgactcgctgctggcactgccgcaggacctgcaggcggcccgcgccctcgtcatcatcagcatcatcgtggctgctctgggcgtgctgctgtccgtggtggggggcaagtgtaccaactgcctggaggatgaaagcgccaaggccaagaccatgatcgtggcgggcgtggtgttcctgttggccggccttatggtgatagtgccggtgtcctggacggcccacaacatcatccaagacttctacaatccgctggtggcctccgggcagaagcgggagatgggtgcctcgctctacgtcggctgggccgcctccggcctgctgctccttggcggggggctgctttgctgcaacagtccaccccgcacagacaagccttactccgccaagtattctgctgcccgctctgctgctgccagcaactacgtgtaaggtgccacggctccactctgttcctctctgctttgttcttccctggactgagctcagcgcaggctgtgaccccaggagggccctgccacgggccactggctgctggggactggggactgggcagagactgagccaggcaggaaggcagcagccttcagcctctctggcccactcggacaacttcccaaggccgcctcctgctagcaagaacagagtccaccctcctctggatattggggagggacggaagtgacagggtgtggtggtggagtggggagctggcttctgctggccaggatagcttaaccctgactttgggatctgcctgcatcggcgttggccactgtccccatttacattttccccactctgtctgcctgcatctcctctgttccgggtaggccttgatatcacctctgggactgtgccttgctcaccgaaacccgcgcccaggagtatggctgaggccttgcccacccacctgcctgggaagtgcagagtggatggacgggtttagaggggaggggcgaaggtgctgtaaacaggtttgggcagtggtgggggagggggccagagaggcggctcaggttgcccagctctgtggcctcaggactctctgcctcacccgcttcagcccagggcccctggagactgatcccctctgagtcctctgccccttccaaggacactaatgagcctgggagggtggcagggaggaggggacagcttcacccttggaagtcctggggtttttcctcttccttctttgtggtttctgttttgtaatttaagaagagctattcatcactgtaattattattattttctacaataaatgggacctgtgcacagg

SEQ ID NO: 3438 - DNA, 2762 bp, Homo sapiens
ttttgggtcgccttccatgctgtggaagctttgttcttttgctctttgcaataaatcttgctgctgctcactctttgggtctgtgccgcctttatgaggtgtaacactcaccgcgaaggtctgcagcttcattcctgaagtcaccgagaccaggaacccaccaggaggaatgaacaactccagacatgccgcctttatgaactgtaacactcaccgcgaaggtctgcagcttcactcttgaagtcagcgagaccacgaacccaccagaaggaagaaactctggacatgtccgaacatcagaaggaacaaactctggacacaccatctttaagaactgtaacactcactgtgagggtccatggcttcattcttgaagtcagcaagaccaagaacccaccaattccagacacattttggccacccagatgggaccatcgcccatcgccaggcggtgagactaatgcctattgccaaatgaatcatgtcaaccctgccatggacttcacgcagactccacctgggatgttggctctggacaacatgctgtactttgccaagcaccaccaagatgcctacatccggattgtgcttgagaacagtagtcgagaagacaagcatgaatgtccctttggccgcagtagtatagagctgaccaagatgctatgtgagatcttgaaagtgggcgagttgcctagtgagacctgcaacgacttccacccgatgttcttcacccacgacagatcctttgaggagtttttctgcatctgtatccagctcctgaacaagacatggaaggaaatgagggcaacttctgaagacttcaacaaggtaatgcaggtggtgaaggagcaggttatgagagcacttacaaccaagcctagctccctggaccagttcaagagcaaactgcagaacctgagctacactgagatcctgaaaatccgccagtccgagaggatgaaccaggaagatttccagtcccgcccgattttggaactaaaggagaagattcagccagaaatcttagagctgatcaaacagcaacgcctgaaccgccttgtggaagggacctgctttaggaaactcaatgcccggcggaggcaagacaagttttggtattgtcggctttcgccaaatcacaaagtcctgcattacggagacttagaagagagtcctcagggagaagtgccccacgattccttgcaggacaaactgccggtggcagatatcaaagccgtggtgacgggaaaggactgccctcatatgaaagagaaaggtgcccttaaacaaaacaaggaggtgcttgaactcgctttctccatcttgtatgactcaaactgccaactgaacttcatcgctcctgacaagcatgagtactgtatctggacggatggactgaatgcgctactcgggaaggacatgatgagcgacctgacgcggaatgacctggacaccctgctcagcatggaaatcaagctccgcctcctggacctggaaaacatccagatccctgacgcacctccgccgattcccaaggagcccagcaactatgacttcgtctatgactgtaactgaagtggccgggcccagacatgccccttccaaaactggaacacctagctaacaggagagaggaatgaaaacacacccacgccttggaaccgtcctttggtaaagggaagctgtgggtccacattcccttcagcatcacctctagccctggcaactttcagcccctagctggcatcttgctcaccgccctgattctgttcctcggctccactgcttcaggtcacttcccatggctgcagtccactggtgggacaagagcaaagcccactgccagtaagaaggccaaagggcccttccatcctagccctctgcaggcatgcccttccttcccttgggcaggaaagccagcagccccagactgcccaaaaacttgcccaccagaccaagggcagtgccccaaggcccctgtctggaggaaatggcctagctatttgatgagaagaccaaaccccacatcctcctttcccctctctctagaatcatctcgcaccaccagttacacttgaattaagatctgcgctcaaatctcctcccacctctctccctgcttttgccttgctctgttcctctttggtcccaagagcagcagccgcagcctcctcgtgatcctccctagcataaatttcccaaacagtccacaggtcccatgcccactttgcgtctgcactgtgatcgtgacaaatcttccctcctcaccagctagtctggggtttcctctccctgccccaggccagaactgccttcttcatttccacccacgctcccagcctcttagctgaaagcacaaatggtgaaatcagtagtctcgctccatctctaatagactaaacctaaatgcctctaggacggactgttgctatccaagcgtttggtgttaccttctcctgggaggtcctgctgcaactcaagttccacaggatggtcaagctgtcagacatccaagtttacatcattgtaattattactggtatttacaatttgcaagagttttgggttagtttttttttttttttgctttgtttttgtacaaaagagtctaacattttttgccaaacagatatatatttaatgaaaagaagagatacataaatgtgtgaatttccagtttttttttaattattttaatcccaaacatcttcctgaaaataacattcccttaaacatgctgtggaataaaatggattgtgatg

SEQ ID NO: 3439 - DNA, 3781 bp, Homo sapiens
cttagaccttggttagatttgaaccaaggccctcctcggcctcccaaagtgctgggattacaggcgtgagccactgcccagctgaaaattgatacatttttcaaatgagaagtatttttttcaaatgggtgttggaaagtgagtttcctcacattgttcatgttgtgacactaggttggtgctatgtaatgacatggatatgaacgagctgcctacgaacctccccgtggacactgtgaagcttcgcatagagaagactgtcatccgcagaatctctgcggaggccttctattacctggtggagctccagtatctctgggtgacttacaattccgtggccagcattgaccccagcagcttttacaacctgaagcaactgcatgagttgcgcttggatgggaattctctggctgctttcccttgggcatctctgctggacatgccccttctgaggaccctggacttgcacaataacaaaataaccagtgtgccaaatgaggcgctcaggtatctgaagaaccttgcctacttggatttatcaagcaacagactcaccacattgccaccagatttcctggagaactggactcatttagtttcaacaccttctggagtcctggacctttccccaagcaggattattcttggctgatagaacgttatggctgtaaaaagctctagcatttatctagtcaactctcccattttgccgatgagaaaacaggctcagcaaggttgcatcacccaggtcacagaattaactaatggttgagcctcatcaggaacccaggcacagtaaagttggtctacaggacaatccttggttctgtgactgtcatatttccaaaatgattgagttgtcaaaggtcgttgaccctgctatagtgcttctggatccactgatgacttgcagtgaacctgagcgcctcacaggaattttgtttcagcgggctgaattggagcattgtctgaaaccatcagtgatgacctcagccaccaaaatcatgtctgctctgggcagtaatgttctactgcggtgtgatgccactggcttccccaccccacagatcacatggaccagatctgacagctcgccagttaattatacagtaatacaagaatctccagaggaaggagtcagatggtccataatgagcttgacaggcatttcttccaaagacgctggggattacaaatgtaaggccaaaaatctggctgggttgtcagaagctgtggttactgtgacagtgcttggcattaccacaactccaataccaccagacacttctgaaagaactggagatcatcctgagtgggatgtccagccgggatctggaagatctacatctgtatctagcgcatcatcatatctttggtcctcttccttctcccccacatcttctttttctgcttctactttgtctcctccctctactgcttccttctctttatctcctttctcctcctccactgtttcttcaaccacaactctgagcacaagcatctcagcaagtaccaccatggccaacaagcgatcattccagctccaccaaggtgggaaaagaaatttaaaggtggcaaagaatggaagtaagcttcctccagccagcacaagtaagaaagaagagctggcattgttggatcaaacaatgcttacggagacaaatgccgcaatagaaaacctcagggtggtcagtgagactaaagagagtgtgacattgacgtggaatatgatcaacaccacacataactctgcagtgactgtgttgtattccaagtatggtgggaaggacctgctgctgttgaatgcagactccagcaagaaccaagtaaccatagatggcttggaacccggtgggcaatacatggcctgtgtctgtccaaaaggagtgcctccccagaaagaccaatgcatcaccttttctactgaaagagttgaaggagatgattctcaatggtctctccttctcgtggtgaccagtactgcctgtgttgttatcttaccattgatttgtttcttgttgtacaaagtttgcaaactgcaatgtaaatcagaacctttttgggaagatgatttggcaaaggagacttatatccaatttgagaccctgtttcccaggtctcaaagtgtaggtgagctctggacacgaagccacagggatgactcagagaaattgctgctttgttctaggtcaagtgtggaatctcaggtgacttttaaaagtgaaggttccagaccagagtattattgctaaggttctgcagctcaggtgcatgtgagctacaaaactagcatctaagggtataattgaccctaggtttggatgacttttggacagactttcacattgtacatgaaaatcacaaatggaatgcttttaagtatgtttaaaaaataccatgagacctctgaactgaaaagacaaataatgttgatttttttttcttgtgtggaaaaggtctacagaaataatttttagagtggtgcttaataaattattaatactttttagggtaatgttttagttcttaaaaataagttcatgtgaaagtagcaagtgaactctgtatttaaaaatatagttttttgagtcatgaggaaacattagcaaaaccagctaagccttgatgtttattcatgttcgaagtgcattatagcatttgctgtggatgttttctgacattgcctaatggagagcgtgggatcataaaggattttgtgttcactaaggttaaatctaactcacgggagagagagggctctgtctcttggtaccattatgcattgtgatactatagagttgtgttcatatttcttgtaagaaaaatttttgcttttctttagaaatataggtattagcaaaagtaagtatacaaagaggattatgacaaatagaccatttctttaaaaatggtaactgttgcatttaaacacatcggctgacagattatatggatatttaaaaataactttaaatcaatcttttaatattttgctgtttgctcttatgttctcccttctttcttccttccttgtcttccctccctttccttccttcattctttctttcttctgctctgtcagaagatatacaagtagccaaagcatcacgagccaagctgtttgtcttttgccatattgtcttttgattctcttgataaagagaaagcttttgaaattacttactgccctttgaaagtctgttttacaaccccaaaggatattttaggactttaaaagggaagcttcagtggattcatttggttagattcttttcctaggttaaaaacatcggggaacttaaatacataggaaaggagttcacaaataaaatttagtttttttagaaagagaatattttaataactgtagtataccacaagaaacatctcatggctttaagattaacgatagcgataaggcccactcaagcatctcacagtggtgatattacatgtcacttagcaggatgcaacctggcctagggatttccagaagacaaggccacctcagcacagatgcaactttcataaattttagaacaaagcctaaccttactagattaaacttgctctatgaaagaaacacttggtaattgacccagactgaatacatgtataagaaatgggaaagatctcccaaactctgagaacggtcctcaaatagaagctctcctagtcagttggtcatctgacctctgactatatccggcctatgacaccagccagctcctgctttctgtcttgtaagagcactgctggaataaactacttgagcatt

SEQ ID NO: 3440 - DNA, 3960 bp, Homo sapiens
aaaatgccgccagcctggagcggggaatccatggaccgtggggttgtggggttggggagcacgaaaacccagagaggggctagagctccacctccccagaccgccgaggggcgagagggcgcgccgggggccgtggttgccatggctcctggtagcggagcccggggggctggagatgccggtcgcggatggtcccttcttcctctttgtgcctctctctttctctcgctttttttttttttggagtgtgagtgtgcgtggggaggcagcacggagaaagtgattaatttggggagcagggattggagccgggaggctggggaaagccagcccctccgttcccactctccgggctcgctgcgagccacagtgtctcagccaggggcagggccggggaactcctgcgaaaaaccacgggcctgaggagcagcagccgcgcgggcccaggtgctgtaaactgcaaaccataatcctgtcttaatactgcaaacaaatcatagtggaactaaggggaacttaatttactgtttccaggttaactaaggtctcagctgtaaaccaaaagtgagaggagacattaagattttcattcttaccgggttgtcttcttcctgaagagcaatggagccgcttttacttggaagaggactaatcgtatatctaatgttcctcctgttaaaattctcaaaagcaattgaaataccatcttcagttcaacaggttccaacaatcataaaacagtcaaaagtccaagttgcctttcccttcgatgagtattttcaaattgaatgtgaagctaaaggaaatccagaaccaacattttcgtggactaaggatggcaaccctttttatttcactgaccatcggataattccatcgaacaattcaggaacattcaggatcccaaacgaggggcacatatctcactttcaagggaaataccgctgctttgcttcaaataaactgggaatcgctatgtcagaagaaatagaatttatagttccaagtgttccaaaattcccaaaagaaaaaattgaccctcttgaagtggaggagggagatccaattgtcctcccatgcaatcctcccaaaggcctcccacctttacacatttattggatgaatattgaattagaacacatcgaacaagatgaaagagtatacatgagccaaaagggagatctatacttcgcaaacgtggaagaaaaggacagtcgcaatgactactgttgctttgctgcatttccaagattaaggactattgtacagaaaatgccaatgaaactaacagttaacagttcaaattccatcaagcaaagaaaacccaaactgctgttgcctcccactgagagtggcagtgagtcttcaattaccatcctcaaaggggaaatcttgctgcttgagtgttttgctgaaggcttgccaactccacaggttgattggaacaaaattggtggtgacttaccaaaggggagagaagcaaaagaaaattatggcaagactttgaagatagagaatgtctcctaccaggacaaaggaaattatcgctgcacagccagcaatttcttgggaacagccactcacgattttcacgttatagtagaagagcctcctcgctggacaaagaagcctcagagtgctgtgtatagcaccggaagcaatggcatcttgttatgtgaggctgaaggagaacctcaacccacaatcaagtggagagtcaatggctccccagttgacaatcatccatttgctggtgatgttgtcttccccagggaaatcagttttaccaaccttcaaccaaatcatactgctgtgtaccagtgtgaagcctcaaatgtccatggaactatccttgccaatgccaatattgatgttgtggatgtccgtccattgatacaaaccaaagatggagaaaattacgctacagtggttgggtacagtgctttcttacattgcgagttctttgcttcacctgaggcagtcgtgtcctggcagaaggtggaagaagtgaaacccctggagggcaggcggtatcatatctatgaaaatggcacattgcagatcaacagaaccaccgaagaagatgctgggtcttactcatgttgggtagaaaatgctataggaaaaactgcagtcacagccaatttggatattagaaatgctacaaaacttagagtttctcctaagaatcctcgtatccccaaattgcatatgcttgaattacattgtgaaagcaaatgtgactcacatttgaaacacagtttgaagttgtcctggagtaaagatggagaagcctttgaaattaatggcacagaagatggcaggataattattgatggagctaatttgaccatatctaatgtaactttagaggaccaaggtatttactgctgttcagctcatactgctctagacagtgctgccgatataactcaagtaactgttcttgatgttccggatccaccagaaaaccttcacttgtctgaaagacagaacaggagtgttcggctgacctgggaagctggagctgaccacaacagcaatattagcgagtatattgttgaatttgaaggaaacaaagaagagcctggaaggtgggaggaactgaccagagtccaaggaaagaaaaccacagttatcttacctttggctccatttgtgagataccagttcagggtcatagctgtgaacgaagtagggagaagtcagcctagccagccgtcagaccatcatgaaacaccaccagcagctccagataggaatccacaaaacataagggttcaagcctctcaacccaaggaaatgattataaagtgggagcctttgaaatccatggagcagaatggaccaggcctagagtacagagtgacctggaagccacagggagccccagtggagtgggaagaagaaacagtcacaaaccacacattgcgggtgatgacgcctgctgtctatgccccttatgatgtcaaggtccaggctatcaatcaactaggatctgggcctgaccctcagtcagtgactctctattctggagaagactatcctgatacagctccagtgatccatggggtggacgttataaacagtacattagttaaagttacctggtcaacagttccaaaggacagagtacatggacgtctgaaaggctatcagataaattggtggaaaacaaaaagtctgttggatggaagaacacatcccaaagaagtgaacattctaagattttcaggacaaagaaactctggaatggttccttccttagatgcctttagtgaatttcatttaacagtcttagcctataactctaaaggagctggtcctgaaagtgagccttatatatttcaaacaccagaaggagtacctgaacagccaacttttctaaaggtcatcaaagttgataaagacactgccactttatcttggggactacctaagaaattaaatggaaacttaactggctatcttttgcaatatcagataataaatgacacctacgagattggagaattaaatgatattaacattacaactccatcaaagcccagctggcacctctcaaacctgaatgcaactaccaagtacaaattctacttgagggcttgcacttcacagggctgtggaaaaccgatcacggaggaaagctccaccttaggagaagggagtaaaggtatcgggaagatatcaggagtaaatcttactcaaaagactcacccagtagaggtatttgagccgggagctgaacatatagttcgcctaatgactaagaattggggcgataacgatagcatttttcaagatgtaattgagacaagagggagagaatatgctggtttatatgatgacatctccactcaaggctggtttattggactgatgtgtgcgattgctcttctcacactactattattaactgtttgctttgtgaagaggaatagaggtggaaagtactcagtt

SEQ ID NO: 3441 - DNA, 3670 bp, Homo sapiens
tgtattttcttccactagaaataaagccagtgaggtgagggttttagtctgttttgtttgctgctatattcccagtgccgagaacaatctatcttagagtagtcactcaataaacatttattggatgaaggcatgggtggatagatggctagaccaaagaaatgccacagatgacaaatttccagcagtgtattccttgggacactagttctacagagcagaataagactagtcattggaatccaggtgacaaattctgcctgttattgaactcttcagctgaattaactgtcacactgaaacatgaactatatttcacaagaaggatttaataattaaaccccagagatgttgtgtaggctattttcataacaggttagacactcaatgctatgtcctctgaaatgctcacaaacacagaccaccccaagatgatacctctccagttgtttattagcagtggtgaaaatatagtttattcagtttgcaataagaaattgtgtattactgaaacaggttgttttcagtggcatatgccagtgtcatattatgctagcattatttcccagtcttcagattttcttcttggagaaaaattgaaatccctagtaaaagttattgtcaaaagagccaggatacttgtgcatcttgaaatgtttgtatcttggcttgaaaaaaaaagtcactgtctgaaacagagggagcagtaaagtcttagcagaaattgctagattaaatactgcagccagtgataccttttgtatgttaaggctttttcatttttacattagtaaaaatgtatatgtttcctattttgccttgcatttttgttctttgaaagaaaacaaaatgttagatcctgtcattgcctttttctatttttttcccaaatgttacctattaaaaaataggtcaatatgcataactaggtatttgaccgtatgggtgaacattcaaaaacataatgattactctttgtcttccagaaattgtgcttacgggttcaacagagaaataagcaaaaattgtaataatggaatcttgtaaagtcgtattaaagtacactcctcagattcccatccagtatagtcaggctgcataacacacaaggaagaagggagctggggggttaacatgagtgtaggaagcatttgctattacatgtttggagtcattcacattctttagaatatattggcatgccattcatagtacaaatgtagagcttttaagttaaagtgcgtctctttccagattaataaatctttactcattaactaaaatttttaccaaaaaaacaaaaaaatactgtgtactatcagtataaggattttgcttttcttcttaggctgttttcatttgtttcttctgcatccttttaatggaattttgtaggtctcttgaaaggtaaggttgaagtttacagtctggcctgcattgataacaaaattatttgaaatgcaggattttgcttctccttctggctcagaaaaaaaaaatccacatttcacacttaaccaaaatcatgctccattcacaaccaaggaatcagagatattatgcagtttaacatactaacttctttacttgccataagcttttgcctttttgaattcaaaatagtgatgatttttctacttttctgaattctttcttatttaatgcttgtgattatttctggattgctttcaactcaggaatcagaatttgtcattgaaattaacaaacactattgggagccatccactctactgaagacttcatgattcaaccatttctgctcctgatttccattccaactcatcctcgtcattggagtcaacctgaaaattagatttggccagagaagcccaggactccaaatgctttctcataatttgcatgcatggtctttaaaaacagaaaatgttacctaaatgccaatcttgacaaaaatgttttctctttcttccagtgatgcagaagaccacaagcctttgaaaaaaggaagtcgaactccttcagacaggactgtgaaaaaagaagatagtgacgacagcctagttgactatggagaaggggttaatggccagttcaatgaggatggctcctttattggacaatacagtggtaagaaagagaaagagccggctgaaggaaacgaaagctcagaggcaccttctcctgtcaacgccatgaattcctttgtttaatttttaagctctttgccaatattccatttctctagaatgtttatcctaagcacttgtttgtcagccctctcatactatgaacatatgggtagagagtatattttctgctgtatgttagtattatgagaatagttacagcaaaaacataactcagtcaaatgatatgttaatatgaactggaatgcaaagtgcatactttttcattcaaaatgggtattcttgatttcctcagaactgataaaaaataatgcaacatcaccaacagatcctgttatttcctctgcaggatacagttcaatatgatgcatgaaaaatgctccacatttaaaggacatacccgtgtatgttatgaaaacatggtttgatactttgtttatactaccctcagctgaacccctatatatgaattccgttttcattgtcaagaatgttactgtagtattctctagaacttcaatgtctttgtggacattgttgtgaaattggtgactatgtatagctgtcgttagtctttttgggagactgttaggaacagtttgtacagtatatacttgctaaatgagttcattatgacagtcacattgctgatgcttactgagaactattacctactcttggctcctgttactccgtaggcttcttaatcttccaggcattacagcagcacagtgttctactttttacatcatttctatgttcggttgtttttaggcataaacaatgtgtattgcagtgcatttcggcatttgtgccatactgaaagaatcaaaaacaaatcatccaaattaaatttcaaacattatttcagagaacacagggcaagacacatacagtgccttcagatattaagcattccacaacatcgtgcattctgtatcagctggtccagtccattctgggtcctagattactgtcattgtctaaaagtaacttttaaaaagcagagttcatgaaaactgcaatgctgggaaaagaaggaaacatgaaaataaaaataagacagtttattagaaatagcatttcctcataagcataaaaagaaaatctttgttgccaactgaagcacatgatgattttgtggtcctttatggtttctattacattcagtaagaaagatgtcaacatgctagaaaattaattttaaaactaagttattccaacactaaaagcatacaacagcatgccaacagtaatatattattctccaagactttacctatgtaagtgttcaaaactctgcagcattaaacaacgtgtatgcaaattgttatggatacatttcagaatctaagaaatcaggcaagtgcttaaaaggccaacggtccaagggattacatctgcagtttaaaaagtaaatatatattctatcgtattcataaacaatatctatcaaatgggttacctccaaatatgaaaatctataacaacctatggttgaaggaatgctcagtttcatttgccaataaattggtttctca

SEQ ID NO: 3442 - DNA, 4304 bp, Homo sapiens
aagggaaagtgccacattttcaaggcgagaagacataatgaggccaggaaaaaggttttcttcctaagaaaacactatctatgttgcagttaagcccaaagcattcatggtgtatgatgaaagaattaaataatgcctgtgctttggagacagcggaaagggtagcaagggtgtgctgaaggctgagaatttgggaatgctgggggagagaaaaatagaagagcactcaaagtgagtctgttcctacattcacattgtcttggagagacaggtttgcatagttgtttacagaggcaggctctgagaggggtgagcctgggtttcagtcttagttctcttgatcttgggaaagtcacttaacctcccaactagtctcctcatgtataaagcggagactgtaatattacttatgtcctaggatggctgtgagaattacaggagatagataaagagcacttagcccactgcctggcaaaagcaagcattcaataattatcagatatcactagtaattaataatcaggtagtgctattaacgttatcattacatcacagcactgcagaagatgaaagggcacctagaggttttttgaaaacacctgcgtcagaaattaacaaaagtccagacccccacccccacccaaaaaaaatgttagcaagattggaaaaatgagccttttccaataggataaaaaatagaataagtttccctgataatccagccccattagctttgggggctggggcagatgcaacgtagctgttaaatggagatctgggagagctctgaagagttgttgcaacattggctcagcgtggaagctttgcagggaattggaaggcttcatcccttatttaaaccacatggagtgagtagtgagtctattaaaaaatcagtgatacctgttgtagcccacacctcaggatgctgcagcaggccttcctcattagaaggcaggcaggaagacatagagcataacaagacccttttgtctctcagacaggtggttcctagattattatgtcttcccagcctcagtccactgcaagatcatccagatgttcaagtctggtcttccatgtctagcctgggttttactctccacttaaggaccatggcctgtgtctcttttccagggatggagtctgctggcatccatgaaaccacctacaacagcatcatgaagtgtgatattgacatcaggaaggacctctatgctaacaatgtcctatcagggggcaccactatgtaccctggcattgccgaccgaatgcagaaggagatcacggccctagcacccagcaccatgaagatcaaggtaccgttcagtgacagacccagtggcaatgccgccagcagtgtcagccctataaccacagataagaactcttcagagactgtattttggtgacatgcaattgtgggttttaggggtaggtagtggacacaaatctcatattttacaggatgtaagtcaatctagttcataagaaaaattgagttactttatataaaatttgatctctatttatccttgtctgtcagctactttcagtagctgcagtcaaagtcaacagagctccccacatgctcatctctctttaaaatatgcattttgttgtttttctcgacacaaaaatagtgcatcatgcatgtaacacattttttaaaaatactgatgacctagacttatttctgaagaacttcaaacactgtagatttaggaggagcttatactcttcctccactactaacctcaatcctgtggccaagaattcaaattttatcctcattcctctgtctagcacatcttttggtacaggtgctcaaaagcacagaatgactctaggatgaccaagctcagtccctgagccacccaggacccctgtatgtggtgtgaatgttgagccctagtgaagggaactcggggattaaatggagataattctttggaggcaaacttaacctgtggctgggtcacttctcaaaggttattatcactctctgaagtcagaaggccacacttgggaccctctgacccatgtcacaggaagtagaggggcaattctagtgcagttcacacacgtgggtatttaaacaaattatctcctctttgcactcccttctgtttttagaaggagtatgcagctaacactagagagtgtgctagactgaaacatgcacactttctctctccatgataggctctggctagtcctgccctaaaagacttcagcatgagagaagagagactgttttccaacagggtttgtgtttcttggatgccattctgatcagctcttaccccccttacttccacacaagagggaggtgaatgaagccagtagctgggctcactactgagttgatctcatgagggtcgataacagaaagaggctattgctagagttgggcagttcctagttctctaaacttggtttcttgaatagaaattaatgtgaaactctgggccccgatgtaatgagatagtatagagaaccaagaaaaacctaggacaataagatgataacatttggcaaaaatgaaactggatgagagacctatgggaactcccatagaatttgtcataggctgttcttgcgttgctataaagaaatacctaagacttgggtaatttgtaaagaaaagaggtttaactggctcacagttcagcaggctgtacaggaagcatagctctagcatcagcttctggggaggcctcagtctcagaaagcttcgaatcatggtggaaggcgaagcaggggcagacacctcacatggcaaaagcaggggcaacagagagggcaggggtggggggagggtgccacacactttgaaataaccagatttcatgtgaactcggaagaagagctcacttatcaccaaggagatgtcctaagccattcatgagagatccacccccgtgatccaaacacctcctaccaggccccacctccaacacgggggattacatctcaacatgagatttggaggagatatccaaactatactaaattctttacaacttttctgaaaatctaaaattgttccaaaataaaaaggttatttttaaaaccaaaccaaaacataaaaccacctgggagaacccaggtttgaatatcagatctgacactgatataaccggtgttacctgggccagttacttaaactttctcagcctctgtttcctcatatgtaatatgggagtaatttaagacttattcttcaagatgtttatgagaatcaaatgagataatacatgtaaaatgcttagcatagtgcctggcatataattacatgctcagtaaatatcagtactttgtattaagaagtaaatgctcagaagataaagattaaactggttagccagttttcactgttctctgtgcctaaaccattcatttatttaagaaacatgagcatgccttgcaggttaggcctgtgcactgggaaaggccaaccagtgcagcttaagaggcacctattgcaagggaatgtccccagcaggggaccctgagttccccaatgttaaacagagcatctgggtgaaaagtggtagttcacttcaccacgtggaaacacatttgtatactaagtcctagcacaattaaaacttctcctttgaataggctagggtttgtttctacagaaagtgtatcgtgttgaattctgaggcagagttcatggaaatcagaggcattgccagggttcttaagtgggggccgtggctggatttggagccaactttcagtttgctcaataatgtggtcgaagagttacaggtgagaaaaacgaatgtgcttactgaagaatttctaaatccatggctccctctggcggtcctgccaagaacatgacacaattaggacacaattggcatctaacagacaagcctgtgtccctgctgaacaagaaactaggccatggtagaacatccaggctctgtcctaccgcactaacgactgcactaatgatgacattaatgaccattctttttcatcttgactgacagatcattgcccctccggagcgcaaatactctgtctggatcggtggctccatcctggcctctctgtccaccttccagcagatgtggatcagcaaacaggaatacgatgaagccgggccttccattgtccaccgcaaatgcttctaaaacactttcctgctcctctctgtctctagcacacaactgtgaatgtcctgtggaattatgccttcagttcttttccaaatcattcctagccaaagctctgactcgttacctatgtgttttttaataaatctgaaataggctactggt

SEQ ID NO: 3443 - DNA, 3688 bp, Homo sapiens
atgactctctagcaaaatcctaataataattatactttggtcagtatgccatagattcagctacttaagagtagcactttattgcattttaaataaaacttaatggcactacttactgtgacgcctcaaagccaaagtggttgtggaagctgagtgccaaaatggatataaagaccgagggaaaagattttctgtgaaaatattttctaaaaagtttataggctgttccttctgacctgtttatgggacataatagggactgaagaagtgcgttaaatgtttggatgtatggtagtatcaggcaatggtggcagtgcttcatagattgacttaaagctgtgatgtttttacaacatcattatcctgtggtaattctgccacaaaaggaattaaatctcagaactacatatgataactgtggcaactggtcattggtgtgctagagttgccttgtgccagcttatgaggcatcttgcaagtcagttgttaaactgctggaagtttaaagtaggccatgaaggatgtatgtacaccacagaaattaagaagcactacaaatcagggctcattttctttcctagaaagtcagtttactggtacatcactgtttgtaagttattttttattctgtgcttcttgttgagagggatgagggtaggatttgtcagtcttctagatggagttgttagaatagcaaaatcagcactatgtccatggtatatcttatctatattctcagaaaatttgctctctttgatgcttaaatatttaatgagatgtgagtcagagtagagtgaactaacaacttaggcagaatatttgtaggacatgactttcaaatctttacctgttacagtatctacagagaatgctgtcataaactgacaagtcttaggctgaatttcttaccagaaacttaccaaatggagcctgtgaccctaaataactgttttagtgtgtgtacacttaggttgctgggtggggcatgctgcttaaccagggagcctaagtgtgtcagatttcaacttggatgttgtagtggagaaaaggtatctgttttaatatgtattgtcaatagtgtctgatcaggctcaaatgtaggatcttgtccagttagtgaataagagtaaattaatgtccagtgacctctggcagccctatcctaatgtcttattagaagcccacaagaattggagaggatttttcatgggtctcgtgtttctgaatgtcttgtgaatgatgtgctgactgctctttgttccagacaatctttttaagggttttttttttttccaatagtgaacagcctggaaagatagaaatagtgctcgctagagcagagggcaagcatgtttactttccattataaaaaagacttgcttccctaaattcaaggttcctctcttgtaacacaacccactgtgtgtgtaggtgtcatgtggccctcttagcatcacctgggccctgtcataaaaatgctgatactactgttattactgtaaactgtcctttatctcagacctaggagcttgatgcatccatgaaactgtgccaggctaacttgttagcctgcaagtagggtaatatctcggatgctgtaagttcttaatatcaccttccccataccccatggtgcaggaacgttggaatttccctaggctttaagaatgaaaaagcaaatcctaagtccctttcagtcctgaaggatctatgttgtgaggtagcatgatacctcattctcacttaggtatgccagatgtatcctgagaaattttagggccatttcagagagacagctgaggactagattctcatcatgccttcatttcaccaaatagcattacaataaataactctgttactgtgagagaacttattttgtatgagttcagtccttttgcatttatttatttatttattttttaatggtatcttggtaaatgttctttgtgcactagacaagaatgtgtattttgctgctgctgtcggatgatttgataaatgtcaattaggtaaagttggttcataatgttaagtgttctatttgcttactaattttctgcctacttgttttatcaatgtgagaggggtgttgaaatttccaactacaagtatggattggtctatttcttatgtaaattctataattttgcatcatattattttaaacttcatttttagatgcagaaacatttaggattgttacgtactcttggtgaactgacccctttatcattatgaagtgaccttctttagctctagtaatatcattgccctaaaatctattttgttattaatatagcaaccccagctttcttcttaatttgtgttagcatgttagcatcgtatatgtttttctatccttttatttttaatgtatttgtgtctttatatttacaaggttttttttttagaaatcatagttggatcttggtttttaaaaatctaatctgaccacctctgcttttagttagtgtatttagtccatttacatttattgtgattattaagatggttgtgtttatcttctttattggcttattagctatagttcttttaattagaggttgctctaggttttataatatatgactttaaattattagtctatcctcaaataatataccattttatgtatccttgtatctccttttccctacctttgtgccattgttgccgtaacttttagttctacatgttataaactccataatacattattatttttgcactaaaaattatattatcttttaaagggattttaaaaatagaagtccttttatgttcaccaatgtatttgccatttctactcttcttcatctcttcatgtaaatctaaatttccacctaatatcatttgactaagggacttctttttaacatttcttattgtctgttggtcatcttttgtgtctgaaaaaaacctttgtctttatttttgaaagttatttttgctgggtgtaagattctaggttttgggttttttttcttgctttcagtattttaaagatgtcattccattgtcctctgacttatgtagtttctgacaagaagtctgccatctttcttatatttattcctctgtatatgtttcctccacacatacagagctacttttaccattttttctttatcactggtttgcagtaatttgattaaaatattccttggtgtggttccctccccctccacttttcttctgtttcttggatctgacaatgtaaagttttcctcaaatttgggaaaaaaaattgtttaagagatggggtcttgctgtgttgcctaggctggactcgaactcctgggttcaagtgatccctccacctcctgagtagctgggattacaggcacacaccactgtgcacagctcaaatctgggaaatttttggccattatttcttcaaacatttatctgtctccccttctttctcctttgcttgagactccagttacatctgtgtgagacttctagatgttgtcccctaattcactgttctgttttttttgtttgtttgtttttctttgtctttttctctctgcgattcattttggttaataaaaagtaattaaaagtatctcagctcaactgaagaacaacaaaaaaaatttaacgagaaaaaaggattaaagtaattggaagcagtatatagaaactgtttcattaagtaataaagtttgaaacaatgatt

SEQ ID NO: 3444 - DNA, 2873 bp, Homo sapiens
acaaagacttcaagggcaaagcacagaaacaagtgcagttcaacccaggccagaccagggccacatggcgagtgcggatcctgagtgatggggagcatgagcagtctgaaacctttcaggtggtactctcagagcccgtgctggctgccttggaattccccacagtcgccactgttgagatcgttgatccaggagatgagccaactgtgtttattccccagtccaaatactccgttgaagaagatgttggtgagctgttcattcccatcaggaggagcggagatgtgagccaggagttgatggtggtctgttatacccaacaaggaacagcaactggaactgtgccgacttccgtgttgtcttactctgattacatatccaggcctgaggaccacaccagtgttgtccgctttgacaaagatgaacgggagaaactgtgtcggatagtcataattgatgactctttgtacgaggaggaggaaaccttccatgtccttctgagcatgcccatggggggaagaatcggatcagagttcccaggggctcaagttacaatcgttcctgacaaagatgatgaacccatcttttacttcggtgatgtggaatactctgtggatgagagtgctggctatgtggaagtgcaggtgtggagaacgggcactgacctgtccaagtcttctagtgtcacagtgaggtctcggaaaacagatcctccctctgcagatgctggaacagactatgtgggcatcagccgtaatttagattttgcacctggagtcaacatgcagcctgttcgtgttgtcattctggatgaccttggacaaccagcgctggagggaattgagaaatttgaactggtgcttcgcatgcctatgaacgcagcccttggcaagcccagcaaaaccacagtgtccataaatgactctgtctccgatttgcctaagatgcaattcaaagaacgaatatatactggcagcgaaagtgatgggcagatagttacaatgatccataggactggggatgtccagtacagatcttcagtgagatgctacacccggcaggggtctgcacaggtgatgatggactttgaagaacgcccaaacactgatacctccatcatcacattcctccctggtgagacagaaaagccctgcattcttgagctgatggacgatgtgctctatgaggaggtagaggagctccgcctggtactcggcactccacaaagcaactctccctttggggctgcagttggtgaacaaaatgaaactctcataaggatccgagatgatgctgataagactgttattaaatttggagaaaccaaatttagtgtcactgaacccaaagaacctggagagtcggtggttataagaattccagtgattcgccaaggagacacttcaaaggtttccattgtgagagtccacaccaaggatggctcggccacctctggagaagactaccaccctgtgtcagaagaaattgagtttaaggaaggggaaacccagcacgtggttgaaatcgaagttatctttgacggggtgagagagatgagagaggccttcactgttcacctaaaacctgatgaaaatatgatagcagagatgcagttgacgaaagccattgtgtacatagaagaaatgagcagcatggcagatgtcacttttccttctgtccctcaaattgtatccctgttgatgtatgacgacacttccaaagctaaggagagtgctgaacccatgtctggctatcctgtcatctgtatcacagcttgcaaccccaaatattcagactacgataaaacaggctctatctgtgcaagtgagaacatcaatgacactttgacgcggtaccggtggctgattagtgcacctgcgggccctgacggtgtgaccagccctatgagagaagtggacttcgacaccttttttacgtcatccaagatggtcacactggactccatatactttcagcctggctcccgggtacagtgcgcagctcgtgctgtgaacaccaatggggatgaaggcctggagctcatgagccctattgtaaccatcagcagagaagaaggtccttgtcagccccgtgtacctggggttgttggagcagagccgttctcagctaaattgcgctacacaggccctgaggatgcagactacacaaaccttatcaagctcactgtcacaatgccacacatagatggcatgctccccgtgatctccactagagagctttccaactttgagctcaccctcagccctgatggcacaagagttggaaaccacaagtgctccaacctcctggattatactgaagtgaagactcattatggtttcttgactgatgctaccaaaaatccagaaataattggagagacatatccttaccagtacagcttgtccatcagaggttccactaccttgcgcttctaccggaacctgaacctagaggcctgtttatggaagttcgttagctactatgacatgtcagaactccttgctgactgtggtggcaccattggaacagatggacaggtacagatttataacatctgagtttggtcactggataaaccaattggtttgttttgtcacatagatttgtactaagtcccaactccagttttccatcttggtgttgtaggtaattattgacagcaagggaccagacaactggcatggatggtgtgaaaatccgtgtctatttcttaacaatgggccagaatatacgtagtttttgacaatgggctagaaacattatatctatgtgaaaaggatgctgtataattattgccttaagctcaaaatctactctgatattataaaaatccaaatactgacttctcttcaaagtaaaaaaaaaaaaag

SEQ ID NO: 3445 - DNA, 3722 bp, Homo sapiens
tattgagcactgactgtataccctgcatgtgctaagtgctttacgtgcactctcgaatttaacattagaagtactcaccatgtcaggatttttccacttatgtatgtggaggttgcagtgagccaagattgcaccactgtactcaagtctgggcaacagagtgagaccctgtctcaaaaaaaaaaaaaaatttagagatgggggtgttgctatgttgcccaggttggactcgaactcttggactcaagcattcctcctgcctcagcctcctgaatagctgggactaaaggcgtatgccatcacacccagctggtaaaatcaactttcaataagcatgaagggtagtgatgaagagatcagggctagagccagatggcctgaattcaaatcctgctttctcctctctagctgtgtagtagctgtgggcaagttacttaaactctttgagcctctgatttctcacctgtccagggcgggtatgaacaggcccacctcacagtgttgcaaggattcagtgagttcgcatgaagtgattagaagtgattggggctgggtgcggtggctcacgcctgtgatcccagaactttgggaggctgaggcaggcagatcacttgaggccgggagttcgagaccagcctgaccaacatggagaaaccctgtctctactaaaaatgcaaaattagccggacgtggtagcacatgcctgtaatcccagctactcgggaggctgaggcaggagaatcgcttgaacctgggaagcggaggttgcggtgagccgagattgcgccattgcactccagcctgggcaacaagagcaaaaaaaaagaagtgattgggctgactgagtccacgccacatgaagggattagaagcgatgcatagtgaatgtgcagaaagtcctctcttaaggattagggtcaagaagaaaaagaaaggaaagggaaagtgctcaccatttgagacctgtctggaaattgctgtacttagtgtaaatttcttctcagcttcaacatctttgatcgtgattttatcaggaaaatactaataaagccactgttttgttcaacttctgatacttgctttttgaaaagataataatacctttgcctttttaaggattcagtgaaaatgctgttcttcaacttcattttgggatgcagtaggattcactgcttcacatgctccttgtgcacacatttgagtgcctactgtatgcaggcactacaggggagacagggtgaccaggacaagtcttccaacctcaagaagcttcaagtctattggggttgggatggagtagtggcaccacccaccccccccatcaccataagcaggagacacaagccaaggaggttctgtatgggaggcccactgacactgctggagctacttagtggggcacgctccaggaaagcttcccagaggaaggggcttcccatcccagaggtctaagaccttaaagccccaccaggtattagttcatatctccagcctctaacatattcctagagacagaattgttcaagtgggacttgtagaactcagctgtgccccagaacctccaagatgccccaggctggaaccacactggcctctcctctctgccaaaggccccttcaaggatgaggcccaaatccactaaaggactgtttaccacccaattatattccagaccagagaggcaagctggcagcctgcatgccaaacccaacaaaaatatgtgttttagtggcccatagagtatttctttgcactgaattatcaccaggacttaaatcaacattttatctatttaaccaacattatcaccaacatttgtcaccaggagagttcatgtaaaactgcacatttccagcctcttttgaaagcttcggtgaggcagcctcagcctaaatttgcccggggcagtgatgggggcactgaacaagactactcctcacagtccatcgggagccgtggagggtgctaagcagaggaggaacaggatccctctggctatgtgtggaaaatggactgcagggatgagggagcccagcggggaggtgaggtgactgcaaccatccaggcaagaaaggatggtggccagaccaggtgggagcagtgggcagtgggtttgattctcgcactgttttaaatgaagagacttcctgggggttatacgcaaggtggtaaggatgacgccaggtctcctgtcctaagccattggaaagatgggattgcctaaagctagggagggaaaccaccagtgggcagaggaaaccaggatcccatggtgagttcgagatgcccctcagacacccaggtgggagcgtcagggaggcagcctgttgggggtctggagttcagggctgaggtgggggctggagagagagatgaggagcggccagtgtagagatggtgcttagtgccccaggcctcggagtgggcacaactagggagaggacccggggccactcaacctggagaggtcaccttccgcctgggaagcccagcagggcacagggcagagcttctgcgctcctttcctggagggcccgctgacccctccggcgtcccttcccctctctcccagggccactgttcccagatgtgccacaacgtcttcatcgtggagtcggtgtgcgtgggctggttctccctggagttcctcctgcggctcattcaggcgcccagcaagttcgccttcctgcggagcccgctgacgctgatcgacctggtggccatcctgccctactacatcacgctgctggtggacggcgccgccgcgggccgtcgcaagcccggcgcgggcaacagctacctggacaaggtggggctggtgctgcgcgtgctgcaggcgctgcgcatcctgtacgtgatgcgcctggcgcgccactccctggggctgcagacgctggggctcacggcccgccgctgcacccgcgagttcgggctcctgctgctcttcctctgcgtggccatcgccctcttcgcgcccctgctctacgtcatcgagaacgagatggccgacagccccgagttcaccagcatccctgcctgctactggtgggctgtcatcaccatgacgacggtgggctatggcgacatggtccccaggagcaccccgggccaggtagtggccctgagcagcatactgagcggcatcctgctcatggccttcccagtcacctccatcttccacaccttctcccgctcctacctggagctcaagcaggagcaagagagggtgatgttccggagggcgcagttcctcatcaaaaccaagtcgcagctgagcgtgtcccaggacagtgacatcttgttcggaagtgcctcctcggacaccagagacaataactgagcgcggaggacacgcctgccctgcctgccatctgtggcccgaagccattgccatccactgcagacgcctggagagggacaggccgcttccgagtgcagtcctggcgcagcaccgactcccacgcacccggggaaggacaccctcactcccacaccccgggaagaacactagaacatcagcagaggggccctgcccctccgcctgcagccgtgaaaggaagctgggtcatcagcccagccccgcccaccccagcccctatgtgtgtttccctcaataaggagatgccttgttcttttcaccatgcaaataacatgcccagcaaaaacttgctttatgggtctgcctggagaaaaaaaaaaaaaatacaaacagcagaaacagc

SEQ ID NO: 3446 - DNA, 2419 bp, Homo sapiens
ggcggctgcacggacaagagcggaggcctggagaaatcaacttttcagtaattggtcagtatgtggattatcttgtgaaagaacagggagtgaagaacatttttgtgaatggcacaacaggagaaggcctgtccctgagcgtctcagagcgtcgccaggttgcagaggagtgggtgacaaaagggaaggacaagtgagtggctgcatgaggataaaaatgccctttggcaacagctgtattcagtgagcctcttccccagaggatacgccctccctgcttcctggtcagagccggggcttgaggtcagctggtgggaagatgagcagggcccccgggatcctggcttcttggagaagagccccctccctttctgtgcagaagggcagccaaactgctagacacacctgccacccagaggttccgctgggaaactgcttcttacctgtctacaaggccagtcccctcacagttacccgtctttgggctgaaaggctggatcaggtgataattcacgtaggagcactgagcttgaaggagtcacaggaactggcccaacatgcagcagaaataggagctgatggcatcgctgtcattgcaccgttcttcctcaagccatggaccaaagatatcctgattaatttcctaaaggaagtggctgctgccgcccctgccctgccattttattactatcacattcctgccttgacaggggtaaagattcgtgctgaggagttgttggatgggattctggataagatccccaccttccaagggctgaaattcagtgatacagatctcttagacttcgggcaatgtgttgatcagaatcgccagcaacagtttgctttcctttttggggtggatgagcaactgttgagtgctctggtgatgggagcaactggagcagtgggcagtacctataactacctgggaaaaaagacaaaccagatgttggaggcttttgaacaaaaggacttctctttagccctgaactatcagttttgtatccagagatttatcaactttgttgtcaaactaggttttggagtgtcacagaccaaagccatcatgactctggtctctgggattccaatgggcccaccccggcttccactgcagaaagcctccagggagtttactgatagtgctgaagctaaactgaagagcctggatttcctttctttcactgatttaaaggatggaaacttggaagctggtagctagtgcctctctatcaaatcagggtttgcaccttgagacataatctaccttaaatagtgcatttttttctcagggaattttagatgaacttgaataaactctcctagcaaatgaaatctcacaataagcattgagggaccttttgtgagccttaaaaagtcttattttgtgaaggggcaaaaactctaggagtcacaactctcagtcattcatttcacagatttttttgtggagaaatttctggttatatggatgaaatggaatcaagaggaaaattgtaattgattaattccatctgtctttaggagctctcattatctcggtctctggttcctaatcctattttaaagttgtctaattttaaaccactataatatgtcttcattttaataaatattcatttggaatctaggaaaactctgagctactgcatttaggcaggcactttaataccaaactgtaacatgtctcaactgtatacaactcaaaatacaccagctcatttggctgctcagtctaactctagaatggatgcttttgaattcatttcgatgtcaccacttttcgctctttaaaaacactgggtcaggtgaggacttgtttcagttcctataactaagtaaagggcggctttctcataacaaaggaaaaagtcttccccaaagatgaatttaagtctccacttttttctatacagaaaactcaaaactcaaagtttcaaagaaccaaaggactcttcctctgggcaccacaaacttccccttcctccactgagaagactgtctctcccgcaggaccctgaattattgaaatcgaaggctgacttcctttctgcagtgagcccaggggctaatgttattatcctgtcacacttgcaactagtgacttttgtttagtgatagaagatttggggaggacccaaaggactcagaactttctctccatacctccttttactcttttctttctgtgtaatgtatcaacaactgtttaatctcccttctaacaaaccttgatataagctttctgatatcaaagtatattgacagttaacccttactgattttaaacttgactatccagtctgttaattacctaagattttgttttcatttcatctctaattgttttgatcattggcagagaaagagtatttgaaattcatatcagttttgctccttattttaatctctttga

SEQ ID NO: 3447 - DNA, 1449 bp, Homo sapiens
gacatgacaccagtggcatatcacggccatggggtctcagcattccgctgctgctcgcccctcctcctgcaggcgaaagcaagaagatgacagggacggtttgctggctgaacgagagcaggaagaagccattgctcagttcccatatgtggaattcaccgggagagatagcatcacctgtctcacgtgccaggggacaggctacattccaacagagcaagtaaatgagttggtggctttgatcccacacagtgatcagagattgcgccctcagcgaactaagcaatatgtcctcctgtccatcctgctttgtctcctggcatctggtttggtggttttcttcctgtttccgcattcagtccttgtggatgatgacggcatcaaagtggtgaaagtcacatttaataagcaagactcccttgtaattctcaccatcatggccaccctgaaaatcaggaactccaacttctacacggtggcagtgaccagcctgtccagccagattcagtacatgaacacagtggtcagtacatatgtgactactaacgtctcccttattccacctcggagtgagcaactggtgaattttaccgggaaggccgagatgggaggaccgttttcctatgtgtacttcttctgcacggtacctgagatcctggtgcacaacatagtgatcttcatgcgaacttcagtgaagatttcatacattggcctcatgacccagagctccttggagacacatcactatgtggattgtggaggaaattccacagctatttaacaactgctattggttcttccacacagcgcctgtagaagagagcacagcatatgttcccaaggcctgagttctggacctacccccacgtggtgtaagcagaggaggaattggttcacttaactcccagcaaacatcctcctgccacttaggaggaaacacctccctatggtaccatttatgtttctcagaaccagcagaatcagtgcctagcctgtgcccagcaaatagttggcactcaataaagatttgcagaatttaatacagatcttttcagctgttcttagggcattataaatggaaatcataacgtggttctaggttatcaaaccatggagtgatgtggagctaggattgtgagtgacctgcaggccattatcagtgcctcatctgtgcagaagtggcagcagagagggaccatccaaatacctaagagaaaacagacctagtcaggatatgaatttgtttcagctgttcccaaaggcctgggagctttttgaaaagaaagaaaaaagtgtgttggcttttttttttttttagaaagttagaattgtttttaccaagagtctatgtggggcttgattcacccttcatccattggctggaacatggattggggatttgatagaaaaataaaccctgcttttgattcaaaaaaaaaaaaaaaaaaa

SEQ ID NO: 3448 - DNA, 4088 bp, Homo sapiens
gctgctctgcctgcatccggaggcggccgccagcggatttgccacccaggtcctaagactctcagtccagagagggccctgccccacacccagaaggaaggaatgctgcccagagatgaccagaggaatctagacagagcataaccttcggtggcaggacaaatcaggccagcacgcagtctgccaagtcctgctcgctccctgtcaagaaaaacagctggatccatttctaatcaacacttcccaacgcaacacttctgagtctctgaaggagaccagagcttgaaactttccagacttccaacagacatcgagtgcaaaaggatatttaggttgtctttgcacaaatctggttgatttgagagataaagggggggggaaccagtgtgactttcacctaagaagtcacatgaacatatttcacatttgaactacataatgaatgatggttattgaaatagcccaaacctctaccacagagcgagggatatagctcaaggggcaaccaggcagtcgcagaaccaaggaatggatgactacaagtatcaggacaattatgggggctatgctcccagtgatggctattaccgcggcaatgagtccaacccagaagaagatgcacagagtgatgtcaccgaaggccatgatgaggaagacgagatctatgagggcgagtaccagggtatccctcacccagatgatgtcaaggccaagcaggccaagatggcgccctccagaatggacagccttcggggccagacagacctgatggctgagaggctggaagatgaggagcagttggcccatcagtacgagaccatcatggatgagtgtggccatggccgcttccagtggatcctctttttcgtcttgggtttggccctgatggccgatggggtggaagtgttcgtggtgagttttgccctgcccagtgcagagaaggacatgtgtctgtccagttccaaaaaaggaatgctagggatgatagtctacttgggaatgatggcgggcgccttcatcctgggaggcctggctgataagctgggaaggaagcgagtcctcagcatgtctctggccgtcaatgcctccttcgcctccctctcttccttcgtgcagggatatggagccttcctcttctgccgactcatctcaggcatcggtattgggggtgctctaccgattgtttttgcctatttttctgaattcttgtctcgggagaagcgaggagaacacctcagttggctgggcatcttctggatgactgggggcctgtacgcatctgccatggcctggagcatcatcccacactatggctggggcttcagcatggggaccaattaccacttccatagctggagagtgtttgtcatcgtctgtgctctgccctgcaccgtgtccatggtggccctgaagttcatgccagagagcccaaggtttctgctagagatgggcaaacatgatgaagcctggatgattctcaagcaagtccatgacaccaacatgagagctaaggggaccccagagaaagtgttcacggtttccaacatcaaaactcccaagcaaatggatgaattcattgagatccaaagttcaacaggaacctggtaccagcgctggctggtcagattcaagaccattttcaagcaggtctgggataatgccctgtactgtgtgatggggccctacagaatgaatacactgattctggccgtggtttggtttgccatggcattcagttactatggactgacagtttggtttcctgatatgatccgctattttcaagatgaagaatacaagtctaaaatgaaggtgttttttggtgagcatgtgtacggcgccacaatcaacttcacgatggaaaatcagatccaccaacatgggaaacttgtgaatgataagttcacaagaatgtactttaaacatgtactctttgaggacacattctttgacgagtgctattttgaagacgtaacatcaacagatacctacttcaaaaattgtaccattgaatcaaccatcttttacaacacagacctctacgagcacaagttcatcaactgtcggtttatcaactccaccttcctggagcagaaggagggctgccacatggacttggagcaagataatgacttcctgatttacctcgtcagcttcctgggcagcctgtctgtcttacccgggaacatcatttctgccctgctcatggatagaattggaaggctcaagatgattggtggctccatgctaatctctgcagtctgctgcttcttcctgttttttggcaacagtgagtctgcaatgatcggctggcagtgcctgttctgtgggacaagcattgcagcctggaatgctctggatgtgatcacagtggagctgtatcccaccaaccagagagcaacagccttcggcattctcaatggattatgcaaatttggcgccatcctgggaaacaccatctttgcttcttttgttgggataaccaaagtggtccccatccttctggctgctgcttctctggttgggggtggcctgattgcccttcgactgccagagactcgagaacaggtcctgatgtgaacaacctatgggaaaaggaaaggtcgagagaatcttgtccaggacactgaaatgcatccacacttcctgcctatcacggtccggaggacaccttggatagcacgggaggagaagttgactttgtgacccctagtttaggacccacttcagctgtcaatatgtttgtaactcaggtgactgatttgggggtgccctgagccacccttagaatcacagagctgcgtgtttaacttcaagtcttcccagtccaaggcagggagaggattctccagtgagtgcacacactatgcgaggagcaagcatttctctaagtcaagtgcaaggacttaacttgcgtttgaaaaggaattagagggtcagaaacacccaggttcctccagaaagctccttggagcccaacaacttaacaaatcaacttggctggaagttagagtcattatatgaagattgggcttgaagtatatatttttgcatttaaaagtatcacctatcatattttccactcgaaaattgacatagtagcattgaggatacgctgatctagaaagccaagtatttgagcaacatctatagagatctacttttctcctatgtctcctaggctttccatgataattagggagagaagacatattgactctgactggacaccctgattcctccaaatatatataccactgtgtattaatctttctctcagtgttttataggagtactaacatttattgctctgtcaataatgaaaggctcgatgtaatatagctgtaatttactttccatatgaatacagtggctaggttcataaaagagaattgtgtgagtctgggattaccacatctaaaacattattctttaatgggataatacaattcattgagcagctaccacttaaaaaacttgcaggacagttagagcctgcatttctagttaagatggatcttgtaaatttaaaattggattaacattggagtgctggggtggctgcaataatttgggggctaactccatttggtttccaagatctcacttctgcattatctttatggctctttaaaccagccacctagccaatcaagggcaattcccatctcatccatcactcaggtctttgtaaagggtgcagccaagctctgcagacttttgcaggattgtctagcctgagtaccgggctacttcttaaatgccgtcactcctgctgagataaatgcgtctttaaaaatagtctctgtggcaggtcactgggggacaatgtacagcattctggccatccacttctttttcacttcatgttctaccccaagagactcccgatgtcggctgtggagggttaaagggatgaggctttcctttgtttagcaaatctgttcacagttcttgatgatgtattttatgatgcccagcttggaaatagttgctttccatagtctcaactgtattgtgtcatctcctgatgctgatttttgatcttttgttttattaaaaataattagtgaaaaaaaaaaaaaaaa

SEQ ID NO: 3449 - DNA, 2196 bp, Homo sapiens
actggtgtgccggacgccaggtgtagccatgcagcgagccgattccgagcagccctccaagcgtccccgttgcgatgacagcccgagaaccccctcaaacaccccttccgcagaggcagactggtccccgggcctggaactccatcccgactacaagacatggggtccggagcaggtgtgctccttcctcaggcgcggtggctttgaagagccggtgctgctgaagaacatccgagaaaatgaaatcacaggcgcattactgccttgtcttgatgagtctcgttttgaaaatcttggagtaagttccttgggggagaggaagaagctgcttagttatatccagcgattggttcaaatccacgttgatacaatgaaggtaattaatgatcctatccatggccacattgagctccaccctctcctcgtccgaatcattgatacacctcaatttcaacgtcttcgatacatcaaacagctgggaggtggttactatgtttttccaggagcttcgcacaatcgatttgagcatagtctaggggtggggtatctagcaggatgtctagttcacgcactgggtgaaaaacaaccagagctgcagataagtgaacgagatgttctctgtgttcagattgctggactttgtcatgatctcggtcatgggccattttctcacatgtttgatggacgatttattccacttgctcgcccggaggtgaaatggacgcatgaacaaggctcagttatgatgtttgagcaccttattaattctaatggaattaagcctgtcatggaacaatatggtctcatccctgaagaagatatttgctttataaaggaacaaattgtaggaccacttgaatcacctgtagaagattcattgtggccatataaagggcgtcctgaaaacaaaagcttcctttatgagatagtatctaataaaagaaatggcattgatgtggacaaatgggattattttgccagggactgccatcatcttggaatccaaaataattttgattacaagcgctttattaagtttgcccgtgtctgtgaagtagacaatgagttgcgtatttgtgctagagataaggaagttggaaatctgtatgacatgttccacactcgcaactctttacaccgtagagcttatcaacacaaagttggcaacattattgatacaatgattacagatgctttcctcaaagcagatgactacatagagattacaggtgctggagaaaaaaagtatcgcatttctacagcaattgacgacatggaagcctatactaagctgacagataacatttttctggagattttatactctactgatcccaaattgaaagacgcacgagagattttaaaacaaattgaataccgtaatctattcaagtatgtgggtgagacgcagccaacaggacaaataaagattaaaagggaggactatgaatctcttccaaaagaggttgccagtgctaaacccaaagtattgctagacgtgaaactgaaggctgaagattttatagtggatgttatcaacatggattatggaatgcaagaaaagaatccaattgatcatgttagcttctattgtaagactgcccccaacagagcaatcaggattactaaaaaccaggtttcacaacttctgccagagaaatttgtagagcagctgattcgagtatattgtaagaaggtggacagaaagagtttgtatgccgcaagacaatattttgttcagtggtgtgcagacagaaatttcaccaagccgcaggatggcgatgttatagccccactcataacacctcaaaaaaaggaatggaacgacagtacttcagtccaaaatccaactcgcctccgagaagcatccaaaagcagagtccagctttttaaagatgacccaatgtgaatgtctgtagtcagttgtttacaaactccctctcctgcacaattcatttagaggcttcaatcatagaattctgcaaattaatgacaactcatgctttaattttgtattttgaatgtacacgcatgctgaagctaagtaacttttaatcaaagaaataagatggtattaggcaaatcttactatactatgaaaagcattaccttgcctatttttaatattattaaagcctttctccttcagtaaaaaaaaaaaaaaaaaaaaaaaaaaaaagaaaaaaaaaaaaaaaa

SEQ ID NO: 3450 - DNA, 3389 bp, Homo sapiens
gtcggtgtgacaactgatcgggtgaacgatgcaccactaaccaccatggaaacaaggaaaaataaagcaagctcacaggatctctcttcactggattgagagcctcagcctgccgactgagaaaaagagttccaggaaaaagaaggaatcccggctgcagcctcctgccttcctttatattttaaaatagagagataagattgcgtgcatgtgtgcatatctatagtatatattttgtacactttgttacacagacacacaaatgcacctatttataccgggcaagaacacaaccatgtgattatctcaaccaaggaactgaggaatccagcacgcaaggacatcggaggtgggctagcactgaaactgcttttcaagcatcatgctgctattcctgcaaatactgaagaagcatgggatttaaatattttacttctaaataaatgaattactcaatctcctatgaccatctatacatactccaccttcaaaaagtacatcaatattatatcattaaggaaatagtaaccttctcttctccaatatgcatgacatttttggacaatgcaattgtggcactggcacttgtttcagtgaagaaaaactttgtggttctatggcattcatcatttgacaaatgcaagcatcttccttatcaatcagctcctattgaacttactagcactgactgtggaatccttaagggcccattacatttctgaagaagaaagctaagatgaaggacatgccactccgaattcatgtgctacttggcctagctatcactacactagtacaagctgtagataaaaaagtggattgtccacggttatgtacgtgtgaaatcaggccttggtttacacccagatccatttatatggaagcatctacagtggattgtaatgatttaggtcttttaactttcccagccagattgccagctaacacacagattcttctcctacagactaacaatattgcaaaaattgaatactccacagactttccagtaaaccttactagcctggatttatctcaaaacaatttatcttcagtcaccaatattaatgtaaaaaagatgcctcagctcctttctgtgtacctagaggaaaacaaacttactgaactgcctgaaaaatgtctgtccgaactgagcaacttacaagaactctatattaatcacaacttgctttctacaatttcacctggagcctttattggcctacataatcttcttcgacttcatctcaattcaaatagattgcagatgatcaacagtaagtggtttgatgctcttccaaatctagagattctgatgattggggaaaatccaattatcagaatcaaagacatgaactttaagcctcttatcaatcttcgcagcctggttatagctggtataaacctcacagaaataccagataacgccttggttggactggaaaacttagaaagcatctctttttacgataacaggcttattaaagtaccccatgttgctcttcaaaaagttgtaaatctcaaatttttggatctaaataaaaatcctattaatagaatacgaaggggtgattttagcaatatgctacacttaaaagagttggggataaataatatgcctgagctgatttccatcgatagtcttgctgtggataacctgccagatttaagaaaaatagaagctactaacaaccctagattgtcttacattcaccccaatgcatttttcagactccccaagctggaatcactcatgctgaacagcaatgctctcagtgccctgtaccatggtaccattgagtctctgccaaacctcaaggaaatcagcatacacagtaaccccatcaggtgtgactgtgtcatccgttggatgaacatgaacaaaaccaacattcgattcatggagccagattcactgttttgcgtggacccacctgaattccaaggtcagaatgttcggcaagtgcatttcagggacatgatggaaatttgtctccctcttatagctcctgagagctttccttctaatctaaatgtagaagctgggagctatgtttcctttcactgtagagctactgcagaaccacagcctgaaatctactggataacaccttctggtcaaaaactcttgcctaataccctgacagacaagttctatgtccattctgagggaacactagatataaatggcgtaactcccaaagaagggggtttatatacttgtatagcaactaacctagttggcgctgacttgaagtctgttatgatcaaagtggatggatcttttccacaagataacaatggctctttgaatattaaaataagagatattcatgccaattcagttttggtgtcctggaaagcaagttctaaaattctcaaatctagtgttaaatggacagcctttgtcaagactgaaaattctcatgctgcgcaaagtgctcgaataccatctgatgtcaaggtatataatcttactcatctgaatccatcaactgagtataaaatttgtattgatattcccaccatctatcagaaaaacagaaaaaaatgtgtaaatgtcaccaccaaaggtttgcaccctgatcaaaaagagtatgaaaagaataataccacaacacttatggcctgtcttggaggccttctggggattattggtgtgatatgtcttatcagctgcctctctccagaaatgaactgtgatggtggacacagctatgtgaggaattacttacagaaaccaacctttgcattaggtgagctttatcctcctctgataaatctctgggaagcaggaaaagaaaaaagtacatcactgaaagtaaaagcaactgttataggtttaccaacaaatatgtcctaaaaaccaccaaggaaacctactccaaaaatgaacaaaaaaaaaaaaagcgaaagactgcagttgtgctaaaaacaaaacaaaacaaacaaacaaacaaaaaagtaaaaaaagattactttcgagagagaagtttaagcttcaccaatgctgctcctgaccaatggaaatatgtacaacttcagcattttaagtaactggcttcaaggggtactgtggcaaccaaataaaataactccattttctaaaactttcatgtaacttttatgtctggactacagttcaagtggacaaaaacatttctgtattttttttaagtaaataagagtagttgaactgagcaatacctcctcctgtgttgtattacacatattagccacgagtttttgcagtgaccagataaacttgaattgacacgtggtgtaataaaatggacaaattctgtagagtagacacagtgagtatgtggacctcttttataaggaaaaatacattttggattaaaatcaaaaaaaaaaaaaaaaaaaaa

SEQ ID NO: 3451 - DNA, 3359 bp, Homo sapiens
ggaagcagcttgcaaatggcgtctccctcgctggagcggccagaaaaaggcgctggaaaaagtgaatttcgtaaccagaagccgaagccggagaaccaagatgaatcagaactccttacggttcctgatggttggaaggaaccagctttttccaaagaggacaatcccagaggacttttggaggagagcagtttcgcaactttgttcccaaaatacagggaagcttacttgaaagagtgttggccattggtgcagaaagccttaaatgaacatcatgttaatgcaaccctggacctgatcgaaggcagcatgactgtttgtactacaaagaagacttttgatccatatatcatcattagggccagagatctgataaaactgttagcaaggagtgtttcatttgaacaggcagtacgaattcttcaggatgatgttgcatgtgacatcattaaaataggttctttagtaaggaataaagagagatttgtaaaacgaagacaacggcttattggtcccaaaggatctacattgaaggcattggaactcttaactaattgttacattatggttcagggaaacacagtttcagccattggaccttttagtggcttaaaagaggttagaaaagtagtccttgatactatgaagaatattcatccaatttataacattaaaagcttaatgattaagagagagttggcaaaagattctgaattacgatcacaaagttgggagagatttttgccacagttcaagcacaaaaatgtgaataaacgcaaggaaccaaagaaaaaaactgttaagaaagaatatacgccattcccaccaccacaaccaggaagtcagatcgataaagaattggctagtggtgaatactttttgaaggcaaatcagaagaagcggcagaaaatggaagcaataaaggctaaacaagcagaagccatcagtaagagacaagaggaaagaaacaaagcatttattccacctaaggaaaaaccaattgtgaaacctaaggaagcttctactgaagctaaaattgatgtggccagcatcaaggaaaaggttaagaaagcaaagaataagaaactgggagctcttacagctgaagaaattgcacttaagatggaggcagatgaaaagaaaaagaagaaaaaaaagtaacatacccaaaactccttgactagaactatctccttttgtaaaggattttgagatatcaggcattagttgccttatttgtgagaaattttctgagggctttttttttttttggtggtggtggttgttcatagaagagtgttctttataaattatattattattgtattttttgaaaaatttatactagaaagtggtatatatgtctttgtatacattacgaccattgtgattatccattaaatccagtgtctgatgctattggttagtaatgatgtcccagcatttgatgttccctctctaatgataacaagtaaatatttaggtttatcccttttgaaagtttggttttacttttaacagtccatgaacagaaaattaaggcctctaaaatcagatcccctagttactcctctgttctgaatctggggaagtagtaaaccaaaaagacagggaaaaccagatatttagagtcgaagcagcatgcaaaaaataataatgtttttaactaatgaaggctactggagttactaagaatcacctaaaaatgtgctactgtaccttgctcattttgcagatttagaagctgaaacatgggttaggttacttactaaaagtccacctgtggcaacctgcaaataatgcttatttatactaaagatgagtttatctgatagagttaggaaatttcttcttttgagtaagagtattgctataacatatatttttttctgaaatgttttaaaatagaagtacacctaattgttattggttaaaaagaaagccatatgtgaatgaggttggtttttgggttttttctttcctgaattgtattagtccaaaagaactaaattagggtacttgtgctgtaccaaaatggtaattataacagacagtattagaattactgaattaacaatgagaaagagagaagtgtatctgttacgtggatatatgggccagcctggatatacaacagagtagtaacctgtgaaacaaacatagaatatcctcttagacattgttcctcataatgcactgacagaattcacatagctcttaatgaaacaatttaagattgatgtacgtacgtttgacttggtctcgctgtcggttaactgtaaagttagggggaagaaagaaaaaaaattaaaagggtagacacagttgagagttttattttaaaaagctaagtcttataattatgaccattaacttgctttggctttattgcagtgactttccaagtttaattattcaaaactttttgaactgactgaattaacttggtatttttaagttgactttttacataaactttataaaccttttataaaaaggaaactataccattactataaatggaaaatcattttacacatcatacctagcaggtaataaaatttaaaaaataaaaattaaatattagaatgtgagaaatttattaaaatatagttctaaaaataagtttcttcctgagaagaatgatactgtttatgatgaatccatagtgaaaagacagtgacctctctttcatccagtctagtatatcactaaatcatcattacgatgtttggctatcaagtcattaattactgtcctcctttcactgagctttattcaaattttgacaatcagagcactgggaagaaataaattccacaactgcctttagccttctggatactttcttttataaaatagaaaccttttccacaccagttctgcagcagtcgctattagatgctcgtggtagaacccatcaatcatctggtcctctgggtactggtgagcatccctggtcttcatacctgtgagtgggctttgtggtgaattactgtaaatatgctaccctcacttttcttggcagttatgtccatgaaatcaagagtgtgatgttctagttatttttttttatatatatttttaaatgttcaatattcaactattgaaacaaatgtacatctgtgaactagctaaaatcatcttatgtaccactaatatgcccagcacattttgtaaaacagtcctgatttggcctccaagggtatttattgaactaccagcagtatctaggagaccacgaaggaataccacgaaggaatttatgctccagtgcttgccataatttgtctgagaaggaatctgttaaataaaagcttttatcctctaaaaaaaaaaaaagaaaaaaaaaaaaaaaa

SEQ ID NO: 3452 - DNA, 1721 bp, Homo sapiens
gggttccaaatctcacaagcctctttgtatgtgatgctctcgcagtgaagaagattctttgggctataaagatgaagagtctacttcttctggtgctgatttcaatctgctgggctgatcatctttcagacaactatactctggatcatgacagagctattcacatccaagcagaaaatggcccccatctacttgtggaagcagagcaagccaaggtgttttcacacagaggtggcaatgttacactgccatgtaaattttatcgagaccctacagcatttggctcaggaatccataaaatccgaattaagtggaccaagctaacttcggattacctcaaggaagtggatgtttttgtttccatgggataccacaaaaaaacctatggaggctaccagggtagagtgtttctgaagggaggcagtgatagtgatgcttctctggtcatcacagacctcactctggaagattatgggagatataagtgtgaggtgattgaaggattagaagatgatactgttgtggtagcactggacttacaaggtgtggtattcccttactttccacgactggggcgctacaatctcaattttcacgaggcgcagcaggcgtgtctggaccaggatgctgtgatcgcctccttcgaccagctgtacgacgcctggcggggcgggctggactggtgcaatgccggctggctcagtgatggctctgtgcaatatcccatcacaaagcccagagagccctgtgggggccagaacacagtgcccggagtcaggaactacggattttgggataaagataaaagcagatatgatgttttctgttttacatccaatttcaatggccgtttttactatctgatccaccccaccaaactgacctatgatgtagcggtgcaagcttgtctcaatgatggtgctcagattgcaaaagtgggccagatatttgctgcctggaaaattctcggatatgaccgctgtgatgcgggctggttggcggatggcagcgtccgctaccccatctctaggccaagaaggcgctgcagtcctactgaggctgcagtgcgcttcgtgggtttcccagataaaaagcataagctgtatggtgtctactgcttcagagcatacaactgaatgtgcccttagagcgcatcagttttaaagtcattaagaacatgtgaaaggtgttttttttttccaatatgaactcatgcaagttaccaaaactgtgataacccttttttacttactgtaaagagtcattttcataaagatcaattcattgatttgttttttgtaaagctatcattcaatatatattataaattaatataaatttaagggaagctctatgtaaggagacttagagccaaactgtttaagctgtatcatcccaacaaagtatcctttcatgaacggggcatgcaatagcttaagaattgctaggattaaattaaggaaagtaaagctactcagagcagcaggttccacaagcacaaactttacacatttgtacaattttgaaatgcactacaataaacaaattagagcaacacatttgaaatacaggcttctttacataaactgagaggttatacaaaactcagtttcacaagggaacaatctatacctttctaaaagttaatatttcaagtctctaataggcagaatattttactctttaaaatcctgcctttctgaccgaaaaaaaaaaaaaaa

SEQ ID NO: 3453 - DNA, 1207 bp, Homo sapiens
gggggctcttccagaggcaagaccaaccaagatgagtgccctgggagctgtcattgccctcctgctctggggacagctttttgcagtggactcaggcaatgatgtcacggatatcgctaccagtgtaagaactactacaaactgcgcacagaaggagatggagtgtacaccttaaacaatgggaagcagtggataaataaggctgttggagataaacttcctgaatgtgaagcagtatgtgggaagcccaagaatccggcaaacccagtgcagcggatcctgggtggacacctggatgccaaaggcagctttccctggcaggctaagatggtttcccaccataatctcaccacaggtgccacgctgatcaatgaacaatggctgctgaccacggctaaaaatctcttcctgaaccattcagaaaatgcaacagcgaaagacattgcccctactttaacactctatgtggggaaaaagcagcttgtagagattgagaaggttgttctacaccctaactactcccaggtagatattgggctcatcaaactcaaacagaaggtgtctgttaatgagagagtgatgcccatctgcctaccttcaaaggattatgcagaagtagggcgtgtgggttatgtttctggctgggggcgaaatgccaattttaaatttactgaccatctgaagtatgtcatgctgcctgtggctgaccaagaccaatgcataaggcattatgaaggcagcacagtccccgaaaagaagacaccgaagagccctgtaggggtgcagcccatactgaatgaacacaccttctgtgctggcatgtctaagtaccaagaagacacctgctatggcgatgcgggcagtgcctttgccgttcacgacctggaggaggacacctggtatgcgactgggatcttaagctttgataagagctgtgctgtggctgagtatggtgtgtatgtgaaggtgacttccatccaggactgggttcagaagaccatagctgagaactaatgcaaggctggccggaagcccttgcctgaaagcaagatttcagcctggaagagggcaaagtggacgggagtggacaggagtggatgcgataagatgtggtttgaagctgatgggtgccagccctgcattgctgagtcaatcaataaagagctttcttttgacacaaaaaaaaaaaaaaaaaaaaaaaaaaaaa

SEQ ID NO: 3454 - DNA, 2072 bp, Homo sapiens; identical to SEQ ID NO: 208

SEQ ID NO: 3455 - DNA, 1079 bp, Homo sapiens
tggagctccggttttcagcctctttccgggctacctggtagcaatttgaggctctgtcatcagtttctgctacgtttcaaagatcctggagaagcctagtgttgtgtcaagacgccgatggacccatcacagtttaatccaacctacatcccagggtctccacaaatgctcaccgaagaaaattcccgggacgattcaggggcctctcaaatctcctccgagacgttgataaagaaccttagtaacttgactatcaacgctagtagcgaatctgtttcccctctatcggaagctttactccgtcgagagtctgtaggagcagcagtcctcagggaaatcgaagatgagtggctttacagcaggagaggagtaagaacattgctgtctgtgcagagagaaaagatggcaagattgagatacatgttactcggcggagttcgtacgcatgaaagaagaccaacaaacaaggagcctaagggagttaagaaggaatcaagaccattcaaatgtccctgcagtttctgcgtgtctaatggatgggatccttctgagaatgctagaatagggaatcaagacaccaagccacttcagccataaatcttattcttgcacctttttttcttgctagtaattttatatagcaggttgagaaagctactctatgctagtatagactatacaccaataattttgataatgagttctaggatgtatttttcttgtatctttttcttcctactatgatactagtaattcataagggatctgtgtaatctgaatgtatttgaataactttagctctactgtttgatttgacccaaagaagccaagatgatataagtattcccatgtgtcttagaagcccaaagtcagtgagatgaaacccaacatcaagaaattgaagcaaagttacttatggataaagaaagcattaggtagttgggctatagcataattagattttctggctttcaaaaatttggattgcaatcacagcaaactttgttatttttacagttttcagtacaaaagtgtttatatagaaacaataaagttgacatttgagtaccttttaaaaa

SEQ ID NO: 3456 - DNA, 887 bp, Homo sapiens; identical to SEQ ID NO: 1635

SEQ ID NO: 3457 - DNA, 4053 bp, Homo sapiens; identical to SEQ ID NO: 120

SEQ ID NO: 3458 - DNA, 4277 bp, Homo sapiens
gtttctcatagttggcgtcttctaaaggaaaaacactaaaatgaggaactcagcggaccgggagcgacgcagcttgagggaagcatccctagctgttggcgcagaggggcgaggctgaagccgagtggcccgaggtgtctgaggggctggggcaaaggtgaaagagtttcagaacaagcttcctggaacccatgacccatgaagtcttgtcgacatttataccgtctgagggtagcagctcgaaactagaagaagtggagtgttgccagggacggcagtatctctttgtgtgaccctggcggcctatgggacgttggcttcagacctttgtgatacaccatgctgcgtgggacgatgacggcgtggagaggaatgaggcctgaggtcacactggcttgcctcctcctagccacagcaggctgctttgctgacttgaacgaggtccctcaggtcaccgtccagcctgcgtccaccgtccagaagcccggaggcactgtgatcttgggctgcgtggtggaacctccaaggatgaatgtaacctggcgcctgaatggaaaggagctgaatggctcggatgatgctctgggtgtcctcatcacccacgggaccctcgtcatcactgcccttaacaaccacactgtgggacggtaccagtgtgtggcccggatgcctgcgggggctgtggccagcgtgccagccactgtgacactagccaatctccaggacttcaagttagatgtgcagcacgtgattgaagtggatgagggaaacacagcagtcattgcctgccacctgcctgagagccaccccaaagcccaggtccggtacagcgtcaaacaagagtggctggaggcctccagaggtaactacctgatcatgccctcagggaacctccagattgtgaatgccagccaggaggacgagggcatgtacaagtgtgcagcctacaacccagtgacccaggaagtgaaaacctccggctccagcgacaggctacgtgtgcgccgctccaccgctgaggctgcccgcatcatctaccccccagaggcccaaaccatcatcgtcaccaaaggccagagtctcattctggagtgtgtggccagtggaatcccacccccacgggtcacctgggccaaggatgggtccagtgtcaccggctacaacaagacgcgcttcctgctgagcaacctcctcatcgacaccaccagcgaggaggactcaggcacctaccgctgcatggccgacaatggggttgggcagcccggggcagcggtcatcctctacaatgtccaggtgtttgaaccccctgaggtcaccatggagctatcccagctggtcatcccctggggccagagtgccaagcttacctgtgaggtgcgtgggaaccccccgccctccgtgctgtggctgaggaatgctgtgcccctcatctccagccagcgcctccggctctcccgcagggccctgcgcgtgctcagcatggggcctgaggacgaaggcgtctaccagtgcatggccgagaacgaggttgggagcgcccatgccgtagtccagctgcggacctccaggccaagcataaccccaaggctatggcaggatgctgagctggctactggcacacctcctgtatcaccctccaaactcggcaaccctgagcagatgctgagggggcaaccggcgctccccagacccccaacgtcagtggggcctgcttccccgaagtgtccaggagagaaggggcagggggctcccgccgaggctcccatcatcctcagctcgccccgcacctccaagacagactcatatgaactggtgtggcggcctcggcatgagggcagtggccgggcgccaatcctctactatgtggtgaaacaccgcaagcaggtcacaaattcctctgacgattggaccatctctggcattccagccaaccagcaccgcctgaccctcaccagacttgaccccgggagcttgtatgaagtggagatggcagcttacaactgtgcgggagagggccagacagccatggtcaccttccgaactggacggcggcccaaacccgagatcatggccagcaaagagcagcagatccagagagacgaccctggagccagtccccagagcagcagccagccagaccacggccgcctctcccccccagaagctcccgacaggcccaccatctccacggcctccgagacctcagtgtacgtgacctggattccccgtgggaatggtgggttcccaatccagtccttccgtgtggagtacaagaagctaaagaaagtgggagactggattctggccaccagcgccatccccccatcgcggctgtccgtggagatcacgggcctagagaaaggcacctcctacaagtttcgagtccgggctctgaacatgctgggggagagcgagcccagcgccccctctcggccctacgtggtgtcgggctacagcggtcgcgtgtacgagaggcccgtggcaggtccttatatcaccttcacggatgcggtcaatgagaccaccatcatgctcaagtggatgtacatcccagcaagtaacaacaacaccccaatccatggcttttatatctattatcgacccacagacagtgacaatgatagtgactacaagaaggatatggtggaaggggacaagtactggcactccatcagccacctgcagccagagacctcctacgacattaagatgcagtgcttcaatgaaggaggggagagcgagttcagcaacgtgatgatctgtgagaccaaagctcggaagtcttctggccagcctggtcgactgccacccccaactctggccccaccacagccgccccttcctgaaaccatagagcggccggtgggcactggggccatggtggctcgctccagcgacctgccctatctgattgtcggggtcgtcctgggctccatcgttctcatcatcgtcaccttcatccccttctgcttgtggagggcctggtctaagcaaaaacatacaacagacctgggttttcctcgaagtgcccttccaccctcctgcccgtatactatggtgccattgggaggactcccaggccaccaggccagtggacagccctacctcagtggcatcagtggacgggcctgtgctaatgggatccacatgaataggggctgcccctcggctgcagtgggctacccgggcatgaagccccagcagcactgcccaggcgagcttcagcagcagagtgacaccagcagcctgctgaggcagacccatcttggcaatggatatgacccccaaagtcaccagatcacgaggggtcccaagtctagcccggacgagggctctttcttatacacactgcccgacgactccactcaccagctgctgcagccccatcacgactgctgccaacgccaggagcagcctgctgctgtgggccagtcaggggtgaggagagcccccgacagtcctgtcctggaagcagtgtgggaccctccatttcactcagggcccccatgctgcttgggccttgtgccagttgaagaggtggacagtcctgactcctgccaagtgagtggaggagactggtgtccccagcaccccgtaggggcctacgtaggacaggaacctggaatgcagctctccccggggccactggtgcgtgtgtcttttgaaacaccacctctcacaatttaggcagaagctgatatcccagaaagactatatattgttttttttttaaaaaaaaaagaagaaaaaagagacagagaaaattggtatttatttttctattatagccatatttatatatttatgcacttgtaaataaatgtatatgttttataattctggagagacataaggagtcctacccgttgaggttggagagggaaaataaagaagctgccacctaacaggagtcacccaggaaagcaccgcacaggctggcgcgggacagactcctaacctggggcctctgcagtggcaggcgaggctgcaggaggcccacagataagctggcaagaggaaggatcccaggcacatggttcatcacgagcatgagggaacagcaaggggcacggtatcacagcctggagacacccacacagatggctggatccggtgctacgggaaacattttcctaagatgcccatgagaacagaccaagatgtgtacagcactatgagcattaaaaaaccttccagaatcaataatccgtggcaacatatctctgtaaaaacaaacactgtaacttctaaataaatgtttagtcttccctgtaaaa

SEQ ID NO: 3459 - DNA, 2594 bp, Homo sapiens; identical to SEQ ID NO: 2321

SEQ ID NO: 3460 - DNA, 2171 bp, Homo sapiens
gtcagggccagggtgagcgcccgactccgagctgtccccgctcccggcgcggcgctccgctctcagccacctcacggctgccaggagtgcgcgggagtttgccccggagcgcggggaagtttcctccgaagctgcgctcctggaacagcagcacctgcaagcgcccggcagcggcccgcgaggttactttatggaattgggctcttagagaacaagaaaagactgaagttttacgggaaaacaaatcatgtggtcttcagattctgaaataaggagaaatgcagccatctgaaatggtcatgaaccccaaacaagtcttcctctctgtgctgatatttggagtagctgggctactcctcttcatgtatttgcaagtctggattgaagaacaacatacagggagagtggagaagagaagagaacaaaaagtaacttcaggatggggaccagtgaagtacttgcggcctgtacccagaatcatgagtacagaaaaaatccaggaacatatcaccaaccagaaccccaagtttcacatgcctgaggatgtacgagaaaaaaaggaaaatcttctactcaattctgagagatctactaggctcttaacaaagaccagtcattcacaaggaggggatcaagctttaagtaagtccacagggtcaccaacagagaagttgattgaaaaacgtcaaggagctaagactgtttttaacaagttcagcaacatgaattggccagtggacattcaccctttaaacaaaagtttagtcaaagataataaatggaagaaaactgaggagacccaagagaaacgaaggtctttccttcaggagttttgcaagaaatacggtggggtgagtcatcatcagtcacatctttttcatacagtatccagaatctatgtagaagataaacacaaaatcttatattgtgaggtacctaaggctggctgttccaattggaaaagaattctgatggtactaaatggattggcttcctctgcatacaacatctcccacaatgctgtccactacgggaagcatttgaagaagctagatagctttgacctaaaagggatatatacccgcttaaatacttacaccaaagctgtgtttgttcgtgatcccatggaaagattagtatcagcctttagggacaaatttgaacaccccaatagttattaccatccagtattcggaaaggcaattatcaagaaatatcgaccaaatgcctgtgaagaagcattaattaatggatctggagtcaagttcaaagagtttatccactacttgctggattcccaccgtccagtaggaatggacattcactgggaaaaggtcagcaaactctgctatccgtgtttgatcaactatgattttgtagggaaatttgagactttggaagaagatgccaattactttttacagatgatcggtgctccaaaggagctgaaatttcccaactttaaggataggcactcttccgatgaaagaaccaatgctcaagtcgtgagacagtatttaaaggatctgactagaactgagagacaattaatctatgacttttattacttggactatttaatgtttaattatacaactccacttttgtagtttgcattcattttctaaaaccctgtatatacttaatgatgataagttcaaatcagctgtaatttttctataattctctgtatgacagaaatttaaccaagtgcagttgtcttgatttaatgtagatttttaccaaatagtatgacaccaattggcacaaagttataggaaaatcacctacaggagatgtaaacaacttgagttgctctaaaatgtttggaaaagagctgcttttgcattatgaattatattgttgaagcaataacctagccagctgttgcattagctaaagcagcctcttgcaatggtaggaaaaaaggatctcaaatagcatgagtgtatgtctatatcctgaaatttattgtctaaaatgcatgaatatatttttagcagtctgtggcatattaatcaaactgttgaattgttttcttacaccctggaaatctttctatcaactataatgataaatccattttgaagtgatattttggacttaggcattttactttagattggaaggcattatgtgatttacaatatgagaatatagcagaaaaacca

SEQ ID NO: 3461 - DNA, 2626 bp, Homo sapiens
tccgcggagcgcctgggagaggagaaggagccgacctgccgagatggaggcgaccggcacctgggcgctgctgctggcgctggcgctgctcctgctgctgacgctggcgctgtccgggaccagggcccgaggccacctgccccccgggcccacgccgctaccactgctgggaaacctcctgcagctacggcccggggcgctgtattcagggctcatgcggctgagtaagaagtacggaccggtgttcaccatctacctgggaccctggcggcctgtggtggtcctggttgggcaggaggctgtgcgggaggccctgggaggtcaggctgaggagttcagcggccggggaaccgtagcgatgctggaagggacttttgatggccatggggttttcttctccaacggggagcggtggaggcagctgaggaagtttaccatgcttgctctgcgggacctgggcatggggaagcgagaaggcgaggagctgatccaggcggaggcccggtgtctggtggagacattccaggggacagaaggacgcccattcgatccctccctgctgctggcccaggccacctccaacgtagtctgctccctcctctttggcctccgcttctcctatgaggataaggagttccaggccgtggtccgggcagctggtggtaccctgctgggagtcagctcccaggggggtcagacctacgagatgttctcctggttcctgcggcccctgccaggcccccacaagcagctcctccaccacgtcagcaccttggctgccttcacagtccggcaggtgcagcagcaccaggggaacctggatgcttcgggccccgcacgtgaccttgtcgatgccttcctgctgaagatggcacaggaggaacaaaacccaggcacagaattcaccaacaagaacatgctgatgacagtcatttatttgctgtttgctgggacgatgacggtcagcaccacggtcggctataccctcctgctcctgatgaaataccctcatgtccaaaagtgggtacgtgaggagctgaatcgggagctgggggctggccaggcaccaagcctaggggaccgtacccgcctcccttacaccgacgcggttctgcatgaggcgcagcggctgctggcgctggtgcccatgggaataccccgcaccctcatgcggaccacccgcttccgagggtacaccctgccccagggcacggaggtcttccccctccttggctccatcctgcatgaccccaacatcttcaagcacccagaagagttcaacccagaccgtttcctggatgcagatggacggttcaggaagcatgaggcgttcctgcccttctccttagggaagcgtgtctgccttggagagggcctggcaaaagcggagctcttcctcttcttcaccaccatcctacaagccttctccctggagagcccgtgcccgccggacaccctgagcctcaagcccaccgtcagtggccttttcaacattcccccagccttccagctgcaagtccgtcccactgaccttcactccaccacgcagaccagatgaaggaaggcaacttggaagtggtgggtgcccaggacggtgcctccagcctcaacagtgggcatggacagggttaatgtctccagagtgtacactgcaggcagccacatttacacgcctgcagttgttttccggagtctgtcccacggcccacacgctcacttgactcatgctgctaagatgcacaaccgcacacccatacacaactacaagggccacaaagcaactgctgggttagctttccacagacataaatatagtccatctgcaatcacaagcacatagccaggtaacccaccaactcccctggatctgcagcccacacgtgggagtctggctgtcaccttcacaagccacagaaacggccacacatgttcacagctcacacgccctctccattcatcgaacttctcagtgtccctgtccctggtgcctggcacagggaacagcatgccccctccggggtcatgccacccagagactgtcgctgtctatggccccaactcatgctccctctcttggctacaccactctcccagcctgtgaccaccgatgtccacacacccccaaccacttgtccacacagctacccacgtacaacatcgtcctggctccccagagtatcttcccactgagacacgccgcccccacagaggcacagtccccagccacctctgcaactgcagccctcagtcacccctttttaagcaccctgattctaccaaatgcaaacacatctgggtctgcgattatgcacagagactttggacatacgaggaccctcagaccggaggaacacctgcccaaccccaacacgtgcttatgtaaccacgtggaaagcggcccctgctgcccctccacacacacatacacactcactgatctacagcccctgttcggcgtcagagtccccactagacccagtggaaggggttagagaccaagtaggggccagtttccaattcaccctgtcagggagtgagccggatctgacgttccttgtgacttaagggtccggcttgggaattaaagtttgtttctggcctttagcctaaaaaaaaaaaaaaaaaa

SEQ ID NO: 3462 - DNA, 1547 bp, Homo sapiens
ggtaggcgcgcccagacctgagacgggttgggactgggctgcgtcacgcgcgggctctaagcgcccggggccccgcccagtggccggcacagccaatcgcagcgcgggaaggcggtgggggcggggaaggccgcctggaaacttaaatcccgaggcgggcgaacctgcaccagaccgcggacgtctgtaatctcagaggcttgtttgctgagggtgcctgcgcagctgcgacggctgctggttttgaaacatgaatctttcgctcgtcctggctgccttttgcttgggaatagcctccgctgttccaaaatttgaccaaaatttggatacaaagtggtaccagtggaaggcaacacacagaagattatatggcgcgaatgaagaaggatggaggagagcagtgtgggaaaagaatatgaaaatgattgaactgcacaatggggaatacagccaagggaaacatggcttcacaatggccatgaatgcttttggtgacatgaccaatgaagaattcaggcagatgatgggttgctttcgaaaccagaaattcaggaaggggaaagtgttccgtgagcctctgtttcttgatcttcccaaatctgtggattggagaaagaaaggctacgtgacgccagtgaagaatcagaaacagtgtggttcttgttgggcttttagtgcgactggtgctcttgaaggacagatgttccggaaaactgggaaacttgtctcactgagcgagcagaatctggtggactgttcgcgtcctcaaggcaatcagggctgcaatggtggcttcatggctagggccttccagtatgtcaaggagaacggaggcctggactctgaggaatcctatccatatgtagcagtggatgaaatctgtaagtacagacctgagaattctgttgctaatgacactggcttcacagtggtcgcacctggaaaggagaaggccctgatgaaagcagtcgcaactgtggggcccatctccgttgctatggatgcaggccattcgtccttccagttctacaaatcaggcatttattttgaaccagactgcagcagcaaaaacctggatcatggtgttctggtggttggctacggctttgaaggagcaaattcgaataacagcaagtattggctcgtcaaaaacagctggggtccagaatggggctcgaatggctatgtaaaaatagccaaagacaagaacaaccactgtggaatcgccacagcagccagctaccccaatgtgtgagctgatggatggtgaggaggaaggacttaaggacagcatgtctggggaaattttatcttgaaactgaccaaacgcttattgtgtaagataaaccagttgaatcatggaggatccaagttgagattttaattctgtgacatttttacaagggtaaaatgttaccactactttaattattgttatacacagctttatgatatcaaagactcattgcttaattctaagacttttgaattttcattttttaaaaagatgtacaaaacagtttgaaataaattttaattcgtatata

SEQ ID NO: 3463 - DNA, 2084 bp, Homo sapiens
ggttcctgggcgctctgttacacaagcaagatacagccagccccacctaattttgtttccctggcaccctcctgctcagtgcgacattgtcacacttaacccatctgttttctctaatgcacgacagattcctttcagacaggacaactgtgatatttcagttcctgattgtaaatacctcctaagcctgaagcttctgttactagccattgtgagcttcagtttcttcatctgcaaaatgggcataatacaatctattcttgccacatcaagggattgttattcctttaaaaaaaaaccaataccaaagaagcctacaatgttggccttagccaaaattctgttgatttcaacgttgttttattcacttctatcggggagccatggaaaagaaaatcaagacataaacacaacacagaacattgcagaagtttttaaaacaatggaaaataaacctatttctttggaaagtgaagcaaacttaaactcagataaagaaaatataaccacctcaaatctcaaggcgagtcattcccctcctttgaatctacccaacaacagccacggaataacagatttctccagtaactcatcagcagagcattctttgggcagtctaaaacccacatctaccatttccacaagccctcccttgatccatagctttgtttctaaagtgccttggaatgcacctatagcagatgaagatcttttgcccatctcagcacatcccaatgctacacctgctctgtcttcagaaaacttcacttggtctttggtcaatgacaccgtgaaaactcctgataacagttccattacagttagcatcctctcttcagaaccaacttctccatctgtgacccccttgatagtggaaccaagtggatggcttaccacaaacagtgatagcttcactgggtttaccccttatcaagaaaaaacaactctacagcctaccttaaaattcaccaataattcaaaactctttccaaatacgtcagatccccaaaaagaaaatagaaatacaggaatagtattcggggccattttaggtgctattctgggtgtctcattgcttactcttgtgggctacttgttgtgtggaaaaaggaaaacggattcattttcccatcggcgactttatgacgacagaaatgaaccagttctgcgattagacaatgcaccggaaccttatgatgtgagttttgggaattctagctactacaatccaactttgaatgattcagccatgccagaaagtgaagaaaatgcacgtgatggcattcctatggatgacatacctccacttcgtacttctgtatagaactaacagcaaaaaggcgttaaacagcaagtgtcatctacatcctagccttttgacaaattcatctttcaaaaggttacacaaaattactgtcacgtggattttgtcaaggagaatcataaaagcaggagaccagtagcagaaatgtagacaggatgtatcatccaaaggttttctttcttacaatttttggccatcctgaggcatttactaagtagccttaatttgtattttagtagtattttcttagtagaaaatatttgtggaatcagataaaactaaaagatttcaccattacagccctgcctcataactaaataataaaaattattccaccaaaaaattctaaaacaatgaagatgactctttactgctctgcctgaagccctagtaccataattcaagattgcattttcttaaatgaaaattgaaagggtgctttttaaagaaaatttgacttaaagctaaaaagaggacatagcccagagtttctgttattgggaaattgaggcaatagaaatgacagacctgtattctagtacgttataattttctagatcagcacacacatgatcagcccactgagttatgaagctgacaatgactgcattcaacggggccatggcaggaaagctgaccctacccaggaaagtaatagcttctttaaaagtcttcaaaggttttgggaattttaacttgtcttaatatatcttaggcttcaattatttgggtgccttaaaaactcaatgagaatcatggt

SEQ ID NO: 3464 - DNA, 1150 bp, Homo sapiens; identical to SEQ ID NO: 2414

SEQ ID NO: 3465 - DNA, 1587 bp, Homo sapiens
cagccacagacgggtcatgagcgcggtattactgctggccctcctggggttcatcctcccactgccaggagtgcaggcgctgctctgccagtttgggacagttcagcatgtgtggaaggtgtccgacctaccccggcaatggacccctaagaacaccagctgcgacagcggcttggggtgccaggacacgttgatgctcattgagagcggaccccaagtgagcctggtgctctccaagggctgcacggaggccaaggaccaggagccccgcgtcactgagcaccggatgggccccggcctctccctgatctcctacaccttcgtgtgccgccaggaggacttctgcaacaacctcgttaactccctcccgctttgggccccacagcccccagcagacccaggatccttgaggtgcccagtctgcttgtctatggaaggctgtctggaggggacaacagaagagatctgccccaaggggaccacacactgttatgatggcctcctcaggctcaggggaggaggcatcttctccaatctgagagtccagggatgcatgccccagccaggttgcaacctgctcaatgggacacaggaaattgggcccgtgggtatgactgagaactgcaataggaaagattttctgacctgtcatcgggggaccaccattatgacacacggaaacttggctcaagaacccactgattggaccacatcgaataccgagatgtgcgaggtggggcaggtgtgtcaggagacgctgctgctcatagatgtaggactcacatcaaccctggtggggacaaaaggctgcagcactgttggggctcaaaattcccagaagaccaccatccactcagcccctcctggggtgcttgtggcctcctatacccacttctgctcctcggacctgtgcaatagtgccagcagcagcagcgttctgctgaactccctccctcctcaagctgcccctgtcccaggagaccggcagtgtcctacctgtgtgcagccccttggaacctgttcaagtggctccccccgaatgacctgccccaggggcgccactcattgttatgatgggtacattcatctctcaggaggtgggctgtccaccaaaatgagcattcagggctgcgtggcccaaccttccagcttcttgttgaaccacaccagacaaatcgggatcttctctgcgcgtgagaagcgtgatgtgcagcctcctgcctctcagcatgagggaggtggggctgagggcctggagtctctcacttggggggtggggctggcactggccccagcgctgtggtggggagtggtttgcccttcctgctaactctattacccccacgattcttcaccgctgctgaccacccacactcaacctccctctgacctcataacctaatggccttggacaccagattctttcccattctgtccatgaatcatcttccccacacacaatcattcatatctactcacctaacagcaacactggggagagcctggagcatccggacttgccctatgggagaggggacgctggaggagtggctgcatgtatctgataatacagaccctgtcctttca

SEQ ID NO: 3466 - DNA, 3871 bp, Homo sapiens
gttggttctcctggatcttcaccttaccaactgcagatcttgggactcatcagcctcaataattatattaaattaacaccatttgaaagagaacattgttttcatcatgaatgctaataaagatgaaagacttaaagccagaagccaagattttcacctttttcctgctttgatgatgctaagcatgaccatgttgtttcttccagtcactggcactttgaagcaaaatattccaagactcaagctaacctacaaagacttgctgctttcaaatagctgtattccctttttgggttcatcagaaggactggattttcaaactcttctcttagatgaggaaagaggcaggctgctcttgggagccaaagaccacatctttctactcagtctggttgacttaaacaaaaattttaagaagatttattggcctgctgcaaaggaacgggtggaattatgtaaattagctgggaaagatgccaatacagaatgtgcaaatttcatcagagtacttcagccctataacaaaactcacatatatgtgtgtggaactggagcatttcatccaatatgtgggtatattgatcttggagtctacaaggaggatattatattcaaactagacacacataatttggagtctggcagactgaaatgtcctttcgatcctcagcagccttttgcttcagtaatgacagatgagtacctctactctggaacagcttctgatttccttggcaaagatactgcattcactcgatcccttgggcctactcatgaccaccactacatcagaactgacatttcagagcactactggctcaatggagcaaaatttattggaactttcttcataccagacacctacaatccagatgatgataaaatatatttcttctttcgtgaatcatctcaagaaggcagtacctccgataaaaccatcctttctcgagttggaagagtttgtaagaatgatgtaggaggacaacgcagcctgataaacaagtggacgacttttcttaaggccagactgatttgctcaattcctggaagtgatggggcagatacttactttgatgagcttcaagatatttatttactccccacaagagatgaaagaaatcctgtagtatatggagtctttactacaaccagctccatcttcaaaggctctgctgtttgtgtgtatagcatggctgacatcagagcagtttttaatggtccatatgctcataaggaaagtgcagaccatcgttgggtgcagtatgatgggagaattccttatccacggcctggtacatgtccaagcaaaacctatgacccactgattaagtccacccgagattttccagatgatgtcatcagtttcataaagcggcactctgtgatgtataagtccgtatacccagttgcaggaggaccaacgttcaagagaatcaatgtggattacagactgacacagatagtggtggatcatgtcattgcagaagatggccagtacgatgtaatgtttcttggaacagacattggaactgtcctcaaagttgtcagcatttcaaaggaaaagtggaatatggaagaggtagtgctggaggagttgcagatattcaagcactcatcaatcatcttgaacatggaattgtctctgaagcagcaacaattgtacattggttcccgagatggattagttcagctctccttgcacagatgcgacacttatgggaaagcttgcgcagactgttgtcttgccagagacccctactgtgcctgggatggaaatgcatgctctcgatatgctcctacttctaaaaggagagctagacgccaagatgtaaaatatggcgacccaatcacccagtgctgggacatcgaagacagcattagtcatgaaactgctgatgaaaaggtgatttttggcattgaatttaactcaacctttctggaatgtatacctaaatcccaacaagcaactattaaatggtatatccagaggtcaggggatgagcatcgagaggagttgaagcccgatgaaagaatcatcaaaacggaatatgggctactgattcgaagtttgcagaagaaggattctgggatgtattactgcaaagcccaggagcacactttcatccacaccatagtgaagctgactttgaatgtcattgagaatgaacagatggaaaatacccagagggcagagcatgaggaggggcaggtcaaggatctattggctgagtcacggttgagatacaaagactacatccaaatccttagcagcccaaacttcagcctcgaccagtactgcgaacagatgtggcacagggagaagcggagacagagaaacaaggggggcccaaagtggaagcacatgcaggaaatgaagaagaaacgaaatcgaagacatcacagagacctggatgagctccctagagctgtagccacgtagttttctacttaatttaaagaaaagaattccttacctataaaaacattgccttctgttttgtatatcccttatagtaattcataaatgcttcccatggagttttgctaaggcacaagacaataatctgaataagacaatatgtgatgaatataagaaagggcaaaaaattcatttgaaccagttttccaagaacaaatcttgcacaagcaaagtataagaattatcctaaaaatagggggtttacagttgtaaatgttttatgttttgagttttggaatttattgtcatgtaaatagttgagctaagcaagccccgaatttgatagtgtataaggtgctttattccctcgaatgtccattaagcatggaatttaccatgcagttgtgctatgttcttatgaacagatatatcattcctattgagaaccagctaccttgtggtagggaataagaggtcagacacaaattaagacaactcccattatcaacaggaactttctcagtgagccattcactcctggagaatggtataggaatttggagaggtgcattatttctttctggccactggggttaaatttagtgtactacaacattgatttactgaagggcactaatgtttcccccaggatttctattgactagtcaggagtaacaggttcacagagagaagttggtgcttagttatgtgttttttagagtatatactaagctctacagggacagaatgcttaataaatactttaataagatatgggaaaatattttaataaaacaaggaaaacataatgatgtataatgcatcctgatgggaaggcatgcagatgggatttgttagaagacagaaggaaagacagccataaattctggctttggggaaaactcatatccccatgaaaaggaagaacaatcacaaataaagtgagagtaatgtaatggagctcttttcactagggtataagtagctgccaatttgtaattcatctgttaaaaaaaatctagattataacaaactgctagcaaaatctgaggaaacataaattcttctgaagaatcataggaagagtagacattttatttataaccaatgatatttcagtatatattttctctcttttaaaaaatatttatcatactctgtatattatttctttttactgcctttattctctcctgtatattggattttgtgattatatttgagtgaataggagaaaacaatatataacacacagagaattaagaaaatgacatttctggggagtggggatatatatttgttgaataacagaacgagtgtaaaattttaacaacggaaagggttaaattaactctttgacatcttcactcaaccttttctcattgctgagttaatctgttgtaattgtagtattgtttttgtaatttaacaataaataagcctgctacatgt

SEQ ID NO: 3467 - DNA, 1883 bp, Homo sapiens
caggagagaaggcaccgcccccaccccgcctccaaagctaaccctcgggcttgaggggaagaggctgactgtacgttccttctactctggcaccactctccaggctgccatggggcccagcacccctctcctcatcttgttccttttgtcatggtcgggacccctccaaggacagcagcaccaccttgtggagtacatggaacgccgactagctgctttagaggaacggctggcccagtgccaggaccagagtagtcggcatgctgctgagctgcgggacttcaagaacaagatgctgccactgctggaggtggcagagaaggagcgggaggcactcagaactgaggccgacaccatctccgggagagtggatcgtctggagcgggaggtagactatctggagacccagaacccagctctgccctgtgtagagtttgatgagaaggtgactggaggccctgggaccaaaggcaagggaagaaggaatgagaagtacgatatggtgacagactgtggctacacaatctctcaagtgagatcaatgaagattctgaagcgatttggtggcccagctggtctatggaccaaggatccactggggcaaacagagaagatctacgtgttagatgggacacagaatgacacagcctttgtcttcccaaggctgcgtgacttcacccttgccatggctgcccggaaagcttcccgagtccgggtgcccttcccctgggtaggcacagggcagctggtatatggtggctttctttattttgctcggaggcctcctggaagacctggtggaggtggtgagatggagaacactttgcagctaatcaaattccacctggcaaaccgaacagtggtggacagctcagtattcccagcagaggggctgatccccccctacggcttgacagcagacacctacatcgacctggtagctgatgaggaaggtctttgggctgtctatgccacccgggaggatgacaggcacttgtgtctggccaagttagatccacagacactggacacagagcagcagtgggacacaccatgtcccagagagaatgctgaggctgcctttgtcatctgtgggaccctctatgtcgtctataacacccgtcctgccagtcgggcccgcatccagtgctcctttgatgccagcggcaccctgacccctgaacgggcagcactcccttattttccccgcagatatggtgcccatgccagcctccgctataacccccgagaacgccagctctatgcctgggatgatggctaccagattgtctataagctggagatgaggaagaaagaggaggaggtttgaggagctagccttgttttttgcatctttctcactcccatacatttatattatatccccactaaatttcttgttcctcattcttcaaatgtgggccagttgtggctcaaatcctctatatttttagccaatggcaatcaaattctttcagctcctttgtttcatacggaactccagatcctgagtaatccttttagagcccgaagagtcaaaaccctcaatgttccctcctgctctcctgccccatgtcaacaaatttcaggctaaggatgccccagacccagggctctaaccttgtatgcgggcaggcccagggagcaggcagcagtgttcttcccctcagagtgacttggggagggagaaataggaggagacgtccagctctgtcctctcttcctcactcctcccttcagtgtcctgaggaacaggactttctccacattgttttgtattgcaacattttgcattaaaaggaaaatccacaaaaaaaaaaaaaaaaaaaaaaaaaaaaaaaaaaaaaaaaaaaaaaaaaaaaaaaaaaaaaaaaaaaaaaaaa

SEQ ID NO: 3468 - DNA, 1964 bp, Homo sapiens
cgcgccgggcgcagggagctgagtggacggctcgagacggcggcgcgtgcagcagctccagaaagcagcgagttggcagagcagggctgcatttccagcaggagctgcgagcacagtgctggctcacaacaagatgctcaaggtgtcagccgtactgtgtgtgtgtgcagccgcttggtgcagtcagtctctcgcagctgccgcggcggtggctgcagccggggggcggtcggacggcggtaattttctggatgataaacaatggctcaccacaatctctcagtatgacaaggaagtcggacagtggaacaaattccgagacgaagtagaggatgattatttccgcacttggagtccaggaaaacccttcgatcaggctttagatccagctaaggatccatgcttaaagatgaaatgtagtcgccataaagtatgcattgctcaagattctcagactgcagtctgcattagtcaccggaggcttacacacaggatgaaagaagcaggagtagaccataggcagtggaggggtcccatattatccacctgcaagcagtgcccagtggtctatcccagccctgtttgtggttcagatggtcatacctactcttttcagtgcaaactagaatatcaggcatgtgtcttaggaaaacagatctcagtcaaatgtgaaggacattgcccatgtccttcagataagcccaccagtacaagcagaaatgttaagagagcatgcagtgacctggagttcagggaagtggcaaacagattgcgggactggttcaaggcccttcatgaaagtggaagtcaaaacaagaagacaaaaacattgctgaggcctgagagaagcagattcgataccagcatcttgccaatttgcaaggactcacttggctggatgtttaacagacttgatacaaactatgacctgctattggaccagtcagagctcagaagcatttaccttgataagaatgaacagtgtaccaaggcattcttcaattcttgtgacacatacaaggacagtttaatatctaataatgagtggtgctactgcttccagagacagcaagacccaccttgccagactgagctcagcaatattcagaagcggcaaggggtaaagaagctcctaggacagtatatccccctgtgtgatgaagatggttactacaagccaacacaatgtcatggcagtgttggacagtgctggtgtgttgacagatatggaaatgaagtcatgggatccagaataaatggtgttgcagattgtgctatagattttgagatctccggagattttgctagtggcgattttcatgaatggactgatgatgaggatgatgaagacgatattatgaatgatgaagatgaaattgaagatgatgatgaagatgaaggggatgatgatgatggtggtgatgaccatgatgtatacatttgattgatgacagttgaaatcaataaattctacatttctaatatttacaaaaatgatagcctatttaaaattatcttcttccccaataacaaaatgattctaaacctcacatatattttgtataattatttgaaaaattgcagctaaagttatagaactttatgtttaaataagaatcatttgctttgagtttttatattccttacacaaaaagaaaatacatatgcagtctagtcagacaaaataaagttttgaagtgctactataataaatttttcacgagaacaaactttgtaaatcttccataagcaaaatgacagctagtgcttgggatcgtacatgttaattttttgaaagataattctaagtgaaatttaaaataaataaatttttaatgacctgggtcttaaggatttaggaaaaatatgcatgctttaattgcatttccaaagtagcatcttgctagacctagatgagtcaggataacagagagataccacatgactccaaaaaaaaaaaaaaa

SEQ ID NO: 3469 - DNA, 4333 bp, Homo sapiens
cccacgcgtccggccctgtaaccaagatactgactgaacatggctggcggactcaggctggggtctgcagtgcagcattaatgggccgctgacatgaatatggagtagttttctctagcaaagagtaatgtgggccatggagtcaggccacctcctctgggctctgctgttcatgcagtccttgtggcctcaactgactgatggagccactcgagtctactacctgggcatccgggatgtgcagtggaactatgctcccaagggaagaaatgtcatcacgaaccagcctctggacagtgacatagtggcttccagcttcttaaagtctgacaagaaccggatagggggaacctacaagaagaccatctataaagaatacaaggatgactcatacacagatgaagtggcccagcctgcctggttgggcttcctggggccagtgttgcaggctgaagtgggggatgtcattcttattcacctgaagaattttgccactcgtccctataccatccaccctcatggtgtcttctacgagaaggactctgaaggttccctatacccagatggctcctctgggccactgaaagctgatgactctgttcccccggggggcagccatatctacaactggaccattccagaaggccatgcacccaccgatgctgacccagcgtgcctcacctggatctaccattctcatgtagatgctccacgagacattgcaactggcctaattgggcctctcatcacctgtaaaagaggagccctggatgggaactcccctcctcaacgccaggatgtagaccatgatttcttcctcctcttcagtgtggtagatgagaacctcagctggcatctcaatgagaacattgccacttactgctcagatcctgcttcagtggacaaagaagatgagacatttcaggagagcaataggatgcatgcaatcaatggctttgtttttgggaatttacctgagctgaacatgtgtgcacagaaacgtgtggcctggcacttgtttggcatgggcaatgaaattgatgtccacacagcatttttccatggacagatgctgactacccgtggacaccacactgatgtggctaacatctttccagccacctttgtgactgctgagatggtgccctgggaacctggtacctggttaattagctgccaagtgaacagtcactttcgagatggcatgcaggcactctacaaggtcaagtcttgctccatggcccctcctgtggacctgctcacaggcaaagttcgacagtacttcattgaggcccatgagattcaatgggactatggcccgatggggcatgatgggagtactgggaagaatttgagagagccaggcagtatctcagataagtttttccagaagagctccagccgaattgggggcacttactggaaagtgcgatatgaagcctttcaagatgagacattccaagagaagatgcatttggaggaagataggcatcttggaatcctggggccagtgatccgggctgaggtgggtgacaccattcaggtggtcttctacaaccgtgcctcccagccattcagcatgcagccccatggggtcttttatgagaaagactatgaaggcactgtgtacaatgatggctcatcttaccctggcttggttgccaagccctttgagaaagtaacataccgctggacagtcccccctcatgccggtcccactgctcaggatcctgcttgtctcacttggatgtacttctctgctgcagatcccataagagacacaaattctggcctggtgggcccgctgctggtgtgcagggctggtgccttgggtgcagatggcaagcagaaaggggtggataaagaattctttcttctcttcactgtgttggatgagaacaagagctggtacagcaatgccaatcaagcagctgctatgttggatttccgactgctttcagaggatattgagggcttccaagactccaatcggatgcatgccattaatgggtttctgttctctaacctgcccaggctggacatgtgcaagggtgacacagtggcctggcacctgctcggcctgggcacagagactgatgtgcatggagtcatgttccagggcaacactgtgcagcttcagggcatgaggaagggtgcagctatgctctttcctcatacctttgtcatggccatcatgcagcctgacaaccttgggacatttgagatttattgccaggcaggcagccatcgagaagcagggatgagggcaatctataatgtctcccagtgtcctggccaccaagccacccctcgccaacgctaccaagctgcaagaatctactatatcatggcagaagaagtagagtgggactattgccctgaccggagctgggaacgggaatggcacaaccagtctgagaaggacagttatggttacattttcctgagcaacaaggatgggctcctgggttccagatacaagaaagctgtattcagggaatacactgatggtacattcaggatccctcggccaaggactggaccagaagaacacttgggaatcttgggtccacttatcaaaggtgaagttggtgatatcctgactgtggtattcaagaataatgccagccgcccctactctgtgcatgctcatggagtgctagaatctactactgtctggccactggctgctgagcctggtgaggtggtcacttatcagtggaacatcccagagaggtctggccctgggcccaatgactctgcttgtgtttcctggatctattattctgcagtggatcccatcaaggacatgtatagtggcctggtggggcccttggctatctgccaaaagggcatcctggagccccatggaggacggagtgacatggatcgggaatttgcattgttgttcttgatttttgatgaaaataagtcttggtatttggaggaaaatgtggcaacccatgggtcccaggatccaggcagtattaacctacaggatgaaactttcttggagagcaataaaatgcatgcaatcaatgggaaactctatgccaaccttaggggtcttaccatgtaccaaggagaacgagtggcctggtacatgctggccatgggccaagatgtggatctacacaccatccactttcatgcagagagcttcctctatcggaatggcgagaactaccgggcagatgtggtggatctgttcccagggacttttgaggttgtggagatggtggccagcaaccctgggacatggctgatgcactgccatgtgactgaccatgtccatgctggcatggagaccctcttcactgttttttctcgaacagaacacttaagccctctcaccgtcatcaccaaagagactgaaaaagtgccccccagagacattgaagaaggcaatgtgaagatgctgggcatgcagatccccataaagaatgttgagatgctggcctctgttttggttgccattagtgtcacccttctgctcgttgttctggctcttggtggagtggtttggtaccaacatcgacagagaaagctacgacgcaataggaggtccatcctggatgacagcttcaagcttctgtctttcaaacagtaacatctggagcctggagatatcctcaggaagcacatctgtagtgcactcccagcaggccatggactagtcactaaccccacactcaaaggggcatgggtggtggagaagcagaaggagcaatcaagcttatctggatatttctttctttatttattttacatggaaataatatgatttcactttttctttagtttctttgctctacgtgggcacctggcactaagggagtaccttattatcctacatcgcaaatttcaacagctacattatatttccttctgacacttggaaggtattgaaatttctagaaatgtatccttctcacaaagtagagaccaagagaaaaactcattgattgggtttctacttctttcaaggactcaggaaatttcactttgaactgaggccaagtgagctgttaagataacccacacttaaactaaaggctaagaatataggcttgatgggaaattgaaggtaggctgagtattgggaatccaaattgaattttgattctccttggcagtgaactactttgaagaagtggtcaatgggttgttgctgccatgagcatgtacaacctctggagctagaagctcctcaggaaagccagttctccaagttcttaacctgtggcactgaaaggaatgttgagttacctcttcatgttttagacagcaaaccctatccattaaagtacttgttagaccaaaaaaaaaaaaa

SEQ ID NO: 3470 - DNA, 906 bp, Homo sapiens
ctccacgaggctgccggcttaggacccccagctccgacatgtcgccctctggtcgcctgtgtcttctcaccatcgttggcctgattctccccaccagaggacagacgttgaaagataccacgtccagttcttcagcagactcaactatcatggacattcaggtcccgacacgagccccagatgcagtctacacagaactccagcccacctctccaaccccaacctggcctgctgatgaaacaccacaaccccagacccagacccagcaactggaaggaacggatgggcctctagtgacagatccagagacacacaagagcaccaaagcagctcatcccactgatgacaccacgacgctctctgagagaccatccccaagcacagacgtccagacagacccccagaccctcaagccatctggttttcatgaggatgaccccttcttctatgatgaacacaccctccggaaacgggggctgttggtcgcagctgtgctgttcatcacaggcatcatcatcctcaccagtggcaagtgcaggcagctgtcccggttatgccggaatcgttgcaggtgagtccatcagaaacaggagctgacaacctgctgggcacccgaagaccaagccccctgccagctcaccgtgcccagcctcctgcatcccctcgaagagcctggccagagagggaagacacagatgatgaagctggagccagggctgccggtccgagtctcctacctcccccaaccctgcccgcccctgaaggctacctggcgccttgggggctgtccctcaagttatctcctctgctaagacaaaaagtaaagcactgtggtctttaaaaaaaaaaaaaaaaaaaaaaaaaaaaaaaaaaaaaaaaaaaaaaaaaaaaaaaaaaaaaaaaaaa

SEQ ID NO: 3471 - DNA, 1518 bp, Homo sapiens
ctgcagtcaggactctgggaccgcagggggctcccggaccctgactctgcagccgaaccggcacggtttcgtggggacccaggcttgcaaagtgacggtcattttctctttctttctccctcttgagtccttctgagatgatggctctgggcgcagcgggagctacccgggtctttgtcgcgatggtagcggcggctctcggcggccaccctctgctgggagtgagcgccaccttgaactcggttctcaattccaacgctatcaagaacctgcccccaccgctgggcggcgctgcggggcacccaggctctgcagtcagcgccgcgccgggaatcctgtacccgggcgggaataagtaccagaccattgacaactaccagccgtacccgtgcgcagaggacgaggagtgcggcactgatgagtactgcgctagtcccacccgcggaggggacgcaggcgtgcaaatctgtctcgcctgcaggaagcgccgaaaacgctgcatgcgtcacgctatgtgctgccccgggaattactgcaaaaatggaatatgtgtgtcttctgatcaaaatcatttccgaggagaaattgaggaaaccatcactgaaagctttggtaatgatcatagcaccttggatgggtattccagaagaaccaccttgtcttcaaaaatgtatcacaccaaaggacaagaaggttctgtttgtctccggtcatcagactgtgcctcaggattgtgttgtgctagacacttctggtccaagatctgtaaacctgtcctgaaagaaggtcaagtgtgtaccaagcataggagaaaaggctctcatggactagaaatattccagcgttgttactgtggagaaggtctgtcttgccggatacagaaagatcaccatcaagccagtaattcttctaggcttcacacttgtcagagacactaaaccagctatccaaatgcagtgaactccttttatataatagatgctatgaaaaccttttatgaccttcatcaactcaatcctaaggatatacaagttctgtggtttcagttaagcattccaataacaccttccaaaaacctggagtgtaagagctttgtttctttatggaactcccctgtgattgcagtaaattactgtattgtaaattctcagtgtggcacttacctgtaaatgcaatgaaacttttaattatttttctaaaggtgctgcactgcctatttttcctcttgttatgtaaatttttgtacacattgattgttatcttgactgacaaatattctatattgaactgaagtaaatcatttcagcttatagttcttaaaagcataaccctttaccccatttaattctagagtctagaacgcaaggatctcttggaatgacaaatgataggtacctaaaatgtaacatgaaaatactagcttattttctgaaatgtactatcttaatgcttaaattatatttccctttaggctgtgatagtttttgaaataaaatttaacatttaaaaaaaaaaaaa

SEQ ID NO: 3472 - DNA, 2103 bp, Homo sapiens
ccttcacaggactcttcattgctggttggcaatgatgtatcggccagatgtggtgagggctaggaaaagagtttgttgggaaccctgggttatcggcctcgtcatcttcatatccctgattgtcctggcagtgtgcattggactcactgttcattatgtgagatataatcaaaagaagacctacaattactatagcacattgtcatttacaactgacaaactatatgctgagtttggcagagaggcttctaacaattttacagaaatgagccagagacttgaatcaatggtgaaaaatgcattttataaatctccattaagggaagaatttgtcaagtctcaggttatcaagttcagtcaacagaagcatggagtgttggctcatatgctgttgatttgtagatttcactctactgaggatcctgaaactgtagataaaattgttcaacttgttttacatgaaaagctgcaagatgctgtaggaccccctaaagtagatcctcactcagttaaaattaaaaaaatcaacaagacagaaacagacagctatctaaaccattgctgcggaacacgaagaagtaaaactctaggtcagagtctcaggatcgttggtgggacagaagtagaagagggtgaatggccctggcaggctagcctgcagtgggatgggagtcatcgctgtggagcaaccttaattaatgccacatggcttgtgagtgctgctcactgttttacaacatataagaaccctgccagatggactgcttcctttggagtaacaataaaaccttcgaaaatgaaacggggtctccggagaataattgtccatgaaaaatacaaacacccatcacatgactatgatatttctcttgcagagctttctagccctgttccctacacaaatgcagtacatagagtttgtctccctgatgcatcctatgagtttcaaccaggtgatgtgatgtttgtgacaggatttggagcactgaaaaatgatggttacagtcaaaatcatcttcgacaagcacaggtgactctcatagacgctacaacttgcaatgaacctcaagcttacaatgacgccataactcctagaatgttatgtgctggctccttagaaggaaaaacagatgcatgccagggtgactctggaggaccactggttagttcagatgctagagatatctggtaccttgctggaatagtgagctggggagatgaatgtgcgaaacccaacaagcctggtgtttatactagagttacggccttgcgggactggattacttcaaaaactggtatctaagagacaaaagcctcatggaacagataacatttttttttgttttttgggtgtggaggccatttttagagatacagaattggagaagacttgcaaaacagctagatttgactgatctcaataaactgtttgcttgatgcatgtattttcttcccagctctgttccgcacgtaagcatcctgcttctgccagatcaactctgtcatctgtgagcaatagttgaaactttatgtacatagagaaatagataatacaatattacattacagcctgtattcatttgttctctagaagttttgtcagaattttgacttgttgacataaatttgtaatgcatatatacaatttgaagcactccttttcttcagttcctcagctcctctcatttcagcaaatatccattttcaaggtgcagaacaaggagtgaaagaaaatataagaagaaaaaaatcccctacattttattggcacagaaaagtattaggtgtttttcttagtggaatattagaaatgatcatattcattatgaaaggtcaagcaaagacagcagaataccaatcacttcatcatttaggaagtatgggaactaagttaaggaagtccagaaagaagccaagatatatccttattttcatttccaaacaactactatgataaatgtgaagaagattctgtttttttgtgacctataataattatacaaacttcatgcaatgtacttgttctaagcaaattaaagcaaatatttatttaacattgttactgaggatgtcaacatataacaataaaatataaatcaccca

SEQ ID NO: 3473 - DNA, 2762 bp, Homo sapiens
ggcggcgtcatgtgatccgcttccctgctcctttaagcgtccacaggcggcggagcggccacaatcacagctccgggcattgggggaacccgagccggctgcgccgggggaatccgtgcgggcgccttccgtcccggtcccatcctcgccgcgctccagcacctctgaagttttgcagcgcccagaaaggaggcgaggaaggagggagtgtgtgagaggagggagcaaaaagctcaccctaaaacatttatttcaaggagaaaagaaaaagggggggcgcaaaaatggctggggcaattatagaaaacatgagcaccaagaagctgtgcattgttggtgggattctgctcgtgttccaaatcatcgcctttctggtgggaggcttgattgctccagggcccacaacggcagtgtcctacatgtcggtgaaatgtgtggatgcccgtaagaaccatcacaagacaaaatggttcgtgccttggggacccaatcattgtgacaagatccgagacattgaagaggcaattccaagggaaattgaagccaatgacatcgtgttttctgttcacattcccctcccccacatggagatgagtccttggttccaattcatgctgtttatcctgcagctggacattgccttcaagctaaacaaccaaatcagagaaaatgcagaagtctccatggacgtttccctggcttaccgtgatgacgcatttgctgagtggactgaaatggcccatgaaagagtaccacggaaactcaaatgcaccttcacatctcccaagactccagagcatgagggccgttactatgaatgtgatgtccttcctttcatggaaattgggtctgtggcccataagttttaccttttaaacatccggctgcctgtgaatgagaagaagaaaatcaatgtgggaattggggagataaaggatatccggttggtggggatccaccaaaatggaggcttcaccaaggtgtggtttgccatgaagaccttccttacgcccagcatcttcatcattatggtgtggtattggaggaggatcaccatgatgtcccgacccccagtgcttctggaaaaagtcatctttgcccttgggatttccatgacctttatcaatatcccagtggaatggttttccatcgggtttgactggacctggatgctgctgtttggtgacatccgacagggcatcttctatgcgatgcttctgtccttctggatcatcttctgtggcgagcacatgatggatcagcacgagcggaaccacatcgcagggtattggaagcaagtcggacccattgccgttggctccttctgcctcttcatatttgacatgtgtgagagaggggtacaactcacgaatcccttctacagtatctggactacagacattggaacagagctggccatggccttcatcatcgtggctggaatctgcctctgcctctacttcctgtttctatgcttcatggtatttcaggtgtttcggaacatcagtgggaagcagtccagcctgccagctatgagcaaagtccggcggctacactatgaggggctaatttttaggttcaagttcctcatgcttatcaccttggcctgcgctgccatgactgtcatcttcttcatcgttagtcaggtaacggaaggccattggaaatggggcggcgtcacagtccaagtgaacagtgcctttttcacaggcatctatgggatgtggaatctgtatgtctttgctctgatgttcttgtatgcaccatcccataaaaactatggagaagaccagtccaatggcgatctgggtgtccatagtggggaagaactccagctcaccaccactatcacccatgtggacggacccactgagatctacaagttgacccgcaaggaggcccaggagtaggaggctgcagcgcccggctgggacggtctctccataccccagcccctctaactagagtggggagcatgccagagagagctcaatgtacaaatgaatgcctcatggctcttagctgtggtttcttggaccagcggcatggacatttgtcagtttgccttctgacggtagcttttggaggaagattcctgcagccactaatgcattgtgtatgataacaaaaactctggtatgacacattttctgtgatcattgttaattagtgacatagtaacatctgtagcagctggttagtaaacctcatgtgggggtggggtgggggtgtattccttgggggatggtttgggccgaatggggagtggaatatttgacatttttcctgttttaaattctaggatagattttaacatcctttgcggtcccagtccaaggtaggctggtgtcatagtcttctcactcctaatccatgaccactgtttttttcctatttatatcaccaggtagcctactgagttaatatttaagttgtcaatagataagtgtccctgttttgtggcataatataactgaatttcatgagaagatttattccaccaggggtatttcagctttgaaaccaaatctgtgtatctaatactaaccaatctgttggatgtggattttaaaaaatgtttgctaaactacccaagtaagatttactgtattaaatggccttcgggtctgaaaagcttttttaacctcttgcttaaaatgcgttttattttgataagatacttcaaatagcctccaaaagtgtagatccaatcacttaaataaacctgtatgtatatgcaaaaaaaaaaaaaaaaaaaaaaa

SEQ ID NO: 3474 - DNA, 2095 bp, Homo sapiens
ccgagcacaggagattgcctgcgtttaggaggtggctgcgttgtgggaaaagctatcaaggaagaaattgccaaaccatgtctttttttctgttttcagagtagttcacaacagatctgagtgttttaattaagcatggaatacagaaaacaacaaaaaacttaagctttaatttcatctggaattccacagttttcttagctccctggacccggttgacctgttggctcttcccgctggctgctctatcacgtggtgctctccgactactcaccccgagtgtaaagaaccttcggctcgcgtgcttctgagctgctgtggatggcctcggctctctggactgtccttccgagtaggatgtcactgagatccctcaaatggagcctcctgctgctgtcactcctgagtttctttgtgatgtggtacctcagccttccccactacaatgtgatagaacgcgtgaactggatgtacttctatgagtatgagccgatttacagacaagactttcacttcacacttcgagagcattcaaactgctctcatcaaaatccatttctggtcattctggtgacctcccacccttcagatgtgaaagccaggcaggccattagagttacttggggtgaaaaaaagtcttggtggggatatgaggttcttacatttttcttattaggccaagaggctgaaaaggaagacaaaatgttggcattgtccttagaggatgaacaccttctttatggtgacataatccgacaagattttttagacacatataataacctgaccttgaaaaccattatggcattcaggtgggtaactgagttttgccccaatgccaagtacgtaatgaagacagacactgatgttttcatcaatactggcaatttagtgaagtatcttttaaacctaaaccactcagagaagtttttcacaggttatcctctaattgataattattcctatagaggattttaccaaaaaacccatatttcttaccaggagtatcctttcaaggtgttccctccatactgcagtgggttgggttatataatgtccagagatttggtgccaaggatctatgaaatgatgggtcacgtaaaacccatcaagtttgaagatgtttatgtcgggatctgtttgaatttattaaaagtgaacattcatattccagaagacacaaatcttttctttctatatagaatccatttggatgtctgtcaactgagacgtgtgattgcagcccatggcttttcttccaaggagatcatcactttttggcaggtcatgctaaggaacaccacatgccattattaacttcacattctacaaaaagcctagaaggacaggataccttgtggaaagtgttaaataaagtaggtactgtggaaaattcatggggaggtcagtgtgctggcttacactgaactgaaactcatgaaaaacccagactggagactggagggttacacttgtgatttattagtcaggcccttcaaagatgatatgtggaggaattaaatataaaggaattggaggtttttgctaaagaaattaataggaccaaacaatttggacatgtcattctgtagactagaatttcttaaaagggtgttactgagttataagctcactaggctgtaaaaacaaaacaatgtagagttttatttattgaacaatgtagtcacttgaaggttttgtgtatatcttatgtggattaccaatttaaaaatatatgtagttctgtgtcaaaaaacttcttcactgaagttatactgaacaaaattttacctgtttttggtcatttataaagtacttcaagatgttgcagtatttcacagttattattatttaaaattacttcaactttgtgtttttaaatgttttgacgatttcaatacaagataaaaaggatagtgaatcattctttacatgcaaacattttccagttacttaactgatcagtttattattgatacatcactccattaatgtaaagtcataggtcattattgcatatcagtaatctcttggactttgttaaatattttactgtggtaatatagagaagaattaaagcaagaaaatctgaaaa

SEQ ID NO: 3475 - DNA, 3624 bp, Homo sapiens; identical to SEQ ID NO: 2463

SEQ ID NO: 3476 - DNA, 3665 bp, Homo sapiens
ctcttccgtgcaggcaggctctcctggggacctcagagattctctccagcggcagcagaaaacgggcaatgggtggattcgggtccagattctggcaggagggagtttgggatcgagatctggaaaaaagcactagactggaagaggacgcgatggagtcggagccgctggcggggacaaaaaccagaggccggggaaggcgccggtgggaggcaaggcgcgcatagactttacctgcgcacgcgtcgcagccatctccgcgcacagtggtggccaccgcgactggtgctgaagtgtcggcgcgtgccgggcgctccgctgggacccgggttgctcgccctgagtctcagctttctcatctgtacggttgggacaagtacagtaaccctcgcccgtcaagacgggccaggctgtggcgagggtccacgccttagagcaggcacctatcttgtgcagggccctgagacggggtctgactcagttcctgcggggaacttcaccagtgacccagtcagtgcccttcagttaaagaccaccaggagcacacttatatcatggaaatcaggacagtagcagttgggattgtggcaatcaaaggggtggaaagtgaattctatcttgcaacgaacgaggaaggaaaactctatgcaaagaaggaatacaatgaagattgtaacttcaaagatctaattctggaaaaccattacaacacatatgcagcagctaaatggacaaacaacggaggggaaatgtttgtggccttaaatcaaaaggggattcctgtaagaggaaaaaaaacaaagaaagaacaaaaaacagcccactttcttcctatggcaataacttaattgcatatggtatataaagaaccagttccagcagggagatttctttaagtggactgttttctttcttctcaaaattttctttccttttattttctagtaatcaagaaaggctggaaaactactgaaaaactgatcaagctggacttgtgcatttatgtttgttttaaggcactgcattaaagagacatttgaaaagtatacacaaaaatcagatttagtaactaaaggttgtacaaaattttaaaactggttgtacaatcatgatgttagtaatagtaattttgttcttaaattaatttacccttaagagtatgttagatttgattatctgataatgattatttaaatattcctatctgcttataaaatggctgctataataataataatgcagatgatgttatataaggtatatcagacctacaggctgctggcaggatttgtcagataatcaacccacactaactatggaaaatgagcagcattttaaatgctttctagtgaaaaattataatctacttaaactctaatcagaaaaaaagaatattctcaaaaaaatctattatgaaagtcaataaaatagataatttaacaaaagtacaggattagaacatgcttatacctattaacaagaacaaaatttctaatgctgctcaagtggaaagggtattgctaaaaggatgtttccaaaaatcttgtatataagatagcaacagtgattgatgataatactgtacttcatcttacttgccactaaataacattttataattcctcaaagtaaaattgagaaatctttaagtttttttcaagtaacataatctatctttgtataattcatatttgggaatatggcttttaataatgttcttcccacaaataatcacgcttttttcctatggttactgcattaaactctatattaagttgtttttgaacttattgttttgttatttaagtttatgttatttataaaaaaaaccttaataagctgtatctgtttcatatgcttttaattttaaaggaataacaaaactgtctggctcaactgcaagtttccctcccctttgtgactgacactaagctagcacacagcacttgggccagcaaatcctggaaggcagacaaaaatgagggcctgaagcaatgcttacaatagatgtctcacacagaacaatacaaacatgtaaaaaatctttcaccacatattcttgccaattaattggatcatataagtaaaatcattacaaatataagtatttacaggattttaaagttagaatatatttgaatgcatgggtagaaaagtatcatattttaaaactatgtatatttaaatttagtaattttctaatctctagaaatctctcctgttcaaaagatggcagcactgaaagttgttttcctgttagatggcaagagcacaatgcccaaaatagaagatacagttaggaataaggggccctgaatgttatgaaggtttgaagtcagcctacagataacaggattattacaaagatgaatttccacttccaaagtctgtcattggcagatcttggtagcactttatatgtttaccaatgggaggtcaacatctatctaatttaaaagctatgctaaccattgtggttttaatttcaaaatatttgtcatacaagtccctttacataaatagtatttggtaatacatttatagatgagagttatatgaaaaggctaggtcaccaaaacaatagattcatttaattttcctgtggttgacctatacgaccaggatgtagaaaactagaaagaactgcccttcctcagatatactcttgggagagagcacaaatggtattctgaactatcacctgattcaaggactttgctagctaggttttgaggtcaggcttcagtaactgtagtcttgtgagcatattgagggcagaggaggacttagttttttgtatgtgtttccttagtgcctagcagactatctgttcataatcagttttcagtgtgaattcattgaatgtttatagacaaaagaaaatacataataaaactaatcttcattttaaaagggtaaaacatgactacacagaaatttaaatagaaatagtgtatatacatataaaatacaagctatgttaggaccaaatctctttgtctatggagttatacttccatcaaattacatagcaatgctgaattaggcaaaaccaatatttagtggtaaatccattcctggtagtataagtcacctaaaaaagatttctagaaatatgtactttaattatttgtttttctcctatttttaaatttattatgcaaattttagaaaataaaatttgctctagttacacacacttagaattctagaatcttaaaactgtaaggggcctccatcccttttactcatttgtagtctaggaaatcaagattttgatacacctcaggtcatgcagctgggtagatatacaactgtcacaagagtctagatcagttggcacatgctttctatactagattattagtattattagctaatggtcttctgcattttttggtttttgatttgtattgagatatagcctttacatttctacacaaatgtgactatgtattggcaatgcacttcatacacaatgactaatctatactgtgatgatttgactcaaaaggagaaaagaaattacgtagttttcaattctgattcctattcaccttttgtttatgaatggaaagctttgtgcaaaatatacatataagcagagtaagccttttaaaaaattttctttgaaagataaaatacatgagtttctaacaattaga

SEQ ID NO: 3477 - DNA, 3612 bp, Homo sapiens
tcttccgtgcaggcaggctctcctggggacctcagagattctctccagcggcagcagaaaacgggcaatgggtggattcgggtccagattctggcaggagggagtttgggatcgagatctggaaaaaagcactagactggaagaggacgcgatggagtcggagccgctggcgggtacaaaaaccagaggccggggaaggcgccggtgggaggcacggcacggatggactttacctgcgcacgcgtcgcagccatctccgcgcacagtggtggccaccgcgactggtgctgaagtgtcggcgtgtgccgggcgctccgctgggacccgggttgctcgccctgagtctcagctttctcatctgtacggttgggacaagtacagtaaccctcgcccgtcaagacgggccagggctgtggcgagggtccacgccttagagcaggcacctatcttgtgcagggccctgagatggggtctgactcagttcctgcggggaacttcaccagtgacccagtcagtgcccttcagttaaagaccaccaggagcacacttatatcatggaaatcaggacagtggcagttcggattgtggcaatcaaaggggtggaaagtgaattctatcttgcaatgaacgaggaaggaaaactctatgcaaagaaagaatgcaatgaagattgtaacttcaaagaactaattctggaaaaccattacaacacatatgcagcagctaaatggacacacaatggaggggaaatgtttgttgccttaaatcaaaaggggattcctgtaagaggaaaaaaaacgaagaaagaacaaaaaacagcccactttcttcctatggcaataacttaattgcatatggtatataaagaaccagttccagtagggagatttctttaagtggactgttttctttcttctcaaaattttctttccttttattttttagtaatcaagaaaggctggaaaactactgaaaaactgatcaagcttgacttgtgcatttatgtttgttttaagacactgcattaaagaaagatttgaaaagtatacacaaaaatcagatttagtaactaaaggttgtacaaaattgtaaaactggttgtacaatcatgatgttagtaatagtaatttttttcttaaattaatttacccttaagagtatgttagatttgattatctgataatgattatttaaatattcctatctgcttataaaatggctgctataataataataatgcagatgatgttatataaggtatatcagacctacaggctgctggcaggatttgtcagataatcaagccacactaactatagaaaatgagcagcattttaaatgctttctagtgaaaaattataatctacttaaactctaatcagaaaaaaagaatattctcaaaaaaatctattacgaaagtcaataaaatagataatttaacaaaagtacaggattagaacatgcttatacctattaacaagaacaaaatttctaatgctgctcaagtggaaagggtattgctaaaaggatgtttccaaaaatcttgtatataagatagcaacagtgattgatgataatactgtacttcatcttacttgccacaaaataacattttataatttctcaaagtaaaattgagaaatctttaagtttttttcaagtaacataatctatctttgtataattcgtatttgggaatatggcttttaataatgttcttcccacaaataatcatgcttttttcctatggttacagcattaaactaaaaaccttaataagctgtatctgtttcatatgcttttaattttaaaggaataacaaaactgtctggctcaactgcaagtttccctcccctctgtgaccgagactaagtctagcacacagcacttgggccagcaaatcctggaaggcagacaaaaatgagaacctgaagcaatgcttacagtagatgtctcacacagaacaatacaaacatgtaaaaaatctttcaccacatattcttgccaattaattggatcatataagtaaaatcattacaaatataagtatttacaggatttaaaagttagaatatatttgaatgcataggtagaaaagtatcatattttaaaactatgtatatttaaatttagtaattttctaatctctagaaatctctgctgttcaaaaggtggcagcactgaaagttgttttcctgttagatggcaagagcacaatgcccaaaacagaagatacagttaggaataaggggccttgaatgtcatgaaggcttgaggtcagcttacagataacaggattattaaaaagatgaatttccacttccaaagtctttcattggcagatcttggtagcactttatatgttcaccaatgggaggtcaacatttatctaatttaaaagctatgctaaccattgtggttttaatttcaaaatatttgtcattcaagtccctttacataaatagtatttggtaatacatttatagatgaggcttatatgaaaaggctaggtcaacaaaccaatagattcatttaattttcctgtggttgacctatacgaccaggatgtagaaaactagaaagaactgcccttcctcagatatactcttgggagagagcatgaatggtattctgaactatcacctgattcaaggactttgttagctaggttttgaggtcaggcttcagtaactgtagtcttgtgagcatattgagggcagaggaggacttagtttttcatatgtgtttccttagtgcctagcagactatctgttcataatcagttttcagtgtgaattcactgaatgtttatagacaaaagaaaatacataataaaactaatcttcattttaaaagggtaaaacatgactacacagaaatttaaatagaaatagtgtatatacatataaaatacaagctatgttaggaccaaatctctttgtctatggagttatacttccatcaaattacatagcaatgctgaattaggcaaaaccaatatttagtggtaaatccattcctggtagtataagtcacctaaaaaagacttccagaaatatgtactttaattattagtttttctcctattttaaaatttattatgcaaattttagaaaataaaatttgctccagttacacccacttagaattccagaatcttaaaactgtaaggggcctccatccctcttactcatttgtagtctaggaaatcgagattttgatacacctaaggtcaagcagctgagtagatatacaactgtcacaagagtctagatcagttggcacatgctttctatactagattattagtattattagctaatggtcttctgcatttttttgtttttttatttctattgagatatagcctttacatttgtacacaaatgtgactatgtcttggcaatgcacttcatacacaatgactaatctatactgtgatgatttgactcaaaaggagaaaagaaattatgtagttttcaattctgattcctattcaccttttgtttatgaatggaaagctttgtgcaaaatatacatataagcagagtaagccttttaaaaatgttctttgaaagataaaattaaatacatgagtttctaacaattaga

SEQ ID NO: 3478 - DNA, 2688 bp, Homo sapiens; identical to SEQ ID NO: 620

SEQ ID NO: 3479 - DNA, 2851 bp, Homo sapiens
gcttcacgctaaagccccagagcccgacgcggcagccgcggtagcggagaagactggagctccgaggagctgcatctgcggcaacctgtgtgctgacgctacgtgcctcctggctccgacgtagctcgcagctccccagtctcactccattccttccccacctggcgcgcacctgctcaagaccagggtcctgccaagcgctaggagggcgcgtgccaggggcgctagggaactgcggagcgcgcgcgccatggggccgccgcctggggccggggtctcctgccgcggtggctgcggcttttccagattgctggcatggtgcttcctgctggccctgagtccgcaggcacccggttcccggggggctgaagcagtgtggaccgcgtacctcaacgtgtcctggcgggttccgcacacgggagtgaaccgtacggtgtgggagctgagcgaggagggcgtgtacggccaggactcgccgctggagcctgtggctggggtcctggtaccgcccgacgggcccggggcgcttaacgcctgtaacccgcacacgaatttcacggtgcccacggtttggggaagcaccgtgcaagtctcttggttggccctcatccaacgcggcgggggctgcaccttcgcagacaagatccatctggcttatgagagaggggcgtctggagccgtcatctttaacttccccgggacccgcaatgaggtcatccccatgtctcacccgggtgcagtagacattgttgcaatcatgatcggcaatctgaaaggcacaaaaattctgcaatctattcaaagaggcatacaagtgacaatggtcatagaagtagggaaaaaacatggcccttgggtgaatcactattcaatttttttcgtttctgtgtccttttttattattacggcggcaactgtgggctattttatcttttattctgctcgaaggctacggaatgcaagagctcaaagcaggaagcagaggcaattaaaggcagatgctaaaaaagctattggaaggcttcaactacgcacactgaaacaaggagacaaggaaattggccctgatggagatagttgtgctgtgtgcattgaattgtataaaccaaatgatttggtacgcatcttaacgtgcaaccatattttccataagacatgtgttgacccatggctgttagaacacaggacttgccccatgtgcaaatgtgacatactcaaagctttgggaattgaggtggatgttgaagatggatcagtgtctttacaagtccctgtatccaatgaaatatctaatagtgcctcctcccatgaagaggataatcgcagcgagaccgcatcatctggatatgcttcagtacagggaacagatgaaccgcctctggaggaacacgtgcagtcaacaaatgaaagtctacagctggtaaaccatgaagcaaattctgtggcagtggatgttattcctcatgttgacaacccaacctttgaagaagacgaaactcctaatcaagagactgctgttcgagaaattaaatcttaaaatctgtgtaaatagaaaacttgaaccattagtaataacagaactgccaatcagggcctagtttctattaataaattggataaatttaataaaataagagtgatactgaaagtgctcagatgactaatattatgctatagttaaatggcttaaaatatttaacctgttaacttttttccacaaactcattataatatttttcataggcaagtttcctctcagtagtgataacaacatttttagacattcaaaactgtcttcaagaagtcacgtttttcatttataacaattttcttataaaaacatgttgcttttaaaatgtggagtagctgtaatcactttattttatgatagtatcttaatgaaaaatactacttctttagcttgggctacatgtgtcagggtttttctccaggtgcttatattgatctggaattgtaatgtaaaaagcaatgcaaacttaggcgagtacttcttgaaatgtctatttaagctgctttaagttaatagaaaagattaaagcaaaatattcatttttactttttcttatttttaaaattaggctgaatgtacttcatgtgatttgtcaaccatagtttatcagagattatggacttaattgattggtatattagtgacatcaacttgacacaagattagacaaaaaattccttacaaaaatactgtgtaactatttctcaaacttgtgggatttttcaaaagctcagtatatgaatcatcatactgtttgaaattgctaatgacagagtaagtaacactaatattggtcattgatcttcgttcatgaattagtctacagaaaaaaaatgttctgtaaaattagtctgttgaaaatgttttccaaacaatgttactttgaaaattgagtttatgtttgacctaaatgggctaaaattacattagataaactaaaattctgtccgtgtaactataaattttgtgaatgcattttcctggtgtttgaaaaagaagggggggagaattccaggtgccttaatataaagtttgaagcttcatccaccaaagttaaatagagctatttaaaaatgcactttatttgtactctgtgtggcttttgttttagaattttgttcaaattatagcagaatttaggcaaaaataaaacagacatgtatttttgtttgctgaatggatgaaaccattgcattcttgtacactgatttgaaatgctgtaaatatgtcccaatttgtattgattctctttaaatataaaatgtaaataaaatattccaataaaagtttgtgtctggtgttagtttaaaaaaaaaaaaa

SEQ ID NO: 3480 - DNA, 2453 bp, Homo sapiens
agagcactggggaccgagacccggcaccacctcccggtccgccctccagggaaaacgggaaaactagcaagagctagcaagaactagcaagagcttgaacaaacgcctggactcagattggaagactgctcatttgtctactgcctcattcctggaaattgcactggaactgtctgattaagaaaaacagaataattctgaaagaaagaaaacaaagaaaaacatactccagaattcctaatagaacacttcacctgaacctaaaatggtgagcgagagtcaccatgaggccctggcagccccgcctgtcaccactgtcgcgactgttctgccaagcaatgccacagagccagccagtcctggagaaggaaaggaagatgcattttctaagctgaaggagaagtttatgaatgagttgcataaaattccattgccaccgtgggccttaattgcaatagccatagtcgcagtccttttagtcctgacctgctgcttttgtatctgtaagaaatgtttgttcaaaaagaaaaacaagaagaagggaaaggaaaaaggagggaagaatgccattaacatgaaagatgtaaaagacttagggaagacgatgaaagatcaggccctcaaggatgatgatgctgaaactggattgacagatggagaagaaaaagaagaacccaaagaagaggagaaactgggaaaacttcagtattcactggattatgatttccaaaataaccagctgctggtagggatcattcaggctgccgaactgcccgccttggacatggggggcacatctgatccttacgtgaaagtgtttctgctacctgataagaagaagaaatttgagacaaaagtccaccgaaaaacccttaatcctgtcttcaatgagcaatttactttcaaggtaccatactcggaattgggtggcaaaaccctagtgatggctgtatatgattttgatcgtttctctaagcatgacatcattggagaatttaaagtccctatgaacacagtggattttggccatgtaactgaggaatggcgtgacctgcaaagtgctgagaaggaagagcaagagaaattgggtgatatctgcttctcccttcgctacgtacctactgctggtaagctgactgttgtcattctggaggcaaagaacctgaagaagatggatgtgggtggcttatccgatccttatgtgaagattcatctgatgcagaatggtaagaggctgaagaagaaaaagacaacaattaaaaagaacacacttaacccctactacaatgagtcattcagctttgaagtaccttttgaacaaatccagaaagtgcaggtggtggtaactgttttggactatgacaagattggcaagaacgatgccatcggcaaagtctttgtgggctacaacagcaccggcgcggagctgcgacactggtcagacatgctggccaaccccaggcgacctattgcccagtggcacaccctgcaggtagaggaggaagttgatgccatgctggccgtcaagaagtaaaggaaagaagaagcctttctgcatttgcccatatagtgctctttagccagtatctgtaaatacctcagtaatatgggtcctttcatttttccagccatgcattcctaacacaattcagtggtacttggaatcctgttttaatttgcacaaatttaaatgtagagagcccctaagtccttcatcataccactgccctccaaatctactcttcttttaagcaatatgatgtgtagatagagcatgaatgaaattatttattgtatcacactgttgtatataccagtatgctaaagatttatttctagtttgtgtatttgtatgttgtaagcgtttcctaatctgtgtatatctagatgtttttaataagatgttctattttaaactatgtaaattgactgagatataggagagctgataatatattatacggtaaatatagtatcgtctgcattccagcaaaaatatcaactcgtaaggcactagtacagttaaactgacatcttaaaggacaacttaaacctgagctttctattgaatcatttgagtaccaagataaacttacaccacatacttggtgggtgaatccaattttgtagaattcctacacaggcaaaatagcatgatctgagcagcagcatccaggctgacctcaaggaagcatagccacaaaacagaatagcacctgtctgtacatatttacaaagctaaaataatggcttcactcttatatttgaggaagcaactgaacaggagtcaatgatttcatattactgcatatagaataacaacaaggtgttccgtgtgtgtgtgtgtgtgtgtgtgtgtgtgtgcacatttgtttggggatgggggagaagaagctaaggggagaagtcaacatttatgaaatattgcctgactatttaaaaaaaaaaaaaaa

SEQ ID NO: 3481 - DNA, 3516 bp, Homo sapiens
aagagcccgcggtggcgctgccaggggatgctagcccgagagcgagcagaggagcagcgcacccgcacgagccttggaccctttggaaccgaaagcacgcccgtcctcagagtcccgtcctcaaagtcccatcctcgccatggcacccggagagaagatcaaagccaaaatcaagaagaatctgcccgtgacgggccctcaggcgccgaccattaaagagctgatgcggtggtactgcctcaacaccaacacccatggctgtcgccgcatcgtggtgtcccgcggccgtctgcgccgcctcctctggatcgggttcacactgactgccgtggccctcatcctctggcagtgcgccctcctcgtcttctccttctatactgtctcagtttccatcaaagtccacttccggaagctggattttcctgcagtcaccatctgcaacatcaacccctacaagtacagcaccgttcgccaccttctagctgacttggaacaggagaccagagaggccctgaagtccctgtatggctttccagagtcccggaagcgccgagaggcggagtcctggaactccgtctcagagggaaagcagcctagattctcccaccggattccgctgctgatctttgatcaggatgagaagggcaaggccagggacttcttcacagggaggaagcggaaagtcggcggtagcatcattcacaaggcttcaaatgtcatgcacatcgagtccaagcaagtggtgggattccaactgtgctcaaatgacacctccgactgtgccacctacaccttcagctcgggaatcaatgccattcaggagtggtataagctacactacatgaacatcatggcacaggtgcctctggagaagaaaatcaacatgagctattctgctgaggagctgctggtgacctgcttctttgatggagtgtcctgtgatgccaggaatttcacgcttttccaccacccgatgcatgggaattgctatactttcaacaacagagaaaatgagaccattctcagcacctccatggggggcagcgaatatgggctgcaagtcattttgtacataaacgaagaggaatacaacccattcctcgtgtcctccactggagctaaggtgatcatccatcggcaggatgagtatcccttcgtcgaagatgtgggaacagagattgagacagcaatggtcacctctataggaatgcacctgacagagtccttcaagctgagtgagccctacagtcagtgcacggaggacgggagtgacgtgccaatcaggaacatctacaacgctgcctactcgctccagatctgccttcattcatgcttccagacaaagatggtggagaaatgtgggtgtgcccagtacagccagcctctacctcctgcagccaactactgcaactaccagcagcaccccaactggatgtattgttactaccaactgcatcgagcctttgtccaggaagagctgggctgccagtctgtgtgcaaggaagcctgcagctttaaagagtggacactaaccacaagcctggcacaatggccatctgtggtttcggagaagtggttgctgcctgttctcacttgggaccaaggccggcaagtaaacaaaaagctcaacaagacagacttggccaaactcttgatattctacaaagacctgaaccagagatccatcatggagagcccagccaacagtattgagatgcttctgtccaacttcggtggccagctgggcctgtggatgagctgctctgttgtctgcgtcatcgagatcatcgaggtcttcttcattgacttcttctctatcattgcccgccgccagtggcagaaagccaaggagtggtgggcctggaaacaggctcccccatgtccagaagctccccgtagcccacagggccaggacaatccagccctggatatagacgatgacctacccactttcaactctgctttgcacctgcctccagccctaggaacccaagtgcccggcacaccgccccccaaatacaataccttgcgcttggagagggccttttccaaccagctcacagatacccagatgctggatgagctctgaggcagggttgagaagacagatctagtcaggaccaccagccatggtctaaggacatggatcgggtgcccccagacgtgtgcacaggggaccctctgccccactctgggcttttcagatactctgaccaaaaagcctgctttaaaccgcaagatggggcctgggcatgcgcaggaggagccatcgggtactacgcagcaacactcacaactgtccaggctgagataaatcccgggacctgaactattagcacgtcactagagactgggagccgaggcagtggtgctggcccaagtgaaggccagagtgaggactgatgcagctctctacgggtcttgagagggaaggactcttccaaagccccaaagccgagggtttcacccacactgccagcctgggttggggcccaaggatgtgaccttgagtgtcaaggctggacagctactgccagatgccaaagataggagaaagtgccagccctgaagctggagccgtttgtgaataaactgttcttcatcattgacactggagaaaggtgtcctccatgccctcaggcagcagagaactggcccagggcccttggagtgttggtggagatcagagtgccgtggtggaggtctgggactatgtcagagtgtcctcactttggggcatgggtgggcccaggagatggatttagttattcaattttgtggatgaataaattgaggcacagaaagattaagttaccggcccaaggtgacacagtgaggaggtggcagagctaggatttgaacccagacaatctgactccatgattttgcatccaattcgtgtctgtgccttttaaagggtgaggtctgtgtcactttgggtggggagggggagcatggtgggccatgctctgggcagctgttccaagacagagctgacccttccattaccaatggcctgtccctcaccaacaagccaactgccacagatgacccacttcataccacattcacatctttccacctgaaatggctaacaggtattaaatccttggttggtgtttaaagccaacccaagaacagggtgttaggtactgttttaagcacctagataggttagcataggggactgcaaatggtgttccgcaaagcaaatcctgtttttgaccatgaactaagaattttattttattttattttttattttttgtagaaataggatctcactatgttgcccaggctgttcttgaactcctggcctcaaatgatcttcccacttcagcctcccaaagtgcagggattacaggcacaagccaccgtgcccagccaagaatttttatttttgcttttaaatagcaaaagaagaagattctgtgactcatgaaaatgatatgagattcgaattccagtgtctataaataaagttttattggtacacagcaaaaaaaaaaaaaaaaa

SEQ ID NO: 3482 - DNA, 2124 bp, Homo sapiens
gcccggctgctccatggcgctgtgcgaggccgcgggctgcgggagtgccctgctctggcctcgcttgttgctcttcggggactccatcacccagaaaatgtgatgttctgaatcgtggattttcaggttacaataccaggtgggccaaaattatccttccaagattaatcaggaaaggaaacagtttggacatcccagtagcagttacaattttctttggggccaatgacagtgcactaaaagatgagaatcccaagcagcacattcccctggaggagtacgctgcgaacctaaagagcatggtgcagtacctgaagtccgtggacatccctgagaatcgagtcattctcatcacgccgaccccactttgtgaaacagcctgggaagaacagtgcatcatacaaggttgcaaactaaatcgcctgaactctgttgttggtgaatatgccaatgcgtgtttacaagtggcccaagactgtgggactgacgtacttgacctgtggaccctgatgcaggacagccaggacttctcatcttatttatcagatggactacatttgtctccaaaggggaatgaatttttgttctcgcatctctggcctttgatagagaaaaaggtctcttctctacctttgctgcttccttactggcgggatgtagcagaagcaaaacctgaattaagtctgctgggagatggagacaattagccaatcacaggagacccaaatctgcttgttatctacagaactcaaagttgtcaatacgtagaggtacgcttttttcctcaggcttaaacctttgccactgatattaataataaaagtattagatgatttttcagggaagttttatacttaggtccattgtgtttcgacagtatttattaatgcagatatcagtgctacagctataaaatataccctgagcagcttgttaattctataaatgacaaagactatgtttttaaaaagtcacaattttataaaaatggtttttcttacattcttttgagaactgtttcactcatacatacacccacacaccccactcaaccttgtatcaaattccaaaagtgtaactaaagtataagaatatcatgactagttaaaagatagcaaataccataaggtacaagttcaagtattagtataacaagtatctgagcaacaaatgtccttggaaatggggggtaggaggagatatgattagtcacaggtttggttaactgccctcaaaatttacaagttaaaatgttttggctggtgagcacatttcagttcttagggaaaaaaaagcttttaatggcaatttatagaaatcagaatccaggctaatgatttttatccttcacacagtaaatgcagcccatccagaatcctggagcaataaagtaagaagtaattcaaatatctgcttgtgggtcaataaaaagggtttctgaagtatcaagtcttgtggggacagcccccaaccctaagggcaggtagtattctatctcctggctggctcatcacattcaaaacaacctgtttttttttgttgttgttgttcttgttaagaaatatctcaccctcttattcaatagtgtttgaaaacaggcaatctttgtattttaaatagtctaggtttgtagatagtgaattttttttttttttttttttttttgaggcagagtctcactctgtcacccaggctggagtgtagtggcgcaacctcagcctctccaagtgctgggattacaggcatgagccaccactcccagccaatagtgaattttctaagagcatgtatccctatcagtaacagggatacatgaagatacttataaaatacagaaaaactgcccagcaaatcagggccctaaacagttggtagattccataaattcaactggctaccatgtatagccctcactgtaaggtaggtggttaggtttctagagagcattagtcttagaattatgaagagccatattaacccaaacgatttctaaatttagatatatattttccctgctacataaaaactctgggtaataactagaaatagacccacaatttagagacaatgtatactagatttatctcctttgtttttagttgaaggcataaaaaaaaaaaaaaa

SEQ ID NO: 3483 - DNA, 2959 bp, Homo sapiens
acttgcagcctccttccccccgagcggagctgcggggccggccgggccggggcggaccccgggaacccggacgcggccgcccgggcccgcgggcggggggatcggcgggggggacccgcggggtgaccggcggcaggagccgccaccatggagttccgccaggaggagtttcggaagctagcgggtcgtgctctcgggaagctgcaccgccttctggagaagcggcaggaaggcgcggagacgctggagctgagtgcggatgggcgcccggtgaccacgcagacccgggacccgccggtggtggactgcacctgcttcggcctccctcgccgctacattatcgccatcatgagtggtctgggcttctgcatcagctttggcatccgctgcaacctgggcgtggccatcgtctccatggtcaataacagcacgacccaccgcgggggccacgtggtggtgcagaaagcccagttcagctgggatccagagactgtcggcctcatacacggctcctttttctggggctacattgtcactcagattccaggaggatttatctgtcaaaaatttgcagccaacagagttttcggctttgctattgtggcaacatccactctaaacatgctgatcccctcagctgcccgcgtccactatggctgtgtcatcttcgtgaggatcctgcaggggttggtagagggggtcacataccccgcctgccatgggatctggagcaaatgggccccacccttagaacggagtcgcctggcgacgacagccttttgtggttcctatgctggggcggtggtcgcgatgcccctcgccggggtccttgtgcagtactcaggatggagctctgttttctacgtctacggcagcttcgggatcttctggtacctgttctggctgctcgtctcctacgagtcccccgcgctgcacccaagcatctcggaggaggagcgcaagtacatcgaggacgccatcggagagagcgcgaaactcatgaaccccctcacgaagtttagcactccctggcggcgcttcttcacgtctatgccagtctatgccatcatcgtggccaacttctgccgcagctggacgttctacctgctgctcatctcccagcccgcctacttcgaagaagtgttcggcttcgagatcagcaaggtaggcctggtgtccgcgctgccccacctggtcatgaccatcatcgtgcccatcggcggccagatcgcggacttcctgcggagccgccgcatcatgtccaccaccaacgtgcgcaagttgatgaactgcggaggcttcggcatggaagccacgctgctgttggtggtcggctactcgcactccaagggcgtggccatctccttcctggtcctagccgtgggcttcagcggcttcgccatctctgggttcaacgtgaaccacctggacatagcccggcgctacgccagcatcctcatgggcatctccaacggcgtgggcacactgtcgggcatggtgtgccccatcatcgtgggggccatgactaagcacaagactcgggaggagtggcagtacgtgttcctaattgcctccctggtgcactatggaggtgtcatcttctacggggtctttgcttctggagagaagcagccgtgggcagagcctgaggagatgagcgaggagaagtgtggcttcgttggccatgaccagctggctggcagtgacgacagcgaaatggaggatgaggctgagcccccgggggcaccccctgcacccccgccctcctatggggccacacacagcacatttcagccccccaggcccccaccccctgtccgggactactgaccatgtgcctcccactgaatggcagtttccaggacctccattccactcatctctggcctgagtgacagtgtcaaggaaccctgctcctctctgtcctgcctcaggcctaagaagcactctcccttgttcccagtgctgtcaaatcctctttccttcccaattgcctctcaggggtagtgaagctgcagactgacagtttcaaggatacccaaattcccctaaaggttccctctccacccgttctgcctcagtggtttcaaatctctcctttcagggctttatttgaatggacagttcgacctcttactctctcttgtggttttgaggcacccacaccccccgctttcctttatctccagggactctcaggctaacctttgagatcactcagctcccatctcctttcagaaaaattcaaggtcctcctctagaagtttcaaatctctcccaactctgttctgcatcttccagattggtttaaccaattacttgtccccgccattccagggattgattctcaccagcgtttctgatggaaaatggcggtttcaagtccccgattccgtgcccacttcacatctcccctaccagcagattctgcgaaagcaccaaatttctcaagaccctcttctccctagcttagcataatgtctggggaaacaaccaaaatcgcaattttaacaatatgcctctctacccccgtgcactttttctgacatggttttcaggtctaaatagtggctgctccagtccatgaactcaaaggtttgaagctaccaccattgaactcccccatggtggtttcatgatgccccctccccaattcctcgcactttattctcctgggtggtttcgaactaccctgtttctcagtggccatttgttgtgtccctcaggggcttaatgactcaaaatctgggatccttcccctctcagacacccctctttcagcttagaatttggggaacctatagagaagtcacagaatcccatgaaagggaatggggcaggagacaggggtgttttttcccagtgcagggttgtgtctttgtgtctctgtctctgtgactgtaaatcctgccctgccccactcccaataaaagctttggtgtataggcaaaaaaaaaaa

SEQ ID NO: 3484 - DNA, 3566 bp, Homo sapiens
atagctctgtcggcgccgcggtgtccacctcagtcaggccacggtggaagacgcgtgccgcggcgcctggttgcctgcagcggcccggacccgagaggaagctgaaccatctatctccagaaatgtcttcagaaagtaaagagcaacataacgtttcacccagagactcagctgaaggaaatgacagttatccatctgggatccatctggaacttcaaagggaatcaagtactgacttcaagcaatttgagaccaatgatcaatgcagaccttatcataggatccttattgagcgtcaagagaaatcagatacaaacttcaaggagtttgttattaaaaagctgcagaagaattgccagtgcagtccagccaaagccaaaaatatgattttaggtttccttcctgttttgcagtggctcccaaaatacgacctaaagaaaaacattttaggggatgtgatgtcaggcttgattgtgggcatattattggtgccccagtccattgcttattccctgctggctggccaagaacctgtctatggtctgtacacatctttttttgccagcatcatttattttctcttgggtacctcccgtcacatctctgtgggcatttttggagtactgtgccttatgattggtgagacagttgaccgagaactacagaaagctggctatgacaatgcccatagtgctccttccttaggaatggtttcaaatgggagcacattattaaatcatacatcagacaggatatgtgacaaaagttgctatgcaattatggttggcagcactgtaacctttatagctggagtttatcaggtagcgatgggcttctttcaagtgggttttgtttctgtctacctctcagatgccttgctgagtggatttgtcactggtgcctccttcactattcttacatctcaggccaagtatcttcttgggctcaaccttcctcggactaatggtgtgggctcactcatcactacctggatacatgtcttcagaaacatccataagaccaatctctgtgatcttatcaccagccttttgtgccttttggttcttttgccaaccaaagaactcaatgaacacttcaaatccaagcttaaggcaccgattcctattgaacttgttgttgttgtagcagccacattagcctctcattttggaaaactacatgaaaattataattctagtattgctggacatattcccactgggtttatgccacccaaagtaccagaatggaacctaattcctagtgtggctgtagatgcaatagctatttccatcattggttttgctatcactgtatcactttctgagatgtttgccaagaaacatggttacacagtcaaagcaaaccaggaaatgtatgccattggcttttgtaatatcatcccttccttcttccactgttttactactagtgcagctcttgcaaagacattggttaaagaatcaacaggctgccatactcagctttctggtgtggtaacagccctggttcttttgttggtcctcctagtaatagctcctttgttctattcccttcaaaaaagtgtccttggtgtgatcacaattgtaaatctacggggagcccttcgtaaatttagggatcttcccaaaatgtggagtattagtagaatggatacagttatctggtttgttactatgctgtcctctgcactgctaagtactgaaataggcctacttgttggggtttgtttttctatattttgtgtcatcctccgcactcagaagccaaagagttcactgcttggcttggtggaagagtctgaggtctttgaatctgtgtctgcttacaagaaccttcagactaagccaggcatcaagattttccgctttgtagcccctctctactacataaacaaagaatgctttaaatctgctttatacaaacaaactgtcaacccaatcttaataaaggtggcttggaagaaggcagcaaagagaaagatcaaagaaaaagtagtgactcttggtggaatccaggatgaaatgtcagtgcaactttcccatgatcccttggagctgcatactatagtgattgactgcagtgcaattcaatttttagatacagcagggatccacacactgaaagaagttcgcagagattatgaagccattggaatccaggttctgctggctcagtgcaatcccactgtgagggattccctaaccaacggagaatattgcaaaaaggaagaagaaaaccttctcttctatagtgtgtatgaagcgatggcttttgcagaagtatctaaaaatcagaaaggagtatgtgttcccaatggtctgagtcttagtagtgattaattgagaaggtagatagaagaatgtctagccaataggttgaaatttcaagtgtccaacatttcccagttccacagtgggaaattttgcacacttgaaattttaaccaagtggctagatattattcctcctttgaagctaatggcatttgtatatacacactgcagcagagcttgtagctggacagagtcaaaaagaagaaaatacggtttcaggctttcttgcagatatgaagtattcttggaatgcaataagtatgtattgaactgtactgtaaagtagctccaaaacttaattactctcctgttttaggggttatacatttggactgtgcattctccaagagatgaagcggtgaagttgggatttacattggaagtgctgtagacttctttatgtggctcagtggagagagggaaagaatgttgcacctgctctagtaccataggtcaagaggcttctggatcacaaagtcataactagacaggtttgttcttgtagttttctatccccagtctttgctccccagatggcagtagtttttagtaggaaagtgccattcctgtccttaaggcacagtctcatcagaagtctaatacctgggcaggtttataacatcctgagagccagcctgacattagacagaataccctttgtaatacattggaaatttttactcatgcctttttgtttaggataaataggtaagcacaaagagctcttcaaaatcagaaaaaacaataggagtccttccttgtcttttctgtgatctctgtccttgtttctgagactttctctaccattaagctctattttagctttcagttattctagtttgtttcccatggaatctgtcctaaactggtgtttttgtcagtgacagtcttgccagtcagcaatttctaacagcattttaaatgagtttgatgtacagtaaatattgatgacaatgacagcttttaactcttcaagtcacctaaagctattatgcaggaggatttagaagtcacattcataaaacccaagtgctatgggtgtattattcatgatagctggcccacaggtcatgaattgaggaggaatttgctttcaaaaagcaagaatgtccaacactgaaagtttatagttttatatttggaccttgaaaggtaagaaaaaaccaggttctccaaagttaggaatagggaactaatttatgaaacagccatcttaaaaaaaaaaaaaaaa

SEQ ID NO: 3485 - DNA, 4576 bp, Homo sapiens; identical to SEQ ID NO: 748

SEQ ID NO: 3486 - DNA, 3534 bp, Homo sapiens
cggttctttccggaaattatgactgcagctgttttcactccgctgtgactcagagcgctccgggctgcaggagaggaagcccagcctgttctaccagagaacttgcccaggtcagaggtctgcgtagaagcccttttctgagcatcctctcctctcctcacacctgccactgtcctctgcgttgctgtcgaattaaatcttgcatcaccatggtgcacttctgtggcctactcaccctccaccgggagccagtgccgctgaagagtatctctgtgagcgtgaacatttacgagtttgtggctggtgtgtctgcaactttgaactacgagaatgaggagaaagttcctttggaggccttctttgtgttccccatggatgaagactctgctgtttacagctttgaggccttggtggatgggaagaaaattgtagcagaattacaagacaagatgaaggcccgcaccaactatgagaaagccatctcccagggccaccaggccttcttattggagggggacagcagctccagggatgtcttctcttgcaatgtgggtaacctccaacctgggtcgaaggcggcagtcaccctgaagtatgtgcaggagctgcctctggaagcagatggggctctgcgctttgtgctcccagctgtcctgaatcctagataccagttctctgggtcgtctaaggacagttgccttaatgtgaagactcctatagtccctgtggaggacctgccctacacactcagcatggtcgccaccatagattcccagcatggcattgagaaggtccaatccaactgccccttgagtcctaccgagtacctaggagaggacaagacttctgctcaggtttccctggctgctggacacaagtttgatcgggacgtggaactcctgatttactacaatgaggtgcatacccccagcgtggttttggagatggggatgcctaacatgaagccaggtcatttgatgggagatccatctgcaatggtgagtttctatccaaatatcccagaagatcaaccatcaaatacctgtggagagtttatctttctcatggaccgctcgggaagtatgcagagccccatgagtagccaggatacatctcagctgcgaatacaggcagccaaggaaacactgattttgctgctgaagagtttacctataggctgttatttcaacatctatggatttggctcttcctatgaggcatgctttccggagagtgtgaagtacactcagcaaacaatggaggaggctctggggagagtgaagcttatgcaggccgacctagggggcactgaaatcttggcaccactccagaacatttacaggggaccctccatcccaggccaccccctacagctttttgtctttacagatggagaagttacagacacgtttagtgtaattaaagaagttaggatcaacagacagaaacacaggtgtttctcatttggtattggagaaggcacctccaccagcctaataaaaggtattgcccgggcatcagggggcacctcagaatttatcacaggcaaagacaggatgcagtccaaggctctcaggactctgaaacgctctctgcagcctgtggtagaggatgtctctctgagctggcatttgcctcctggtctgtctgctaaaatgctttccccagaacagactgtcatctttaggggtcagagattaatcagctatgcccagctgaccgggaggatgccagcagcagagacaacaggagaagtatgcctcaaatatacactccagggcaagacttttgaggataaggtgacatttcctctacaacccaagcctgatgtcaacctcaccattcaccgccttgctgccaagtccttgctccagaccaaggacatgggcctcagggagactccagcaagtgataaaaaagatgcattgaaccttagccttgagtctggtgtcataagctccttcacagctttcattgctatcaataaggagctcaacaagccggttcaggggcctctggctcatagggacgtcccaaggccaattctgttgggtgcttctgccccattgaagataaaatgccaatcaggttttcgaaaggccttacactctgaccgtcctccttctgcatctcagcccagaggggaacttatgtgttataaggccaagacattccagatggacgattacagtctctgtgggttgataagtcacaaggaccagcacagtccaggctttggagagaatcaccttgtgcagctgatttaccaccaaaatgcaaatggttcctgggatctgaatgaagatctagccaagatcctaggtatgagtttggaagaaataatggctgcacagcctgccgagcttgtggattcctcaggctgggccaccatcctggccgtgatctggctgcacagcaatggtaaggacttgaagtgtgaatgggagcttctggaaaggaaggccgtggcctggatgcgtgcccatgcaggctccaccatgccttcggttgtgaaagctgctattactttcctgaagtcatctgtggatcctgctatctttgccttttgaagataccatccagaaaaagaagtgcctttaatttgctactgtcatttcctctagtatcacttttgctgtgatgatgtgttcttgtgtattataactctttattttttgccataaaagtaaaggatgcttactccacttcgcttctctgctccaggttcactttggatatgatctttcttttcccaacatatgccctcagaaaagtgacagtggtcccagaacctattccctttcttgagggagttcaaaacattcataggcagtaatgttcctcccagggtttccagggaaacaacatgaaaaacaggtgacatgaactacagactaaagattgcagcatttatgttagagaatgcttgaattagagaattttctgcattatctttgtctgttcactttctatcttatatacttatcagggccatactggtaagcttgcgtaggaggagttagagggaagttgaaagccaacatctggatcaatgtaatgtcaagatcacaaagacagagactgcaggggtccactgtgagaggtgacactgttggggaccttcctgattcattcttcttgggctttgctagcctgtacaacctacatgtcttttcttccactgcctgaaagacttgggttgaactataactgttggagagagatgttcctctttaatcatgaaacaccttaagaagtctataatgcaatccttagtcctaccctgaacctatgtgtcctctaagtcaggccctgatctagtgcagtaaagggaagggtgggcttaatgggagctttgcctgggacctgaacctggagcacttaccgcattaggaagaaaggagctccccgtaatcgttcctgacccttgtgtctcatataccctatcctggtggaaatgaccctatttgatatgctgtcccttaaaataacttgtatcaatattaaaatgactatttctaccctttgatgagt

SEQ ID NO: 3487 - DNA, 1831 bp, Homo sapiens
atcgtcgacccacgcgtccgccagagtaaagcaaagagaaaggaagcaggcccgttggaagtggttgtgacaaccccagcaatgtggagaagcctggggcttgccctggctctctgtctcctcccatcgggaggaacagagagccaggaccaaagctccttatgtaagcaacccccagcctggagcataagagatcaagatccaatgctaaactccaatggttcagtgactgtggttgctcttcttcaagccagctgatacctgtgcatactgcaggcatctaaattagaagacctgcgagtaaaactgaagaaagaaggatattctaatatttcttatattgttgttaatcatcaaggaatctcttctcgattaaaatacacacatcttaagaataaggtttcagagcatattcctgtttatcaacaagaagaaaaccaaacagatgtctggactcttttaaatggaagcaaagatgacttcctcatatatgatagatgtggccgtcttgtatatcatcttggtttgcctttttccttcctaactttcccatatgtagaagaagccattaagattgcttactgtgaaaagaaatgtggaaactgctctctcacgactctcaaagatgaagacttttgtaaacgtgtatctttggctactgtggataaaacagttgaaactccatcgcctcattaccatcatgagcatcatcacaatcatggacatcagcaccttggcagcagtgagctttcagagaatcagcaaccaggagcaccaaatactcctactcatcctgctcctccaggccttcatcaccaccataagcacaagggtcagcataggcagggtcacccagagaaccgagatatgccagcaagtgaagatttacaagatttacaaaagaagctctgtcgaaagagatgtataaatcaattactctgtaaattgcccacagattcagagttggctcctaggagctgatgctgccattgtcgacatctgatatttgaaaaaacagggtctgcaatcacctgacagtgtaaagaaaacctcccatctttatgtagctgacagggacttcgggcagaggagaacataactgaatcttgtcagtgacgtttgcctccagctgcctgacaaataagtcagcagcttatacccacagaagccagtgccagttgacgctgaaagaatcaggcaaaaaagtgagaatgaccttcaaactaaatatttaaaataggacatactccccaatttagtctagacacaatttcatttccagcatttttataaactaccaaattagtgaaccaaaaatagaaatcagatttgtgcaaacatggagaaatctactgaattggcttccagattttaaattttatgtcatagaaatattgactcaaaccatattttttatgatggagcaactgaaaggtgattgcagcttttggttaatatgtctttttttttctttttccagtgttctatttgctttaatgagaatagaaacgtaaactatgacctaggggtttctgttggataattagcagtttagaatggaggaagaacaacaaagacatgctttccatttttttctttacttatctctcaaaacaatattactttgtcttttcaatcttctacttttaactaataaaataagtggattttgtattttaagatccagaaatacttaacacgtgaatattttgctaaaaaagcatatataactattttaaatatccatttatcttttgtatatctaagactcatcctgatttttactatcacacatgaataaagcctttgtatctttaaaaaaaaaaaaaaa

SEQ ID NO: 3488 - DNA, 1150 bp, Homo sapiens; identical to SEQ ID NO: 2414

SEQ ID NO: 3489 - DNA, 3528 bp, Homo sapiens
tcagtagctgaggctgcggttccccgacgccacgcagctgcgcgcagctggttcccgctctgcagcgcaacgcctgaggcagtgggcgcgctcagtcccgggaccaggcgttctctcctctcgcctctgggcctgggaccccgcaaagcggcgatggagcggaggtcgcggaggaagtcgcggcgcaacgggcgctcgaccgcgggcaaggccgccgcgacccagcccgcgaagtctccgggcgcacagctctggctctttcccagcgccgcgggcctccaccgcgcgctgctccggagggtggaggtgacgcgccaactctgctgctcgccggggcgcctcgcggtcttggaacgcggcggggcgggcgtccaggttcaccagctgctcgccgggagcggcggcgcccggacgccgaaatgcattaaattaggaaaaaacatgaagatacattccgtggaccaaggagcagagcacatgctgattctctcatcagatggaaaaccatttgagtatgacaactatagcatgaaacatctaaggtttgaaagcattttacaagaaaaaaaaataattcagatcacatgtggagattaccattctcttgcactctcaaaaggtggtgagctttttgcctggggacagaacctgcatgggcagcttggagttggaaggaaatttccctcaaccaccacaccacagattgtggagcacctcgcaggagtacccttggctcagatttctgccggagaagcccacagcacggccttatccatgtctggcaacatttattcatggggaaaaaatgaatgtggacaactaggcctgggccacactgagagtaaagatgatccatcccttattgaaggactagacaatcagaaagttgaatttgtcgcttgtggtggctctcacagtgccctactcacacaggatgggctgctgtttactttcggtgctggaaaacatgggcaacttggtcataattcaacacagaatgagctaagaccctgtttggtggctgagcttgttgggtatagagtgactcagatagcatgtggaaggtggcacacacttgcctatgtttctgatttgggaaaggtcttttcctttggttctggaaaagatggacaactgggaaatggtggaacacgtgaccagctgatgccgcttccagtgaaagtatcatcaagtgaagaactcaaacttgaaagccatacctcagaaaaggagttaataatgattgctggagggaatcaaagcattttgctctggataaagaaagagaattcatatgttaatctgaagaggacaattcctactctgaatgaagggactgtaaagagatggattgctgatgtggagactaaacggtggcagagcacaaaaagggaaatccaagagatatcttcatctcctgcttgtctaactggaagttttttaaggaaaagaagaactacagaaatgatgcctgtttatttggacttaaataaagcaagaaacatcttcaaggagttaacccaaaaggactggattactaacatgataaccacctgcctcaaagataatctgctcaaaagacttccatttcattctccaccccaagaagctttagaaattttcttccttctcccagaatgtcctgtgatgcatatttccaacaactgggagagccttgtggttccatttacaaaggttgtttgtaaaatgagtgaccagtcttcactggttctggaagagtattgggcaactctgcaagaatccactttcagcaaactggtccagatgtttaaaacagccgtcatatgccagttggattactgggatgaaagtgctgaggagaatggtaatgttcaagctctcctagaaatgttgaagaagctgcacagggtaaaccaggtgaaatgtcaactacctgaaagtattttccaagtagacgaactcttgcaccgtctcaatttttttgtagaagtatgcagaaggtacttgtggaaaatgactgtggacgcttcagaaaatgtacaatgctgcgtcatattcagtcactttccatttatctttaataatctgtcgaaaattaaactactacatacagacacacttttaaaaatagagagtaaaaaacataaagcttatcttaggtcggcagcaattgaggaagaaagagagtctgaattcgctttgaggcccacgtttgatctaacagtcagaaggaatcacttgattgaggatgttttgaatcagctaagtcaatttgagaatgaagacctgaggaaagagttatgggtttcatttagtggagaaattgggtatgacctcggaggagtcaagaaagagttcttctactgtctgtttgcagagatgatccagccggaatatgggatgttcatgtatcctgaaggggcttcctgcatgtggtttcctgtcaagcctaaatttgagaagaaaagatacttcttttttggggttctatgtggactttccctgttcaattgcaatgttgccaacctccctttcccactggcactgtttaagaaacttttggaccaaatgccatcattggaagacttgaaagaactcagtcctgatttgggaaagaatttgcaaacacttctggatgatgaaggtgataactttgaggaagtattttacatccattttaatgtgcactgggacagaaacgacacaaacttaattcctaatggaagtagcataactgtcaaccagactaacaagagagactatgtttctaagtatatcaattacattttcaacgactctgtaaaggcggtttatgaagaatttcggagaggattttataaaatgtgcgacgaagacattatcaaattattccaccccgaagaactgaaggatgtgattgttggaaatacagattatgattggaaaacatttgaaaagaatgcacgttatgaaccaggatataacagttcacatcccaccatagtgatgttttggaaggctttccacaaattgactctggaagaaaagaaaaaattccttgtatttcttacaggaactgacagactacaaatgaaagatttaaataatatgaaaataacattttgctgtcctgaaagttggaatgaaagagaccctataagagcactgacatgtttcagtgtcctcttcctccctaaatattctacaatggaaacagttgaagaagcgcttcaagaagccatcaacaacaacagaggatttggctgaccagcttgcttgtccaacagccttattttgttgttgttatcgttgttgttgttgttgttgttgttgtttctctactttgttttgttttagcttttagcagcctgaagccatggtttttcatttctgtctctagtgataagcaggaaagagggatgaagaagagggtttactggccggttagaacccgtgactgtattctctcccttggatacccctatgcctacatcatattccttacctcttttgggaaatatttttcaaaaataaaataaccgaaaattaaaaaaaaaaaaaaaaaaa

SEQ ID NO: 3490 - DNA, 987 bp, Homo sapiens; identical to SEQ ID NO: 848

SEQ ID NO: 3491 - DNA, 1751 bp, Homo sapiens
cttcctagttcggctggttcttctgtcgccggcttcagcagcccgcgcccgggcaggggcctggagcagtatctagcacaaagtagacactcagtaaatatttggaatagaagatgaacaaacccataacaccatcaacatatgtgcgctgcctcaatgttggactaattaggaagctgtcagattttattgatcctcaagaaggatggaagaagttagctgtagctattaaaaaaccatctggtgatgatagatacaatcagtttcacataagatgatgtagcaagaaggccctaaccagatgcagcctctcgatcttggacttcccagcctccagaaccgagatttgaagcattacttcaaactggaaaaagtcccacttctgaattactgtttgactggggcaccacaaattgcacagttggtgatcttgtggatcttttgatccaaaatgaattttttgctcctgcgagtcttttgctcccagatgctgttcccaaaactgctaatacactaccttctaaagaagctataacagttcagcaaaaacagatgcctttctgtgacaaagacaggacattgatgacacctgtgcagaatcttgaacaaagctatatgccacctgactcctcaagtccagaaaataaaagtttagaagttagtgatacacgttttcacagtttttcattttatgaattgaagaatgtcacaaataactttgatgaacgacccatttctgttggtggtaataaaatgggagagggaggatttggagttgtatataaaggctacgtaaataacacaactgtggcagtgaagaagcttgcagcaatggttgacattactactgaagaactgaaacagcagtttgatcaagaaataaaagtaatggcaaagtgtcaacatgaaaacttagtagaactacttggtttctcaagtgatggagatgacctctgcttagtatatgtttacatgcctaatggttcattgctagacagactctcttgcttggatggtactccaccactttcttggcacatgagatgcaagattgctcagggtgcagctaatggcatcaattttctacatgaaaatcatcatattcatagagatattaaaagtgcaaatatcttactggatgaagcttttactgctaaaatatctgactttggccttgcacgggcttctgagaagtttgcccagacagtcatgactagcagaattgtgggaacaacagcttatatggcaccagaagctttgcgtggagaaataacacccaaatctgatatttacagctttggtgtggttttactagaaataataactggacttccagctgtggatgaacaccgtgaacctcagttattgctagatattaaagaagaaattgaagatgaagaaaagacaattgaagattatattgataaaaagatgaatgatgctgattccacttcagttgaagctatgtactctgttgctagtcaatgtctgcatgaaaagaaaaataagagaccagacattaagaaggttcaacagctgctgcaagagatgacagcttcttaaaactttattgaaaaagactcttgactttttatatacacctatctcaaccatttttttaactgatttttttcctaaatattcttctttacctttaacaaggcataggctgttgcaggacagtggttattaaagcatgggttgaacttccaaaatataaaaatagagccaccatatcaacacttagccct

SEQ ID NO: 3492 - DNA, 3488 bp, Homo sapiens
tgggagcggccggggccacgatggagcgcgacggctgcgcggggggcgggagccgcggcggcgagggcgggcgcgctccccgggagggcccggcggggaacggccgcgatcggggccgcagccacgctgccgaggcgcccggggacccgcaggcggccgcgtccttgctggcccctatggacgtgggggaggagccgctggagaaggcggcgcgcgcccgcactgccaaggaccccaacacctataaagtactctcgctggtattgtcagtatgtgtgttaacaacaatacttggttgtatatttgggttgaaaccaagctgtgccaaagaagttaaaagttgcaaaggtcgctgtttcgagagaacatttgggaactgtcgctgtgatgctgcctgtgttgagcttggaaactgctgtttagattaccaggagacgtgcatagaaccagaacatatatggacttgcaacaaattcaggtgtggtgagaaaaggttgaccagaagcctctgtgcctgttcagatgactgcaaggacaagggcgactgctgcatcaactacagttctgtgtgtcaaggtgagaaaagttgggtagaagaaccatgtgagagcattaatgagccacagtgcccagcagggtttgaaacgcctcctaccctcttattttctttggatggattcagggcagaatatttacacacttggggtggacttcttcctgttattagcaaactaaaaaaatgtggaacatatactaaaaacatgagaccggtatatccaacaaaaactttccccaatcactacagcattgtcaccggattgtatccagaatctcatggcataatcgacaataaaatgtatgatcccaaaatgaatgcttccttttcacttaaaagtaaagagaaatttaatcctgagtggtacaaaggagaaccaatttgggtcacagctaagtatcaaggcctcaagtctggcacatttttctggccaggatcagatgtggaaattaacggaattttcccagacatctataaaatgtataatggttcagtaccatttgaagaaaggattttagctgttcttcagtggctacagcttcctaaagatgaaagaccacacttttacactctgtatttagaagaaccagattcttcaggtcattcatatggaccagtcagcagtgaagtcatcaaagccttgcagagggttgatggtatggttggtatgctgatggatggtctgaaagagctgaacttgcacagatgcctgaacctcatccttatttcagatcatggcatggaacaaggcagttgtaagaaatacatatatctgaataaatatttgggggatgttaaaaatattaaagttatctatggacctgcagctcgattgagaccctctgatgtcccagataaatactattcatttaactatgaaggcattgcccgaaatctttcttgccgggaaccaaaccagcacttcaaaccttacctgaaacatttcttacctaagcgtttgcactttgctaagagtgatagaattgagcccttgacattctatttggaccctcagtggcaacttgcattgaatccctcagaaaggaaatattgtggaagtggatttcatggctctgacaatgtattttcaaatatgcaagccctctttgttggctatggacctggattcaagcatggcattgaggctgacacctttgaaaacattgaagtctataacttaatgtgtgatttactgaatttgacaccggctcctaataacggaactcatggaagtcttaaccaccttctaaagaatcctgtttatacgccaaagcatcccaaagaagtgcaccccctggtacagtgccccttcacaagaaaccccagagataaccttggctgctcatgtaacccttcgattttgccgattgaggattttcaaacacagttcaatctgactgtggcagaagagaagattattaagcatgaaactttaccctatggaagacctagagttctccagaaggaaaacaccatctgtcttctttcccagcaccagtttatgagtggatacagccaagacatcttaatgcccctttggacatcctataccgtggacagaaatgacagtttctctacggaagacttctccaactgtctgtaccaggactttagaattcctcttagtcctgtccataaatgttcattttataaaaataacaccaaagtgagttacgggttcctctccccaccacaactaaataaaaattcaagtggaatatattctgaagctttgcttactacaaatatagtgccaatgtaccagagttttcaagttatatggcgctactttcatgacaccctactgcgaaagtatgctgaagaaagaaatggtgtcaatgtcgtcagtggtcctgtgtttgactttgattatgatggacgttgtgattccttagagaatctgaggcaaaaaagaagagtcatccgtaaccaagaaattttgattccaactcacttctttattgtgctaacaagctgtaaagatacatctcagacgcctttgcactgtgaaaacctagacaccttagctttcattttgcctcacaggactgataacagcgagagctgtgtgcatgggaagcatgactcctcatgggttgaagaattgttaatgttacacagagcacggatcacagatgttgagcacatcactggactcagcttctatcaacaaagaaaagagccagtttcagacattttaaagttgaaaacacatttgccaacctttagccaagaagactgatatgttttttatccccaaacaccatgaatctttttgagagaaccttatattttatatagtcctctagctacactattgcattgttcagaaactgtcgaccagagttagaacggagccctcggtgatgcggacatctcagggaaacttgcgtactcagcacagcagtggagagtgttcctgttgaatcttgcacatatttgaatgtgtaagcattgtatacattgatcaagttcgggggaataaagacagaccacacctaaaactgcctttctgcttctcttaaaggagaagtagctgtgaacattgtctggataccagatatttgaatctttcttactattggtaataaaccttgatggcattgggcaaacagtagacttatagtagggttggggtagcccatgttatgtgactatctttatgagaattttaaagtggttctggatatcttttaacttggagtttcatttcttttcattgtaatcaaaaaaaaaattaacagaagccaaaatacttctgagaccttgtttcaatctttgctgtatatcccctcaaaatccaagttattaatcttatgtgttttctttttaattttttgattggatttctttagatttaatggttcaaatgagttcaactttgagggacgatctttgaatatacttacctattataaaaaaaaaaaaaaaa

SEQ ID NO: 3493 - DNA, 1955 bp, Homo sapiens
ctcggcctcgcgttataaaaagcggtggggcagggccggcgagacaatctgggaggcgggtaccgggcctcacggatccgcgccgcgccccccacctgtggctgcgcgcggggtgggctgcgctcccctgggcggcgccgggcgcccggggctggtggcgagatgggccgctactctggcaagacgtgccggctgctcttcatgctggtgctcaccgtcgccttcttcgtggcggagctggtctccggctacctgggcaactccatcgcgctgctctccgactccttcaacatgttctccgacctgatctcgctgtgcgtgggcctgagcgccggctacatcgcccggcgccccacccggggcttcagcgccacctacggctacgcccgcgccgaggtggtgggcgcgctgagcaacgcggtcttcctcaccgcgctctgcttcaccatcttcgtggaggccgtgctgcgcctggcccggcccgagcgcatcgatgaccccgagctggtgctcatcgtcggcgtcctggggctgttggtcaacgtggtggggctgctcatcttccaggactgcgccgcctggttcgcgtgctgcctccggggacgcagtcgccgcctgcagcagcggcagcagctggcggagggctgtgtccccggcgctttcggggggcctcagggcgcggaggacccgcggcgcgcggcggacccgacagccccaggctcggactcggccgtaaccctccgggggacctcggtggaaaggaagcgggagaagggggcgaccgtgttcgcaaacgtagcaggtgattccttcaacacccagaatgagccagaagacatgatgaaaaaagagaaaaagtctgaagctctgaatatcagaggtgtacttttgcatgtgatgggagatgccctggggtccgtggttgtggtcatcacggccatcatattctatgtgcttcccctgaagagtgaggacccgtgtaactggcagtgttacattgaccccagcctgactgtcctcatggtcatcatcattttgtcatctgccttcccgcttatcaaggagaccgctgccattctgctacagatggtcccaaaaggagtcaacatggaagagctgatgagtaaactctctgctgtgcctggaattagcagtgtacatgaagtgcacatctgggaacttgtaagtggaaagattattgccaccctgcacatcaagtatcctaaggacaggggatatcaagatgccagcacaaaaattcgagaaatcttccaccatgcgggaatccacaatgtgaccatccagtttgaaaatgtggacttgaaggaacccctggagcagaaggacttactgttgctctgcaactcaccctgcatctccaagggctgtgctaagcagctgtgttgtccccccggggcactgcctctggctcacgtcaatggctgtgctgagcacttcctctgtcacgtcaatggctgtgctgagcacaatggtgggccctctctagacacatacggaagtgatggcctcagtagaagagacgcaagagaagtggctattgaagtgtctttggatagctgtctgagtgaccacggacaaagtcttaacaaaactcaggaggaccaatgttatgtcaacagaacgcatttttaatctggtactcacataatcagaccatatagacgaggcactttggaaccacaagcttggctcacaaaaagagctttcctgggttgtaggcccagactagacttgcagcatgcatgctctgtgttcactaggggttggctgtttgggattttagttaaacgtgtctgtgaatttttatgtaactaactcctttccattcccctgggtgtctcatgctgctctttgactgtttcagcttgaacatgcattttctaaagcaaactgcactagtgtatatatcagggtttgaagctcatgggctctct

SEQ ID NO: 3494 - DNA, 1403 bp, Homo sapiens
gaaagaccagcagaggcataaggttcgggaagaggttgttaccgtgggcaactctgtcaacgaaggcttgaaccaacctacggatgactcgtgctttgacccctacacagtttcccattatgccgttggagatgagtgggaacgaatgtctgaatcaggctttaaactgttgtgccagtgcttaggctttggaagtggtcatttcagatgtgattcatctagatggtgccatgacaatggtgtgaactacaagattggagagaagtgggaccgtcagggagaaaatggccagatgatgagctgcacatgtcttgggaacggaaaaggagaattcaagtgtgaccctcatgaggcaacgtgttatgatgatgggaagacataccacgtaggagaacagtggcagaaggaatatctcggtgccatttgctcctgcacatgctttggaggccagcggggctggcgctgtgacaactgccgcagacctgggggtgaacccagtcccgaaggcactactggccagtcctacaaccagtattctcagagataccatcagagaacaaacactaatgttaattgcccaattgagtgcttcatgcctttagatgtacaggctgacagagaagattcccgagagtaaatcatctttccaatccagaggaacaagcatgtctctctgccaagatccatctaaactggagtgatgttagcagacccagcttagagttcttctttctttcttaagccctttgctctggaggaagttctccagcttcagctcaactcacagcttctccaagcatcaccctgggagtttcctgagggttttctcataaatgagggctgcacattgcctgttctgcttcgaagtattcaataccgctcagtattttaaatgaagtgattctaagatttggtttgggatcaataggaaagcatatgcagccaaccaagatgcaaatgttttgaaatgatatgaccaaaattttaagtaggaaagtcacccaaacacttctgctttcacttaagtgtctggcccgcaatactgtaggaacaagcatgatcttgttactgtgatattttaaatatccacagtactcactttttccaaatgatcctagtaattgcctagaaatatctttctcttacctgttatttatcaatttttcccagtatttttatacggaaaaaattgtattgaaaacacttagtatgcagttgataagaggaatttggtataattatggtgggtgattattttttatactgtatgtgccaaagctttactactgtggaaagacaactgttttaataaaagatttacattccacaaaaaaaaaaaaaaaaaaaaaaaaaaaaaaaaaaaaaaaaaaaaaaaaaaaaaaaaaaaaaaaaaaaaaaaaaaa

SEQ ID NO: 3495 - DNA, 2593 bp, Homo sapiens
gcctctggctcctcagggcattcccggcggctccgggtttggcaacgaggacgggggagtgcgactgcgtctcgggcagcatggccgagaagcggcacacacgggactccgaagcccagcggctccccgactccttcaaggacagccccagtaagggccttggaccttgcggatggattttggtggcgttctcattcttattcaccgttataactttcccaatctcaatatggatgtgcataaaggttattgcagccgaaggagaaatgaatgcatccagggctctgaaagaagcctccatggtcatcactgaatctcctgcagcccttcagctccgatacctgcagacactgaccaccattgctgctgagaaaaactcaacaattgtcttccctctgcccatagatatgctgcaaggaatcataggggcaaaacacagccatctaggctagtgtagagatgagcgctagccttccaagcatgaagtcggggaccaaattagcctttaactcataaagagagggtagggcttttctttttccatatgtcaattgtggtgttcccagaatgtatagcagttataaaaataggtgaaagaattgttagcttgtaaatactgagagattggtgatttatataaggtaatctgttagtcttaaaatagttaaaagtttgtatttttagattattatgtagtaggttagatccctcttgttttgacttccactgactcattctgaaccccctaagcacccaggccagaggcaagaacctgggctgtaactgccacctgacaccgctgactggctaaatgctttgcagaaagtgatgaccttacaccacaaccagcttctccaggtcatatgtgccttacctccagagagtctttttttttttttttctgagatggagtttcactcttgttgcccaggctggagtgcaatagcatgatctcggctcactgcaacctccgcctcctgggttcaagagattctcctgcctcagcctccccagtagctgggattacaggctcatgccaccatgcccagctaatttttgtattattattattgttttttagtagagacggggtttcaccatgttggccaggctagtcacgaactcctaacctcaggtgatccacccacctctgcctcccaaagtgctgggattacaggcatgagctaccacacctggtttggagagtcttaattaaggaaatttccctaatgttcatttattttctaaatccagaccgtgtttcagaataatccttacttgagagtagccattttcttgcctgtacttgtcagaactagaggaaatagccaagactaatgaaaaagattactctaacccttaaaagacttttaaattcactactagagtggtcattttaaaaatacatccatgttttaacttatttgagccttctttatgagtaaatgattcctccttgttctgtctttcaaaccagctaaatatttgtcacaaaagtgcttttttctcactgttgcctattttcatatatcaggttttaaatagttttaattttttaataaaattttctctacgttctatatgcaattgttatatatctatttgaatagctgaaggactaaaatacttttttaagagataacttcaggaaaccattatattttactatctgcatgctgttaactgtggtacactgtgaaatatgttgattacaaacccattcattacatagtataaggaattcacagtatattgactatatagtgtctaatgatcttgggcagatactgtcaaacttacaatatctatatagatgtaggtctttttaaatttacctagtcattcttctatcatgtatattgatgctgaaagaggaactggtcagctcctctggacaacaaattcttagtctataatattaggagacatcttctgttttgcaaatgtctgtgaatctgagcaacctggcattctgcttactggccagaaagctggcgggtgacatttgtaacatttcctctttgagactctgagttcacctagagaagtctaagcataacagctttctttcccagcacgagcctttatagctctctttagctcaaccactctgtccatccagccaatggatgtcccttcccctgtaccccaatttcaagcttattttaggaagccttgaactaccatgtatcctggctcctagctgagtttattagaggtatggagcagtgcaacttaaactcaagttgcacttacattttgaattttaaaatgatggttttatctgttgtgtgaagtggttcacccttgaggaccaggagcctccatatcctgactgaaaaccttttctgagacttagagtaacagtgcttttggttccttgagttctcctgtctccagataccaaatgaccttgacttttctgccttgtgaattcgtagtccaatcagctgaaattaaatcacttgggagggacgcatagaaggagctctaggaacacagtgccagtgcagaagtttctccaggtggcctccctttccaacaatgtacataataaagtgtatgcactttcactaaaaaaaaaaaaaaaaaa

SEQ ID NO: 3496 - DNA, 3108 bp, Homo sapiens; identical to SEQ ID NO: 1771

SEQ ID NO: 3497 - DNA, 5480 bp, Homo sapiens; identical to SEQ ID NO: 574

SEQ ID NO: 3498 - DNA, 2649 bp, Homo sapiens
agtttctcctttgttttacgtttgggaggaggtggcattggaaatagcagagtgcttcgcggtaacaggggttggagtgcaatggtgtgatctcagctcactgcaacccctgcctcccaggctccagcgatcctcccacctcagcctcctgaatagctgaccaccagcacactaggcaaacccaccccactcaccgcctcccttgggaattcagacctaaccatcgctgagctgaaacaaatgtactgaggctggagcctgtgtgaacagaacagaagaggccttcactctagtagtgctcacagtccagcaggtgtttgctgaagacagcttactcagatcactactgcctggaggtggttgatatatcctggtgtaaaccttcaagaagggcacaggcaggaaaacatgagccagcaactgaagaaacgggcaaagacaagacaccagaaaggcctgggtggaagagcccccagtggggctaagcccaggcaaggcaagtcaagccaagacctgcaggcggaaatagaacctgtcagcgcggtgtgggccttatgtgatggctatgtgtgctatgagcctggccctcaggctctcggaggggatgatttctcagactgttacatagaatgcgtcataaggggtgagttttctcaacccatcctggaaggggactcactttttgagtccttggaatacctaaagaaaggatcagaacaacagctttctcaaaaggttttcgaagcaagctcccttgaatgttctttggaatacatgaaaaaaggggtaaagaaagagcttccacaaaagatagttggagagaattcgcttgagtattctgagtacatgacaggcaagaagcttccgcctggaggaatacctggcattgacctatcagatcctaaacagctcgcagaatttgctagaaagaagccccccataaataaagaatatgacagtctgagcgcaatcgcttgtcctcagagtggatgcactaggaagttgaggaatagagctgccctgagaaagcatctcctcattcatggtccccgagaccacgtctgtgcggaatgtgggaaagcgttcgttgagagctcaaaactaaagagacatttcctggttcatactggagagaagccgtttcggtgcacttttgaagggtgcggaaagcgcttctctctggactttaatttgcgtacgcacgtgcgcatccacacgggggagaaacgtttcgtgtgtccctttcaaggctgcaacaggaggtttattcagtcaaataacctgaaagcccacatcctaacgcatgcaaatacgaacaagaatgaacaagagggaaagtagtcctccaacaggatgaagcagattaacagaagagtgatcagtgacaaacatgcctcattgattattgtttctaggaaggaatttttaaatcaatattgcaaccccaaaagcggttataatttggtgttactaagatgctcctacactttgtgataccgttttaaggacatggtgcatttttttttcttttatttgttttatttagaactttttttatttgttttatttagaactttgtgtgttcttaaagtgtgcttccaacaggaaggtcagtgataaattgacttcaaaagcataaccttcaatatattatctgttggattattggatataagacttattttcatgtactataaatatgaaaataactttgatttttaattgtgtagtttccatttcttagcttttgccttttaaatttatacttcagccaggcatagtgactgatgcctgtaatcccaacactttgttgggaggccaaagcaggaggatagcttgaggccaggagttccagaccagcctgggcaacatagtgagatcctgtctctacaaaaaaaattgtttttatttgtatttatatatttttatttttgtttttgttggtaggcgtctcgctctgtcacccaggctggagtctagtgtcgtgatcttggctcactgcaacctccacctcccgggttcaagtgattctctggcctcagcctcccaagtagctgggactacaggtgtgtgtcaccacgcccggctaatttttgtatttttagtagagatggggtttcaccatgttggccaggctagtctcaaactcctgacctccagtgatctgcccacctcggcctcccaaagtgctgggattacaggtgtgagccactgtgcctggccccccacaacatgtttaaacttagctaggcctggttgcatacacctgtgttcccagctactcaggaggctgaagcaggaggatagcttgagcccaggagtttgaggctacagtgagctgtgattgcaccactgtactccagactggataacagcaagagcccatcttttaaaaaaagtaaaaattaaaaatatacttcatggttcatgtcatagccctagagaatgaaaaatttgcagtagatagtcaataaatgaatcagtagttaaatattccttaaagtcaactgtatttcattgtgatttttgttttctttttatcattgtatcaaactatatggaaatcatatggttagatgtgattatttgataatgttagtccatttgaatccattttagatatttcacaattaaagaatatgaaacttc

SEQ ID NO: 3499 - DNA, 2716 bp, Homo sapiens
atggcggaggagccggggaggcgggaggcgggaggcgggaggtgttggggccgttgaagcggcctccctcccgcccccagccgcccggtctggccccagccctgtcccgacccccggcctggcccactccgaccctacccggccgaagggttccgctggacacgcaggcggcctccggagcagcccaagcccatgagggccgcgcgcccggccgccggtgctgacgagacggagctcctggcccccgaggaggagcagaggatcaatgcggttcaagaatcgattccagcggttcatgaaccatcgagctccagccaatggccgctacaagccaacttgctatgaacatgctgctaactgttacacacacgcattcctcattgttccggccatcgtgggcagtgccctcctccatcggctgtctgatgactgctgggaaaagataacagcatggatttatggaatgggactctgtgccctcttcatcgtttctacagtatttcacattgtatcatggaaaaagagccacttaaggacagtggagcattgttttcacatgtgtgatagaatggttatctatttcttcattgctgcttcttatgctccatggttaaatcttcgtgaacttggacccctggcatctcatatgcgttggtttatctggctcatggcagctggaggaaccatttatgtatttctctaccatgaaaaatataaggtggttgaactctttttctatctcacaatgggattctctccagccttggtggtgacatcaatgaacaacaccgatggacttcaggaacttgcctgtgggggcttaatttattgcttgggagttgtgttcttcaagagtgatggcatcattccatttgcccacgccatctggcacctgtttgtggccacggcagctgcagtgcattactacgccatttggaaatacctttaccgaagtcctacggactttatgcggcatttatgaccaatctgtactaattctccaaaccagtattatttcaattatggcacttgggagtggggtgagagctaaacattgcacagggaaagaaaaaaaataactgcactgactttatatcttttgaatataattactgtgaaagtataaaggctgtgttctggaattttctgcctcacagcaaataaataaggtagtgaattaattattcattccattccactatcatgaaggactctgaatagacttggccaactgatgtttacaaaccagacttttatattttaattttacagattttactacatgatttttctaaattactatgtcaggttgtaaaagtcagtgcaataacaaaccttcctttttaagaagaaaattgtttctattactttcccattcactaggtaaagaatcatggacagaacttacactactttttaccatgtttcatcttggcataacatggttcttttttaaatagaaactttagttttttgtaaatttttaaaaaaatatttcattgatatgcatctctgcaggtcctcattcatgttgtaaatttttgcagcaagcagtcaacattccacaaacgaacaaacattatacctcttctgatagttttattaagcatggagaaattgccaatttttaaaaactgcagttttccaaacttttctgccaacctcttactctgaattcagtgctgctttgggacatatacttgacctagcttggtttaccagtgatggaaaagtattttgatatcattaactttttcaaaagatccaactttttctctatgcctttgccacattctcttcagggtctctttccacagtggataaatgttttttctgtattatgacagtattgttgtgatggccatctgctggaaactcctgaagagcattatgtattacagtgagcagttgtattgcctgtttggtgcccaatggttaagtcattgtcacttagctttatattgtcagtttgatatttattttaaattgtggaactagatgcataaattcacatttctgcctttcatttgcatcttctcatatattgtgttttttttttttttcctagaaaaaatatttaaagcattgtttgacaggtagaaactcatgtatctgtagtccatgagttatatcctggctcagtggagtgatatttatgtattatttttacttttctctcagtgtcttatattaagattaacatgttgttaatagttgctttgttgattaatctctcttgttggtgttttaataaatgaaataggcttgcctttagatcgggtgctgatattgcctgtttcctagtaatgggctgatcaaatgatcagtggaattcttggtttgatgataaccttattaattgaaattttttactgatgtggctttaaaagaggtttattttgtatatgtttagaactctctgattttgatgaattatatgggagtgagaaacagaagaagtggtatttgctggcgagttaaataggcaaggtacccagtgataacaccaaccaaaccactcctatctgcatgattctgaacatctggatgcctgttgttttactgtgtatattttatttttaatatattaactttgtggattcatttaaggtctactcaaaagtaacactgtccaaaccactaatatgtatgtaaaaattgtgctgtatactacaataaagttgttacttggatttgttccaaaaaaaaaaaaaaa

SEQ ID NO: 3500 - DNA, 1155 bp, Homo sapiens
gccgctgccaccgcaccccgccatggagcggccgtcgctgcgcgccctgctcctcggcgccgctgggctgctgctcctgctcctgcccctctcctcttcctcctcttcggacacctgcggcccctgcgagccggcctcctgcccgcccctgcccccgctgggctgcctgctgggcgagacccgcgacgcgtgcggctgctgccctatgtgcgcccgcggcgagggcgagccgtgcgggggtggcggcgccggcagggggtactgcgcgccgggcatggagtgcgtgaagagccgcaagaggcggaagggtaaagccggggcagcagccggcggtccgggtgtaagcggcgtgtgcgtgtgcaagagccgctacccggtgtgcggcagcgacggcaccacctacccgagcggctgccagctgcgcgccgccagccagagggccgagagccgcggggagaaggccatcacccaggtcagcaagggcacctgcgagcaaggtccttccatagtgacgccccccaaggacatctggaatgtcactggtgcccaggtgtacttgagctgtgaggtcatcggaatcccgacacctgtcctcatctggaacaaggtaaaaaggggtcactatggagttcaaaggacagaactcctgcctggtgaccgggacaacctggccattcagacccggggtggcccagaaaagcatgaagtaactggctgggtgctggtatctcctctaagtaaggaagatgctggagaatatgagtgccatgcatccaattcccaaggacaggcttcagcatcagcaaaaattacagtggttgatgccttacatgaaataccagtgaaaaaaggtgaaggtgccgagctataaacctccagaatattattagtctgcatggttaaaagtagtcatggataactacattacctgttcttgcctaataagtttcttttaatccaatccactaacactttagttatattcactggttttacacagagaaatacaaaataaagatcacacatcaagactatctacaaaaatttattatatatttacagaagaaaagcatgcatatcattaaacaaataaaatactttttatcacaaaaaaaaaaaaaaaaaaaaaaaaaaaaaaaaaaaaaaaaaaaaaaa

SEQ ID NO: 3501 - DNA, 1616 bp, Homo sapiens
ctccctgtgttggtggaggatgtctgcagcagcatttaaattctgggagggcttggttgtcagcagcagcaggaggaggcagagcacagcatcgtcgggaccagactcgtctcaggccagttgcagccttctcagccaaacgccgaccaaggaaaactcactaccatgagaattgcagtgatttgcttttgcctcctaggcatcacctgtgccataccagttaaacaggctgattctggaagttctgaggaaaagcagctttacaacaaatacccagatgctgtggccacatggctaaaccctgacccatctcagaagcagaatctcctagccccacagacccttccaagtaagtccaacgaaagccatgaccacatggatgatatggatgatgaagatgatgatgaccatgtggacagccaggactccattgactcgaacgactctgatgatgtagatgacactgatgattctcaccagtctgatgagtctcaccattctgatgaatctgatgaactggtcactgattttcccacggacctgccagcaaccgaagttttcactccagttgtccccacagtagacacatatgatggccgaggtgatagtgtggtttatggactgaggtcaaaatctaagaagtttcgcagacctgacatccagtaccctgatgctacagacgaggacatcacctcacacatggaaagcgaggagttgaatggtgcatacaaggccatccccgttgcccaggacctgaacgcgccttctgattgggacagccgtgggaaggacagttatgaaacgagtcagctggatgaccagagtgctgaaacccacagccacaagcagtccagattatataagcggaaagccaatgatgagagcaatgagcattccgatgtgattgatagtcaggaactttccaaagtcagccgtgaattccacagccatgaatttcacagccatgaagatatgctggttgtagaccccaaaagtaaggaagaagataaacacctgaaatttcgtatttctcatgaattagatagtgcatcttctgaggtcaattaaaaggagaaaaaatacaatttctcactttgcatttagtcaaaagaaaaaatgctttatagcaaaatgaaagagaacatgaaatgcttctttctcagtttattggttgaatgtgtatctatttgagtctggaaataactaatgtgtttgataattagtttagtttgtggcttcatggaaactccctgtaaactaaaagcttcagggttatgtctatgttcattctatagaagaaatgcaaactatcactgtattttaatatttgttattctctcatgaatagaaatttatgtagaagcaaacaaaatacttttacccacttaaaaagagaatataacattttatgtcactataatcttttgttttttaagttagtgtatattttgttgtgattatctttttgtggtgtgaataaatcttttatcttgaatgtaataagaatttggtggtgtcaattgcttatttgttttcccacggttgtccagcaattaataaaacataaccttttttactgcctaaaaaaaaaaaaaaaaaaaaaaaaaaaaaaaaaa

SEQ ID NO: 3502 - DNA, 1242 bp, Homo sapiens
gaagaggaacaaaattttaaaaagatgattgagtctgagtatagtatgagactccggttgttgaatgaagagtgtgagcagaatctccagagacagcaggaatgcatatctgacttgaacctgagagaaacccttctgaatcaagcgatcaagcttgccaccgagctagaggagatgttccaggaaatgctacagagactgggccgtgtggggagagagaacatggagaaactgaaggagagtgaagccagggcttctgaacaggtccgcagcctcctaaagctcatcgtggagcttgagaaaaagtgtggggaaggcaccttggcattgctcaaggagcaagtcactgctgcttgagcatctggagcccgctcatatcacagacctgagtttatgccacataagaggactcagcagcatgttcagagtactccagactgtttatggagcgagtcacaaacacagagaagatgtttaaaactgaagctatgcacagttacctgggggcagtgaaggagaatatactacttgaaagaagaagtcccaggaccaagccctgaaagatcacaatagttagaggctgggcagaaagagatgagaggaacagtcagagataggaagaagacgtattcatgcaggtgtgaggaattcattgagcctgcgtgttctcagcgacatttaacattggatcctgaaacagctcatccctgcctggcactatctgaggacctgagaactatgagattgagacatgggcagcaggatggggctggcaacccagaaagattggatttcagtgccatggtgctggctgcggagagcttcacctcagggaggcactactgggaggtggacgtggaaaaggcaaccaggtggcaagtgggcatataccacggctctgcagacgcgaagggcagcacggccagagcttccggagagaaagtcttgctcacggggtcggtgatggggaccgagtggactctctgggtcttcccccctctgaaaaggctcttcctggaaaagaagttggacacagttggggttttccttgactgcgaacacgggcagatatcattctacaatgtgaccgagatgtccctcatttacaatttctcccattgcgccttccaaggagctctcaggcctgtgttttccctctgtatcccaaatggagacacaagtccagactccctcaccatcttacaacatggtccttcttgtgatgctactgttagcccttaa

SEQ ID NO: 3503 - DNA, 4057 bp, Homo sapiens
ggtgcgggctgcgagcgggacccgcggagctgcgctgtcctcgacgcctccgccaggcgcgggccgaggagcctccaagagctggcccggcccccggccgccgccgcccaaccccgggcatctgccccgcgccgttgtccccgcggcttcgggccggcgggaccgccccgtcccttccaggggtgacccgggggtcgcgggtgggacggcgcctgcggccgagtctggggggcgccgggtgtcgggtcgggaagcggccgccgcgactcttgcctcccgggcgtcgttgctccacgggcctgcctccacccgcggggacaggtgccccggctggggtctgttgggaagatggcgaccccgggcatgagctggcagcagcactattacggcggctcggcggccaaattcgcgccctcgccggccaccgcacagctggctgggcacagcatggactacagccaggagatgcacctgaaattgagcaagaaaatcgcccagctcaccaaggtaatatatgctttaaacactaaaaatgatgagcatgaatctgcaattcaagccctcaaagatgctcatgaagaagaaattcaacaaattcttgctgaaacaagagaaaaaatattgcagtataaaagcaaagtaacagaggagctagaccttagaagaaagattcaagttttagaatcatcattagaagatcacataaaaatgaagcagcaggctttgacagaatttgaagcttataagcacagagttgaggacatgcaactttgtgcagaagcccagcatgtccaacgcatagtgaccatgtctagagaagtcgaagagattagaaggaaatttgaagaaaaattacggagctttggacaacttcaagtacagtttgaaaaagacaaacgattggcattggaagacttgcaagctgctcacagacaggagatacaagagctattgaagtcacagcaggatcacagtgcctcagtaaataaaggccaggaaaaggcagaggaactacacagaatggaggtggagtccctaaacaaaatgcttgaggagctaagacttgaacggaagaaactaattgaggattatgaaggcaagttgaataaagctcagtccttttatgaacgtgagcttgatactttgaaaaggtcacagctttttacagcagaaagcctacaggccagcaaagaaaaggaagctgatcttagaaaagaatttcagggacaagaagcaattttacgaaaaactataggaaaattaaagacagagttacagatggtacaggatgaagctggaagtcttcttgacaaatgccaaaagcttcagacggcacttgccatagcagagaacaatgttcaggttcttcaaaaacagcttgatgatgccaaggagggagaaatggccctattaagcaagcacaaagaagtggaaagtgagctagcagctgccagagaacgtttacaacagcaagcttcagatcttgtcctcaaagctagtcatattggaatgcttcaagcaactcaaatgacccaggaagttacaattaaagatttagaatcagaaaaatcgagagtcaatgagagattatctcaacttgaagaggaaagagcttttttgcgaagcaaaacccaaagtctggatgaagagcagaagcaacagattctagaactggagaagaaagtaaatgaagcaaagagaactcagcaagaatattatgaaagggaacttaaaaacctgcaaagtagattggaagaggaggtgactcaattaaacgaggcccattctaagactttggaagaattagcttggaagcaccatatggcaattgaagctgtccacagtaatgcaattagggataagaaaaaactgcaaatggatttggaagaacaacataacaaagataaactaaacctggaagaggataaaaatcagcttcaacaagagctagaaaacctaaaggaagtactggaagacaagttgaatacagccaatcaagagattggccacctccaagatatggtaaggaaaagtgaacaaggtcttggctctgcagaaggacttattgctagtcttcaggactcccaggaaaggcttcagaatgagcttgacttgactaaagacagcctaaaggagaccaaggatgctctattaaatgtggagggtgagctagaacaagaaaggcaacagcatgaagaaacaattgctgccatgaaagaagaagagaagctcaaagtggacaaaatggcccatgacttagaaattaagtggactgaaaatcttagacaagagtgttctaaacttcgtgaagagttaaggcttcaacatgaagaggataagaagtcagcaatgtctcaacttttgcagttgaaagatcgagagaaaaatgcagcaagagattcatggcagaagaaagtagaagatctcttaaaccagatttccttgctgaaacagaatctggagatacagctttcccagtctcagacttctttgcaacaactgcaagcccagtttacgcaagaacgacagcggcttacgcaagagcttgaagaattagaggagcaacatcagcaaagacacaaatcattaaaagaagcacatgtccttgcatttcaaactatggaagaggaaaaggaaaaggagcaaagagctcttgaaaatcatttacaacagaagcattctgcagagcttcaatcactaaaagatgcacacagagagtcaatggagggcttccggatagaaatggaacaggaacttcagactcttcggtttgaattagaagatgaaggaaaggctatgcttgcttccttgcgctcagaactcaaccatcaacatgcagctgcaattgatttgttacggcataatcatcatcaagaattggcagctgctaaaatggaattagagagaagcatagacatcagcagaagacagagtaaggagcacatatgtagaattacagatctacaagaggaattaagacacagagagcatcacatctctgaattggataaggaggttcagcaccttcatgagaatataagtgccctaaccaaagaactggaatttaaggggaaagaaattctcagaatacgaagtgaatctaaccaacagataaggttgcatgaacaagatttaaacaagagacttgaaaaagagttggatgtcatgacagcagaccacctcagagagaaaaatatcatgcgggcagattttaataagactaacgagctactcaaggaaataaatgccgctttacaagtgtcattagaagaaatggaagaaaaatatctaatgagagaatcaaaaccagaagatatacagatgattacagaattaaaagccatgcttacagaaagagaccagatcataaagaaactaattgaggataataagttttatcagctggaattagtcaatcgagaaactaacttcaacaaagtgtttaactcaagtcctactgttggtgttattaatccattggctaagcaaaagaagaagaatgataaatcaccaacaaacaggtttgtgagtgttcccaatctaagtgctctggaatctggtggagtgggcaatggacatcctaaccgcctggatcccattcctaattctccagtccacgatattgagttcaacagcagcaaaccacttccacagccagtgccacctaaagggcccaagacatttttgagtcctgctcagagtgaagcttctccagtggcttctccagatccccagcgccaggagtggtttgcccggtacttcacattctgaaagaattgtgttggcacagctctgtatagactgttactaagagcatgactttatacagattgttatgtaaataggctttcctatgtcaaacactgtgaatgagaaagtatttgtctctccaacttgaaaatgcactgtatttcctgtgatatttattggaatcattctataaggtactatattatgtgtgtaattataactgttatttttatttgagatggaagagtctttaacctttgtaattactgcataataaattttgttagaatcaaaaaaaaaaaaaaaa

SEQ ID NO: 3504 - DNA, 3549 bp, Homo sapiens
agttctaacctgctctgcaggaataacggtcctgcctcccgacactcttggcgaggtttttgtacagtttgctccgggagctgtttcttcgcttccacctttttctcccccacacttcgcggcttcttcatgctttttcttctcaccatttctggccaaaactacaaacaagacttcgcagatcgagcctgcgtgctgccgaagcagggcgccgagtccatgcgaactgccatctgatccgctcttatcaatgaagcagccgatcatggcggatggcccccggtgcaagaggcgcaaacaagccaatcccaggaggaaaaacgtggtgaactatgacaatgtagtggacacaggttctgaaacagatgaggaagacaagcttcatattgctgaggatgacggtattgccaaccctctggaccaggagacgagtccagctagtgtgcccaaccatgagtcctccccacacgtgagccaagctctgttgccaagagaggaagaggaagatgaaataagggagggtggagtggaacacccctggcacaacaacgagattctacaggcctctgtagatggtccaggtaagtgtctaaaatcacttgacctcttcctgtaccatcttcacatcttcaactaatctgttccacctagcagatcgcccacaaccaaataattaaaatatttctttccattgagcccttgcagaatagagataccaaagctggtgacagattatgaagtgatagtaatgttatcacattgcggcagttacatcttaggaagggattatatttcagttttgatgcaagtcaaacatgaaccacactttcaacacataacatgaggtatttgcaccacatttacaatgtgcaaattatgtaacatgatcaagatctatactttcatgataggaaatggaagcaaatgtaaaaactcacaacatatatatgtatataaaaatattttgtgtggaaattatgtagcatttcaaaccaaataactgtcagtttaatgtagcttcagtgtctgtctgacacctcctattggaattcaatcgtttaatgattcccttttgttaagtgtgaatgtgatttcacacttttacctggtcaggtagctttcttattatttatcagctaagtacttgataatgattcctgctgtttgatgggactctcaagggaagtaaaaatggtcccaggccaactataataaaactaaggtaaattatattcaaactaaaacttccgacaacactgtgcaaacgggaaatgtcttggtctaaaattcacttatgacggagaatcgctaaggtatgaaatgtttaacaaaatacaagaaatcttattcctgtgaactttctctgctcatctttacatggtaaagtggcctggaaaatttgtttaaatgacctctctaattcagacctcatgtcaccttcatctctattcccaggacccactgagagttatcattgtttaccccaccttgttttttctttgacaacataagcaacaaaagcatttttataaataggtgaagtggctgggaaggagtctacctatatgctgttgtgatgtcgcagactataaaccatcaaacataggcagaataattgtttggtatactggaaggaggataataaaagcacttccactacgaaagaaaattaaatgtgagatgaaagaaaaagaaaaaagactgatggcaatttgagtacagtgtatttgtttttcgttttcctaacatactgtgccaagttttctactctttccgtttccaattttgctttcggtgaaggtttctcgaatctcagcaatcccacacataaacatttatcgttatatccattaagccttaaggttttagattttcaactatgagggagaactcagccaaagatgcttgaaagataaatacgtttaattaggggcagaggatgatcattaaaggaagtctgactgctgcagaagtcattaacaatcttaaatgaaatttttatttttatgatagccatttacatgtataataagagccaatgattcttgggagcagtgtgacagaaacagagtgtggcgagaactcatgtaagacatactatttaaatgagctggtgttagctattcatatttgttaatgaactagatatgcagggctataagaatgaatgttctgatgctttaaattttaatatctagaaatcaagggtaaggaccaattactagaatttccacccttagaagaataattaataacaatgtaacaaatgtacagccccaaacctcttttaaaaaagtttaatttaaaaaatttaatatcaatagttgaaaaacagccaaacagcaatgtcaagctgtagtagtttgtgattgtggcagctttttgtgttggtcatggatcataattctaaacgttttaatatacagtaatccatatgaatgcattgcagaccctgttatcacctgtagttaatggtgcctgtgatacaagtgaacaggctgttctttgctcttacctttatggtaaataaaccagcattctggagtcacaataattaaataaaatgtaaatccctaatctcatttggctatttggaccaagaaacttacccggctattacctgtctagttctaatgattactaatgatttattgttctttttttttattgttctaaaagtgctctgatgtggtgccttgatgtctaatgaaaagaaattggtcttaaaaagctactcattgtttatcctgactctgagataacacatttttcttctgataaaatatttttcttatttattgttcaaaacacacaatatagacaataactctaattctggtgcagttttatttagtagtgttttatccccggtgcctggctgtctacagtcatacctcagcacatagctttactctgagataagccctctctcctttgctctttctcccatgctttctggagtttgtctgcaggatgcaggttttgaactgaagagcgcagtggagttcttactgtgcctttccggttccagcacaatcaaagttttgtgtttggaattgtccttgacattctttcgtcccacaatggggtggacacagtgtgctggaaaccatgacatcattatcattgacacagacttaaataaatcacctgcatcttggcctctttctgcttattcaaggattcttcatcttaaggaagaaagtgctctttatttttacaaatcttcatcccaggggtgactggaagacgcaaacttttacaagtgttttaaaaataaatatactatgtggttttagacacagtatgctgagtcagaggtgtcttagagaatgtttaaggttagacataaggcagaaagacagccagattgcctttaattcggaggcaatattcctaaactgtgtatcattatgtccttctgaatatggattcacttgaaacttaattaaataggcatatacataacatttcaaatacatacctgaaaaggcttagtagtgtttcattttcacacattgagcttgatattcaaaaaaaaaaaaaaaa

SEQ ID NO: 3505 - DNA, 2828 bp, Homo sapiens
ataattcatgattcggggctgggaaaaagaccaacagcctacgtgccaaaaaaggggcagagtttgatggagttgggtggacttttctatgccatttgcctccacacctagaggataagcacttttgcagacattcagtgcaagggagatcatgtttgactgtatggatgttctgtcagtgagtcctgggcaaatcctggatttctacactgcgagtccgtcttcctgcatgctccaggagaaagctctcaaagcatgcttcagtggattgacccaaaccgaatggcagcatcggcacactgctcaatcaattgaaacacagagcaccagctctgaggaactcgtcccaagccccccatctccacttcctccccctcgagtgtacaaaccctgcttcgtctgccaggacaaatcatcagggtaccactatggggtcagcgcctgtgagggatgtaagggctttttccgcagaagtattcagaagaatatgatttacacttgtcaccgagataagaactgtgttattaataaagtcaccaggaatcgatgccaatactgtcgactccagaagtgctttgaagtgggaatgtccaaagaatctgtcaggaatgacaggaacaagaaaaagaaggagacttcgaagcaagaatgcacagagagctatgaaatgacagctgagttggacgatctcacagagaagatccgaaaagctcaccaggaaactttcccttcactctgccagctgggtaaatacaccacgaattccagtgctgaccatcgagtccgactggacctgggcctctgggacaaattcagtgaactggccaccaagtgcattattaagatcgtggagtttgctaaacgtctgcctggtttcactggcttgaccatcgcagaccaaattaccctgctgaaggccgcctgcctggacatcctgattcttagaatttgcaccaggtataccccagaacaagacaccatgactttctcagacggccttaccctaaatcgaactcagatgcacaatgctggatttggtcctctgactgaccttgtgttcacctttgccaaccagctcctgcctttggaaatggatgacacagaaacaggccttctcagtgccatctgcttaatctgtggagaccgccaggaccttgaggaaccgacaaaagtagataagctacaagaaccattgctggaagcactaaaaatttatatcagaaaaagacgacccagcaagcctcacatgtttccaaagatcttaatgaaaatcacagatctccgtagcatcagtgctaaaggtgcagagcgtgtaattaccttgaaaatggaaattcctggatcaatgccacctctcattcaagaaatgctggagaattctgaaggacatgaacccttgaccccaagttcaagtgggaacacagcagagcacagtcctagcatctcacccagctcagtggaaaacagtggggtcagtcagtcaccactcgtgcaataagacattttctagctacttcaaacattccccagtaccttcagttccaggatttaaaatgcaagaaaaaacatttttactgctgcttagtttttggactgaaaagatattaaaactcaagaaggaccaagaagttttcatatgtatcaatatatatactcctcactgtgtaacttacctagaaatacaaacttttccaattttaaaaaatcagccatttcatgcaaccagaaactagttaaaagcttctattttcctctttgaacactcaagattgcatggcaaagacccagtcaaaatgatttacccctggttaagtttctgaagactttgtacatacagaagtatggctctgttctttctatactgtatgtttggtgctttccttttgtcttgcatactcaaaataaccatgacaccaaggttatgaaatagactactgtacacgtctacctaggttcaaaaagataactgtcttgctttcatggaatagtcaagacatcaaggtaaggaaacaggactattgacaggactattgtacagtatgacaagataaggctgaagatattctactttagttagtatggaagcttgtctttgctctttctgatgctctcaaactgcatcttttatttcatgttgcccagtaaaagtatacaaattccctgcactagcagaagagaattctgtatcagtgtaactgccagttcagttaatcaaatgtcatttgttcaattgttaatgtcactttaaattaaaagtggtttattacttgtttaatgacataactacacagttaaaaaaaatttttttacagtaatgatagcctccaaggcagaaacacttttcagtgttaagtttttgtttacttgttcacaagccattagggaaatttcatgggataattagcaggctggtctaccacctggaccatgtaactctagtgtccttcctgattcatgcctgatattgggattttttttttccagccttcttgatgccaaggggctaattaatattaacaactcccaaagaaacaggcatagaatctgcctcctttgaccttgttcaatcactatgaagcagagtgaaagctgtggtagagtggttaacagatacaagtgtcagtttcttagttctcatttaagcactagtggaattttttttttttgatatattagcaagtctgtgatgtactttcactggctctgtttgtacattgagattgtttgtttaacaatgctttctatgttcatatactgtttgtttacctttttccatggagtctcctggcaaagaataaaatatatttattttaaaaaaaaaaaaaaaa

SEQ ID NO: 3506 - DNA, 3055 bp, Homo sapiens
gcgtagtgggcggatcgcgccggcgctgagtaggaaggagcttcagccgccagcccggaacgcatcataggttagcttttcaagacacttcctgcatctctgacctgttgcacctctgttatcttggcacctctgttatcttagcagcaagcacctgcctcagctgacccttgagccataacccataagctcctgaaaagtacatcaagtctaaagtgaaccagctaactcattaagactggaatcatgagcaacaatggagcagacctaacctttggttacatttcctgttttgtagctatccttttgtttggctcaaattttgtgccacttaaaaaatttgatactggtgatggaatgtttctccagtgggttctttgtgctgccatatggttggttgccttggttgtcaatctgatattacattgtccaaagttttggccttttgcaatgcttgggggctgcatttgggcaacagggaacattgctgttgtcccaattatcaaaaccattggtttaggccttggaatcttaatctggggatcatttaatgccttaactggctgggcaagctcaaggtttggctggtttggattggatgcagaagaagtatcaaatccgctgctaaattacattggagctgggctatcagtagtaagtgctttcatatttttgttcatcaaaagtgaaataccaaataacacgtgttccatggataccactccattaataacagagcatgtgatcaacacaacccaagacccctgttcctgggtggataaactttctacagtacaccaccgcatagtgggctgcagtcttgcagtgatatctggagtactctatggatctacatttgtgccaatcatctacatcaaggaccacagcaaaagaaatgatagtatatatgcaggggcaagccaatatgatttagactatgtgtttgcgcacttcagtggcatctttcttacaagtactgtctactttctggcctactgcatagccatgaaaaatagtcctaaactatatcctgaagcagtcctaccaggattcctgtcaggagtactttgggctatagctacctgctgttggttcatagcaaatcactctctgagtgctgtggtcagttttccaataatcactgctggtccgggatttatagctgcaatgtggggtatcttcatgtttaaggaaataaagggtctacaaaactacctattaatgatacttgcattttgcatcatcttgactggagccttatgcactgctttttctaaaatctaacaatgacaaaaccagcaggtggcagcagtagttaagagaacgcgtctatcggacagcggagagatcatgctgagaaaagagtgcattttcatatagcaaatggatctcagccactgttggagtgggtaaatgatttttttccccaaaaatgtgagaatgaaggaagattgagtttcattcaagtataaaaatgaaaatttcttctgatgaactgtttatgaaggtagtactttactgggtgactaaaatgtctacattattatagcattacatacgaggatgctctttttaccacagtatgtacctagtgttgcataatctagaacacagtatagagtccatatacaaagaagttacagtccatatttctcacctattaccccagtgaagtgaggcagaaataccttgggcgaggagggagagccttaccttctaatggaattagattccaaagatatttggatcctttgtttcataaagtaaatgcatagttggtaactaaatgttaaaaaggccattttattattgttagccaaaacttctgtttatttcaagttaatatcgcccaactctacatcatctacccattttagctcataatgcttttgattatcgccagataaagtccattctcagagaacaaaaatttttcatcattgagaaaatgtgcataacataatacatacatacacaagtatattcacgtacataaatacacacagatatgttgctaaagtgagattgtaggttatcagtaacaatttaaaggaaacaaccactcttttgaatgtacaacttttttttctgaaatacacttttctaaaaccctcttaactggaggtttcctgttttcttcttgttttaactggtggtttccagtaggcaaaataaaatgacaggcatgctagttttttttttttttttttttttttaagaaaactgaaattaagccaggcagggtggcgcactactataatcccagctgctggggcggctgaagtaggagggtcacttagcccaagagtgcaaatctaccagcctaggcaacatagcaaggtcccatctctaaaaaagaaatttaatttaaatttgtaagaaaaaagaaaactgaaacagaactgccagtacaatgtttgttgcaattgtttccaaaactttgaaataacgaaaccactattcaaatgtaaattttacccattcccacctgatagtactgtttattactttgctatgcaggagaaacaaaacagctttttatttgtgtgtatactctgaagtcaatgtgcatgggttaaatcccacctctgcttcattttatttgtgtggctttggacaagttcctaagccctctgtgtcaggcccctcattaacaaaatggagtttatgatggcatctacctcacatggttattgtgtggttgaaattagttcaaatctgtaaagtatgttgatgagtatctggtacttggcaaacactatataattgttagctttattattatgtgttgtttgaaggggaaaaaagtttttgtagattggagaacaccatgtaagagctactaagctcaccaccttcccatccaattattactcctctaaatgaatactacttaaaagtgatggagcttctgtttgtttattgaattgctaatacaaataaatatttgactataacttcttatactcattttaattttaacctgaaatgtcattaaattatgctgataaactttgaataaattgtgatacaaaagataaaaaaaaaaaaaaaa

SEQ ID NO: 3507 - DNA, 9669 bp, Homo sapiens
atggtaacaacggtagtggcagtgggtgataccttagctcaaccattagctgcagctgaagtgtttattgtagaaataacacttcaggatatcaatgacaatccaccagtatttccaacggacatgctggatctcacggtagaggagaacattggagatggctctaagattatgcagctgacagccatggatgctgatgagggtgcaaatgctctcgtcacatacactatcattagtggagctgatgatagttttcgcatcgacccagaatccggagatctgatagcaaccaggcggttggacagggaacgccgctccaaatattcactgctagttcgtgctgatgatggtcttcagtcctcggatatgagaattaatatcactgtcagtgatgtgaatgaccatacacccaaattttccagacccgtgtactcttttgacattcctgaggacacaatccctggttctttggtagcagccattttagccacggatgatgactctggtgtgaatggagaaattacatatattgtgaatgaagatgatgaagatggcatctttttcctgaatcctattactggggtctttaatttgactcgattattagattatgaagtacagcaatattatatcctcactgttcgagcagaagatggtgggggacaatttactaccatcagagtttatttcaatattctagatgtaaatgataatccacctattttcagcttgaattcatacagcacatctttaatggagaatctacctgtgggatctactgttcttgtgtttaatgttactgatgcagatgatggcatcaactctcaattgacttatagcattgcttcaggtgatagccttgggcagtttactgttgacaagaatggtgtactcaaagtcctaaaagctttggatcgggaaagtcagtccttctacaacttggttgttcaagtgcatgacctgccacagattccagcctccagattcacaagcactgctcaagtctccattattttgttggatgtaaatgataacccaccgacatttctttcccctaaattgacatacattccagaaaatacacctattgatactgttgttttcaaagctcaagcaactgacccagatagtggcccaaacagctatattgagtacactctgctgaaccctttgggaaacaagttcagtattgggaccattgatggtgaagtgaggctcactggagaactggacagagaagaagtttctaattatactctaacagtggtggctacagacaaaggtcaaccatctctctcttcatctacagaggttgtagttatggtacttgacatcaatgataacaaccccatctttgcacaagctttgtataaagtggagattaatgaaaacacacttactggaacagatataatacaagtgttcgcagcagatggagatgaaggcacaaatggacaggttcgctatggcattgttaatggtaataccaatcaggaatttcggatagactctgtcacaggtgccatcactgtcgctaaacctttggatagagaaaagacccctacctaccatttaactgttcaggcaacagatcgaggcagcacacccagaactgatacctccacggtcagcattgttctactggatattaatgactttgttcctgtatttgagctatctccatattctgtaaatgtccctgagaatttagggacactacccagaacaattcttcaggtggtggcaagagatgatgatcgaggatctaacagcaaactctcatatgttctgtttggtggtaatgaagacaatgcttttactctctcagccagtggagaacttggagtaacacagagtctggatcgggaaacaaaagagcgctttgtcttaatgattacagctacagattcaggatcccctgccttgactggaactggaacaatcaacgtcatagtagatgatgtcaatgacaatgtccccacatttgccagtaaagcgtatttcacaacaattcctgaggatgcaccaactggaacagatgttttattggtaaatgcctcagatgctgatgcttcaaagaatgcagttataaggatcatcggtggaaactctcagttcacgatcaacccatcgacaggacaaatcatcaccagcgcattgttagatagggaaacaaaagataattatactttggtagtggtctgcagtgatgcgggatccccagagcctctttccagttccaccagtgtgcttgtcactgtgactgatgtcaatgacaatccaccaagatttcagcatcacccatatgtcactcacatcccatctcctactcttccaggttcctttgtctttgcggttacagtcacagatgctgatattggaccaaattctgaactgcattattctctttcgggtagaaattctgaaaaatttcacattgacccactgaggggagccattatggccgccggaccactaaacggagcttcagaagtgacattttctgtgcatgtaaaagatggtggctcatttccaaagacagattctacaacagtgactgttagattcgtgaataaggccgatttccctaaagtgagagccaaagaacaaacgttcatgtttcctgaaaaccaaccagtcagctctcttgtcaccaccatcacaggatcctctttaagaggagaacctatgtcatattatatcgcaagtgggaatcttggcaatactttccagattgatcagttaacagggcaggtgtctattagtcaacctctggattttgaaaagatacaaaaatatgttgtatggatagaggccagagacggtggtttccctcctttctcctcttacgagaaacttgatataacagtattagatgtcaatgataatgccccaatttttaaggaagacccatttatatctgaaatattggaaaacctttcccctcgaaaaatacttactgtttcggcaatggacaaggacagtggacccaatggacagttagattatgaaattgttaatggcaacatggaaaatagtttcagtatcaatcatgctactggtgaaattagaagcgttagacctttggacagggaaaaagtatctcattatgtcctaaccataaaatcatcagacaaagggtccccgtctcagagtacttcagtaaaagtcatgattaacattttagatgaaaatgataatgcccctaggttttctcagatatttagtgcccatgttcctgaaaattcccccttaggatacacagttacccgtgtcacaacttctgatgaagacattgggatcaatgcaattagtagatattctataatggatgcaagtcttccatttacaattaatcccagcacaggggatattgtcataagcagacctttaaatagggaagatacagaccgttacagaattcgagtttccgcacatgattctgggtggactgtaagtacagatgtcacaatatttgtgacagacatcaatgacaatgctccaagatttagcagaacttcctattatttagattgccctgaacttactgagattggctccaaagtaactcaggtatttgcaacagatcctgatgagggatcaaatggacaagtgttttatttcataaaatcccaatcagaatatttcaggattaatgccaccactggagagattttcaataaacagatcttaaaataccaaaatgtcactggcttcagtaatgtgaatatcaacaggcatagttttatagtgacatcttcagatcgaggtaaaccttccttaattagtgagacaacagttaccatcaatatagtggacagtaatgacaatgcacctcaatttcttaaaagtaaatatttcactccagtcaccaaaaatgttaaggttggtacgaagttaatcagagttacagcaatagatgacaaagattttggactgaattcagaagtggagtatttcatttctaatgataaccatttaggaaaatttaagttggacaatgatacggggtggatttcagtagcatcctccctgatttctgacttgaaccaaaacttttttatcacagtcactgcaaaggataagggaaaccctccactttcttcccaagcaactgttcacataactgtcactgaggaaaactaccatacacctgaattctctcaaagccacatgagtgcaaccatccctgagagccatagcattgggtccattgtcagaactgtttctgcaagagatagagatgcagcgatgaatggcttgattaagtacagcatttcttcaggaaatgaagaaggcatttttgcaatcaattcttctacaggtatattaacactagccaaagctcttgattatgagctatgccagaaacacgaaatgacgattagtgctatagatggaggatgggttgcaagaactggttactgcagtgtgaccgtaaatgtgattgatgtgaatgataattctccagtattcctctctgatgactatttccctactgttttggaaaatgccccaagtggaacaacagttatccacctaaatgcaacagatgctgactctggaacaaatgctgtgattgcgtatactgtacagtcatctgacagtgacctctttgtcattgaccctaacacaggagtcataaccactcaaggcttcttggattttgaaaccaagcagagctaccatcttactgtgaaagccttcaatgtccccgatgaggaaaggtgtagctttgccactgttaatatacaattaaaagggacaaatgaatatgtgccccgttttgtttccaaactttactattttgaaatctcagaagcagctcctaaaggtactattgttggagaagtgtttgctagcgaccgtgatttgggcactgatggggaggtacactatttgatttttggtaatagtcgaaagaagggtttccagatcaataagaagactggacagatttatgtttctggaattcttgatcgagaaaaagaagaaagggtgtctttgaaggtattggccaagaactttggcagcattagaggtgcagatatagatgaggtcactgtaaatgtcaccgtgcttgatgcaaatgacccacccatttttactctaaacatctacagtgtgcagatcagtgaaggggtcccaataggaactcatgtgacctttgtcagtgcctttgactcagactccatccccagctggagcaggttttcttacttcatcggatcagggaatgaaaatggtgccttttctattaatccgcagacaggacagatcaccgttactgcagaattagatcgagaaacccttcccatctataatctctcagttttggctgttgattcagggaccccctcagctacaggtagtgcctctttattagtcaccctggaagatataaatgataacgggcccatgctgactgtcagtgaaggagaagtcatggaaaacaaacggccaggcactttggtgatgacccttcagtccactgaccctgatctccctccaaatcaaggtccctttacttattacttgctgagcacaggtcctgccaccagttatttcagtctgagcactgctggagttctgagcacaaccagagagattgacagagagcagattgcagacttctatctgtctgtggttaccaaggattctggtgttcctcaaatgtcttccacaggaactgtgcatatcacagttatagaccaaaatgacaatccttcacagtctcggacggtggagatatttgttaattattatggtaacttgtttcccggtgggattttaggctctgtgaagccacaggatccagatgtgttagacagcttccactgctcccttacttcaggagttaccagcctcttcagtattccagggggtacttgtgatctgaattcccagccaaggtccacagatggcacgtttgatctgactgtccttagcaatgatggagttcacagcacagtcacgagcaacatccgagttttctttgctggattttccaatgccacagtggataacagcatcttacttcgtctcggcgtaccaacagtaaaggacttcttgaccaaccactatcttcattttttacgcattgccagctcacagctgacaggcttagggactgctgtgcaactgtacagtgcatatgaagagaacaatagaacgtttcttttggcagctgtgaagcgaaatcataatcagtatgtgaatcccagtggcgtagccaccttctttgaaagcatcaaagagatccttctccggcagagtggagtaaaggtggaatctgtggatcatgactcctgtgtgcatggcccatgtcagaatggagggagctgtctacgaagattggctgtgagctccgtattaaaaagccgtgagagtcttccagtcatcatcgtggcaaatgaacctctgcagcctttcttatgcaagtgtctgccaggatatgcgggtagctggtgtgaaatagatatagatgaatgtcttccatcaccttgccacagtggtggaacctgtcacaatttagtgggaggattttcatgcagctgcccagatggcttcactggtagggcgtgtgagagagatatcaatgagtgcctgcagagtccttgcaagaatggtgccatctgccagaattttccaggaagcttcaactgtgtttgcaaaactggatacacaggtgtctttggaaaacactgcgagttgaacagttatggatttgaggagttatcatacatggaatttccaagcttggaccccaataacaactatatttatgtcaaatttgccacgattaaaagtcatgccttattgctttacaactatgacaaccagacaggcgaccgggctgagtttttggcccttgaaattgccgaagaaagactaagattctcttataatttaggcagtggtacatataagctcaccaccatgaagaaggtgtcagatggacattttcacactgtgattgccaggagagcaggaatggcagcctccttaactgtggactcctgttctgagaaccaagagccaggatattgtactgtcagtaatgtggcagtttcagatgactggactcttgatgttcagccaaatagagttacagttggaggtatcagatctctagaaccaatccttcagagaagaggacacgtggaaagccatgattttgttgggtgtataatggagtttgcagtcaatggaaggcctctggaacccagccaagctttggcagcacaaggcatcctagatcagtatggcgattttatttcttactgttttaaagaaaaaaaatgcaaaaaagtatgcttcactgttactcctgacactgccttatcattagaaggcaaagggcgcttggactaccacatgagtcagaatgagaagcgggaatatttgttaaggcaaagcttacgaggtgccatgttggagccttttggtgtgaacagtctggaagtaaaatttaggaccagaagcgagaatggcgttttaatccatatccaagaaagcagcaattacactactgtgaagattaagaatggcaaagtatattttacatccgatgcaggaattgctgggaaagtggagagaaatattcctgaagtatatgttgcagacggccactggcacacttttctaattgggaaaaatggaacagcaacagtattgtctgttgacagaatatataacagagatattatccaccctactcaggacttcggtggccttgatgtgcttactatatcacttggaggaattccacccaatcaagcacatcgagatgcccaaacagcaggttttgatggctgcattgcttctatgtggtatggtggagaaagtcttcctttcagcgggaagcatagcttggcctccatctcaaaaacagatccctcagtgaagattggctgccgtggcccgaacatttgtgccagcaacccctgctggggtgatttgctgtgcattaatcagtggtatgcctacaggtgtgtccctcctggggactgtgcctcccacccgtgccagaatggtggcagctgtgagccaggcctgcactccggcttcacctgtagctgcccagactcgcacacgggaaggacctgtgagatggtggtggcctgtcttggcgtcctctgtcctcaggggaaggtgtgcaaagctggaagtcctgcggggcatgtctgtgttctgagtcagggccctgaagagatctctctgcctttgtgggctgtgcctgccatcgtgggcagctgcgcaaccgtcttggccctcctggtccttagcctgatcctgtgtaaccagtgcagggggaagaaggccaaaaatcccaaagaggagaagaaaccgaaggagaagaagaaaaagggaagtgagaacgttgcttttgatgaccctgacaatatccctccctatggggatgacatgactgtgaggaagcagcctgaagggaacccaaaaccagatatcattgaaagggaaaacccctaccttatctatgatgaaactgatattcctcacaactcagaaaccatccccagcgcccctttggcatctccagagcaggagatagagcactatgacattgacaacgccagcagcatcgccccttcggatgcagacatcattcaacactacaagcagttccgcagccacacaccaaaattttcaatccagaggcacagtcccctaggctttgcaaggcaatcccccatgcccttaggagcaagcagtttgacttaccagccttcatatggtcaaggtttgagaaccagctccctaagccactcagcatgcccaactcccaaccctctgtctcgacacagtccagcccctttctccaaatcttctacgttctatagaaacagcccagcaagggaattgcatcttcctataagggatggtaatactttggaaatgcatggtgacacctgccaacctggcattttcaactatgccacaaggctgggaaggagaagcaagagtcctcaggccatggcatcacatggttctagaccagggagtcgcctaaagcagccgattgggcagattccactggaatcttctcctccagtcggactttctattgaagaagtggagaggctcaacacacctcgccctagaaacccaagtatctgcagtgcagaccatgggaggtcttcttcagaggaggactgcagaaggccactgtctagaacaaggaatccagcggatggcattccagctccagaatcctcttctgatagtgactcccatgaatctttcacttgctcagaaatggaatatgacagggagaagccaatggtatatacttccagaatgcccaaattatctcaagtcaatgaatctgatgcagatgatgaagataattatggagccagactgaagcctcgaaggtaccacggtcgcagggccgagggaggacctgtgggcacccaggcagcagcaccaggcactgctgacaacacactgcccatgaagctagggcagcaagcagggactttcaactgggacaaccttttgaactggggccctggctttggccattatgtagatgtttttaaagatttggcatctcttccagaaaaagcagcagcaaatgaagaaggcaaagctgggacaactaaaccagtccccaaagatggggaagcagaacagtatgtgtga

SEQ ID NO: 3508 - DNA, 628 bp, Homo sapiens
gctgcaccatgcacgtgaacggcaaagtggcgctggtgaccggcgcggctcagggcataggcagagcctttgcagaggcgctgctgcttaagggcgccaaggtagcgctggtggattggaatcttgaagcaggtgtacagtgtaaagctgccctggatgagcaatttgaacctcagaagactctgttcatccagtgcgatgtggctgaccagcaacaactgagagacacttttagaaaagttgtagaccactttggaagactggacattttggtcaataatgctggagtgaataatgagaaaaactgggaaaaaactctgcaaattaatttggtttctgttatcagtggaacctatcttggtttggattacatgagtaagcaaaatggaggtgaaggcggcatcattatcaatatgtcatctttagcaggactcatgcccgttgcacagcagccggtttattgtgcttcaaagcatggcatagttggattcacacgctcagcagcgttggctgctaatcttatgaacagtggtgtgagactgaatgccatttgtccaggctttgttaacacagccatccttgaatcaaaaaaaaaaaaaaaaaaaaaaaaaaaaaaaaaaaaaaaaaa

SEQ ID NO: 3509 - DNA, 1240 bp, Homo sapiens
gtcctgagcagccaacacaccagcccagacagctgcaagtcaccatggacgctgaaggcctggcgctgctgctgccgcccgtcaccctggcagccctggtggacagctggctccgagaggactgcccagggctcaactacgcagccttggtcagcggggcaggcccctcgcaggcggcgctgtgggccaaatcccctggggtactggcagggcagcctttcttcgatgccatatttacccaactcaactgccaagtctcctggttcctccccgagggatcgaagctggtgccggtggccagagtggccgaggtccggggccctgcccactgcctgctgctgggggaacgggtggccctcaacacgctggcccgctgcagtggcattgccagtgctgccgccgctgcagtggaggccgccaggggggccggctggactgggcacgtggcaggcacgaggaagaccacgccaggcttccggctggtggagaagtatgggctcctggtgggcggggccgcctcgcaccgctacgacctgggagggctggtgatggtgaaggataaccatgtggtggccgccggtggcgtggagaaggcggtgcgggcggccagacaggcggctgacttcgctctgaaggtggaagtggaatgcagcagcctgcaggaggccgtgcaggcagctgaggctggtgccgaccttgtcctgctggacaacttcaagccagaggagctgcaccccacggccaccgtgctgaaggcccagttcccgagtgtggctgtggaagccagtgggggcatcaccctggacaacctcccccagttctgcgggccgcacatagacgtcatctccatggggatgctgacccaggcggccccagcccttgatttctccctcaagctgtttgccaaagaggtggctccagtgcccaaaatccactagtcctaaaccggaagaggatgacaccggccatgggttaacgtggctcctcaggaccctctgggtcacacatctttagggtcagtggccaatggggcacatttggcactagcttgagcccaactctggctctgccacctgctgctcctgtgacctgtcagggctgacttcacctctgctcatctcagtttcctaatctgtaaaatgggtctaataaaggatcaaccacaaaaaaaaaaaaaaaaaaaaaaaaaaaaaaaaaaaaaaaaaaaaaaaaaaaaaaaaaaaaaaaaaaaaaaaaaaaa

SEQ ID NO: 3510 - DNA, 3993 bp, Homo sapiens
ggaattcagtgaagagggcaccctataccatggcagtgcccggcgacgctgcacgagtcagggacaagcccgtccacagtggggtgagtcaagcccccacggcgggccgggactgccaccatcgtgcggaccccgcatcgccgcgggactcgggctgccgtggctgctggggagacctggtgctgcagccgctccggagctctcggaaactttcctccgcgctgtgcgcgggctccctatcctttctgctggcgctgctggtgaggctggtccgcggggaggtcggctgtgacctggagcagtgtaaggaggcggcggcggcggaggaggaggaagcagccccgggagcagaagggggcgtcttcccggggcctcggggaggtgctcccgggggcggtgcgcggctcagcccctggctgcagccctcggcgctgctcttcagtctcctgtgtgccttcttctggatgggcttgtacctcctgcgcgccggggtgcgcctgcctctggctgtcgcgctgctggccgcctgctgcgggggggaagcgctcgtccagattgggctgggcgtcggggaggatcacttactctcactccccgctgcgggggtggtgctcagctgcttggccgccgcgacatggctggtgctgaggctgaggctgggcgtcctcatgatcgccttgactagcgcggtcaggaccgtgtccctcatttccttagagaggttcaaggtcgcctggagaccttacctggcgtacctggccggcgtgctggggatcctcttggccaggtacgtggaacaaatcttgccgcagtccgcggaggcggctccaagggagcatttggggtcccagctgattgctgggaccaaggaagatatcccggtgtttaagaggaggaggcggtccagctccgtcgtgtccgccgagatgtccggctgcagcagcaagtcccatcggaggacctccctgccctgtataccgagggaacagctcatggggcattcagaatgggaccacaaacgagggccaagaggatcacagtcttcaggaaccagtattactgtggacatcgccgtcatgggcgaagcccacggcctcattaccgacctcctggcagacccttctcttccaccaaacgtgtgcacatccttgagagccgtgagcaacttgctcagcacacagctcaccttccaggccattcacaagcccagagtgaatcccgttacttcgctcagtgaaaactatacctgttctgactctgaagagagctctgaaaaagacaagcttgctattccaaagcgcctgagaaggagtttgcctcctggcttgttgagacgagtttcttccacttggaccaccaccacctcggccacaggtctacccaccttggagcctgcaccagtacggagagaccgcagcaccagcatcaaactgcaggaagcaccttcatccagtcctgattcttggaataatccagtgatgatgaccctcaccaaaagcagatcctttacttcatcctatgctatttctgcagctaaccatgtaaaggctaaaaagcaaagtcgaccaggtgccctcgctaaaatttcacctctttcatcgccctgctcctcacctctccaagggactcctgccagcagcctggtcagcaaaatttctgcagtgcagtttccagaatctgctgacacaactgccaaacaaagcctaggttctcacagggccttaacttacactcagagtgccccagacctatcccctcaaatcctgactccacctgttatatgtagcagctgtggcagaccatattcccaagggaatcctgctgatgagcccctggagagaagtggggtagccactcggacaccaagtcgaacagatgacactgctcaagttacctctgattatgaaaccaataacaacagtgacagcagtgacattgtacagaatgaagatgaaacagagtgcctgagagagcctctgaggaaagcatcggcttgcagcacctatgctcctgagaccatgatgtttctggacaaaccaattcttgctcccgaacctcttgtcatggataacctggactcaattatggagcagctaaatacttggaattttccaatttttgatttagtggaaaatataggaagaaaatgtggccgtattcttagtcaggtatcttacagactttttgaagacatgggcctctttgaagcttttaaaattccaattagggaatttatgaattattttcatgctttggagattggatatagggatattccttatcataacagaatccatgccactgatgttttacatgctgtttggtatcttactacacagcctattccaggcctctcaactgtgattaatgatcatggttcaaccagtgattcagattctgacagtggatttacacatggacatatgggatatgtattctcaaaaacgtataatgtgacagatgataaatacggatgtctgtctgggaatatccctgccttggagttgatggcgctgtatgtggctgcagccatgcacgattatgatcatccaggaaggactaatgctttcctggttgcaactagtgctcctcaggcggtgctatataacgatcgttcagttttggagaatcatcacgcagctgctgcatggaatcttttcatgtcccggccagagtataacttcttaattaaccttgaccatgtggaatttaagcatttccgtttccttgtcattgaagcaattttggccactgacctgaagaaacactttgacttcgtagccaaatttaatggcaaggtaaatgatgatgttggaatagattggaccaatgaaaatgatcgtctactggtttgtcaaatgtgtataaagttggctgatatcaatggtccagctaaatgtaaagaactccatcttcagtggacagatggtattgtcaatgaattttatgaacagggtgatgaagaggccagccttggattacccataagccccttcatggatcgttctgctcctcagctggccaaccttcaggaatccttcatctctcacattgtggggcctctgtgcaactcctatgattcagcaggactaatgcctggaaaatgggtggaagacagcgatgagtcaggagatactgatgacccagaagaagaggaggaagaagcaccagcaccaaatgaagaggaaacctgtgaaaataatgaatctccaaaaaagaagactttcaaaaggagaaaaatctactgccaaataactcagcacctcttacagaaccacaagatgtggaagaaagtcattgaagaggagcaacggttggcaggcatagaaaatcaatccctggaccagacccctcagtcgcactcttcagaacagatccaggctatcaaggaagaagaagaagagaaagggaaaccaagaggcgaggagataccaacccaaaagccagaccagtgacaatggatagaatgggctgtgtttccaaacagattgacttgtcaaagactctcttcaagccagcacaagcatttagatcacaacactgtagaaatttgagatgggcaaatggctattgcattttgggattcttcgcattttgtgtgtatatttttacagtgaggtacattgttaaaaactttttgctcaaagaagctttcacattgcaacaccagcttctaaggattttttaaggagggaatatatatgtgtgtgtgtatataagctcccacatagatacatgtaaaacatattcacacccatgcacgcacacacatacacactgaaggccacgattgctggctccacaatttagtaacatttatattaagatatatatatagtggtcactgtgatataataaatcataaaggaaaccaaatcacaaaggagatggtgtggcttagcaaggaaacagtgcaggaaatgtaggttaccaactaagcagcttttgctcttagtactgagggatgaaagttccagagcattatttgaattc

SEQ ID NO: 3511 - DNA, 1994 bp, Homo sapiens; identical to SEQ ID NO: 552

SEQ ID NO: 3512 - DNA, 4293 bp, Homo sapiens; identical to SEQ ID NO: 2343

SEQ ID NO: 3513 - DNA, 4510 bp, Homo sapiens; identical to SEQ ID NO: 1452

SEQ ID NO: 3514 - DNA, 3150 bp, Homo sapiens
aggggaacaagctggaggagcaggaccctagacctctgcagcccataccaggtctcatggaggggaacaagctggaggagcaggactctagccctccacagtccactccagggctcatgaaggggaacaagcgtgaggagcaggggctgggccccgaacctgcggcgccccagcagcccacggcggaggaggaggccctgatcgagttccaccgctcctaccgagagctcttcgagttcttctgcaacaacaccaccatccacggcgccatccgcctggtgtgctcccagcacaaccgcatgaagacggccttctgggcagtgctgtggctctgcacctttggcatgatgtactggcaattcggcctgcttttcggagagtacttcagctaccccgtcagcctcaacatcaacctcaactcggacaagctcgtcttccccgcagtgaccatctgcaccctcaatccctacaggtacccggaaattaaagaggagctggaggagctggaccgcatcacagagcagacgctctttgacctgtacaaatacagctccttcaccactctcgtggccggctcccgcagccgtcgcgacctgcgggggactctgccgcaccccttgcagcgcctgagggtcccgcccccgcctcacggggcccgtcgagcccgtagcgtggcctccagcttgcgggacaacaacccccaggtggactggaaggactggaagatcggcttccagctgtgcaaccagaacaaatcggactgcttctaccagacatactcatcaggggtggatgcggtgagggagtggtaccgcttccactacatcaacatcctgtcgaggctgccagagactctgccatccctggaggaggacacgctgggcaacttcatcttcgcctgccgcttcaaccaggtctcctgcaaccaggcgaattactctcacttccaccacccgatgtatggaaactgctatactttcaatgacaagaacaactccaacctctggatgtcttccatgcctggaatcaacaacggtctgtccctgatgctgcgcgcagagcagaatgacttcattcccctgctgtccacagtgactggggcccgggtaatggtgcacgggcaggatgaacctgcctttatggatgatggtggctttaacttgcggcctggcgtggagacctccatcagcatgaggaaggaaaccctggacagacttgggggcgattatggcgactgcaccaagaatggcagtgatgttcctgttgagaacctttacccttcaaagtacacacagcaggtgtgtattcactcctgcttccaggagagcatgatcaaggagtgtggctgtgcctacatcttctatccgcggccccagaacgtggagtactgtgactacagaaagcacagttcctgggggtactgctactataagctccaggttgacttctcctcagaccacctgggctgtttcaccaagtgccggaagccatgcagcgtgaccagctaccagctctctgctggttactcacgatggccctcggtgacatcccaggaatgggtcttccagatgctatcgcgacagaacaattacaccgtcaacaacaagagaaatggagtggccaaagtcaacatcttcttcaaggagctgaactacaaaaccaattctgagtctccctctgtcacgatggtcaccctcctgtccaacctgggcagccagtggagcctgtggttcggctcctcggtgttgtctgtggtggagatggctgagctcgtctttgacctgctggtcatcatgttcctcatgctgctccgaaggttccgaagccgatactggtctccaggccgagggggcaggggtgctcaggaggtagcctccaccctggcatcctcccctccttcccacttctgcccccaccccatgtctctgtccttgtcccagccaggccctgctccctctccagccttgacagcccctccccctgcctatgccaccctgggcccccgcccatctccagggggctctgcaggggccagttcctccgcctgtcctctgggggggccctgagagggaaggagaggtttctcacaccaaggcagatgctcctctggtgggagggtgctggccctggcaagattgaaggatgtgcagggcttcctctcagagccgcccaaactgccgttgatgtgtggaggggaagcaagatgggtaagggctcaggaagttgctccaagaacagtagctgatgaagctgcccagaagtgccttggctccagccctgtaccccttggtactgcctctgaacactctggtttccccacccaactgcggctaagtctctttttcccttggatcagccaagcgaaacttggagctttgacaaggaactttcctaagaaaccgctgataaccaggacaaaacacaaccaagggtacacgcaggcatgcacgggtttcctgcccagcgacggcttaagccagcccccgactggcctggccacactgctctccagtagcacagatgtctgctcctcctcttgaacttgggtgggaaaccccacccaaaagccccctttgttacttaggcaattccccttccctgactcccgagggctagggctagagcagacccgggtaagtaaaggcagacccagggctcctctagcctcatacccgtgccctcacagagccatgccccggcacctctgccctgtgtctttcatacctctacatgtctgcttgagatatttcctcagcctgaaagtttccccaaccatctgccagagaactcctatgcatcccttagaaccctgctcagacaccattacttttgtgaacgcttctgccacatcttgtcttccccaaaattgatcactccgccttctcctgggctcccgtagcacactataacatctgctggagtgttgctgttgcaccatactttcttgtacatttgtgtctcccttcccaactagactgtaagtgccttgcggtcagggactgaatcttgcccgtttatgtatgctccatgtctagcccatcatcctgcttggagcaagtaggcaggagctcaataaatgtttgttgcatgaaaaaaaaaaaaaaaaaaaaaaaaaaaaaaaaaaaaaaaaaaaaaaaaaaaaaaaaaaaa

SEQ ID NO: 3515 - DNA, 780 bp, Homo sapiens
gggggatccctgcctcaggctctcaacctcctctcctgcagctccagctctgtgctctgcctgcgaggagaccatggcctggcccctgtgcaccctgctgctcctgctggccacccaggctgtggccctggcctggagcccccaggaggaggacaggataatcgagggtggcatctatgatgcagacctcaatgatgagcgggtacagcgtgcccttcactttgtcatcagcgagtataacaaggccactgaagatgagtactacagacgcctgctgcgggtgctacgagccagggagcagatcgtgggcggggtgaattacttcttcgacatagaggtgggccgaaccatatgtaccaagtcccagcccaacttggacacctgtgccttccatgaacagccagaactgcagaagaaacagttgtgctctttccagatctacgaagttccctgggaggacagaatgtccctggtgaattccaggtgtcaagaagcctagggatctgtgccagggagtcacactgaccacctcctactcccaccccttgtagtgctcccacccctggactggtggcccccaccctgtgggaggtctccccatgcacctgcagcaggagaagacagagaaggctgcaggaggcctttgttgctcagcaggggactctgccctccctccttccttttgcttctcatagccctggtacatggtacacacacccccacctcctgcaattaaacagtagcatcatcaaaaaaaaaaaaaaaaaaaaaaaaaaaaaa

SEQ ID NO: 3516 - DNA, 5140 bp, Homo sapiens
gcttctgctgggcagggccggctgttaatctcgcctggcggagcggacaccggggcgtggtgggggagatgggccttataggtggcgtccgctggtgagaaacaccttgcgcaggtaaaagggtggcggcgagagggagttcccacccgtggctttcttagagaaatgaagtcttaagtcttaaatagacaacaaggaggggccgatcggtgtcttttggacgcgtctggagcccctccctccgccaaaggaaaagccccttggatgagaggcaggcgcttcagagaagctaagaaaagcacctctccgcgcgccccacctcctccgcctcgcgctcctcctgagcagcgggcccagactgcgctccggccgcggccctcgccccgcggagccctcctaccccggcccgacgctcggcccgcgacctgccccgagccctctccatggaggcagcccgcccctccggctcctggaacggagccctctgccggctgctcctgctgaccctcgcgatcttaatatttgccagtgatgcctgcaaaaatgtgacattacatgttccctccaaactagatgccgagaaacttgttggtagagttaacctgaaagagtgctttacagctgcaaatctaattcattcaagtgatcctgacttccaaattttggaggatggttcagtctatacaacaaatactattctattgtcctcggagaagagaagttttaccatattactttccaacactgagaaccaagaaaagaagaaaatatttgtctttttggagcatcaaacaaaggtcctaaagaaaagacatactaaagaaaaagttctaaggcgcgccaagagaagatgggctccaattccttgttcgatgctagaaaactccttgggtccttttccacttttccttcaacaggttcaatctgacacggcccaaaactataccatatactattccataagaggtcctggagttgaccaagaacctcggaatttattttatgtggagagagacactggaaacttgtattgtactcgtcctgtagatcgtgagcagtatgaatcttttgagataattgcctttgcaacaactccagatgggtatactccagaacttccactgcccctaataatcaaaatagaggatgaaaatgataactacccaatttttacagaagaaacttatacttttacaatttttgaaaattgcagagtgggcactactgtgggacaagtgtgtgctactgacaaagatgagcctgacacgatgcacacacgcctgaagtactccatcattgggcaggtgccaccatcacccaccctattttctatgcatccaactacaggcgtgatcaccacaacatcatctcagctagacagagagttaattgacaagtaccagttgaaaataaaagtacaagacatggatggtcagtattttggtctacagacaacttcaacttgtatcattaacattgatgatgtaaatgaccacttgccaacatttactcgtacttcttatgtgacatcagtggaagaaaatacagttgatgtggaaatcttacgagttactgttgaggataaggacttagtgaatactgctaactggagagctaattataccattttaaagggcaatgaaaatggcaattttaaaattgtaacagatgccaaaaccaatgaaggagttctttgtgtagttaagcctttgaattatgaagaaaagcaacagatgatcttgcaaattggtgtagttaatgaagctccattttccagagaggctagtccaagatcagccatgagcacagcaacagttactgttaatgtagaagatcaggatgagggccctgagtgtaaccctccaatacagactgttcgcatgaaagaaaatgcagaagtgggaacaacaagcaatggatataaagcatatgacccagaaacaagaagtagcagtggcataaggtataagaaattaactgatccaacagggtgggtcaccattgatgaaaatacaggatcaatcaaagttttcagaagcctggatagagaggcagagaccatcaaaaatggcatatataatattacagtccttgcatcagaccaaggagggagaacatgtacggggacactgggcattatacttcaagacgtgaatgataacagcccattcatacctaaaaagacagtgatcatctgcaaacccaccatgtcatctgcggagattgttgcggttgatcctgatgagcctatccatggcccaccctttgactttagtctggagagttctacttcagaagtacagagaatgtggagactgaaagcaattaatgatacagcagcacgtctttcctatcagaatgatcctccatttggctcatatgtagtacctataacagtgagagatagacttggcatgtctagtgtcacttcattggatgttacactgtgtgactgcattaccgaaaatgactgcacacatcgtgtagatccaaggattggcggtggaggagtacaacttggaaagtgggccatccttgcaatattgttgggcatagcattgctcttttgcatcctgtttacgctggtctgtggggcttctgggacgtctaaacaaccaaaagtaattcctgatgatttagcccagcagaacctaattgtatcaaacacagaagctcctggagatgacaaagtgtattctgcgaatggcttcacaacccaaactgtgggcgcttctgctcagggagtttgtggcaccgtgggatcaggaatcaaaaacggaggtcaggagaccatcgaaatggtgaaaggaggacaccagacctcggaatcctgccggggggctggccaccatcacaccctggactcctgcaggggaggacacacggaggtggacaactgcagatacacttactcggagtggcacagttttactcagccccgtcttggtgaaaaagtgtatctgtgtaatcaagatgaaaatcacaagcatgcccaagactatgtcctgacatataactatgaaggaagaggatcggtggctgggtctgtaggttgttgcagtgaacgacaagaagaagatgggcttgaatttttggataatttggagcccaaatttaggacactagcagaagcatgcatgaagagatgagagtgttctaataagtctctgaaagccagtggctttatgacttttaaaaaaaattacaaaccaagaattttttaaagcagaagatgctatttgtgggggtttttctctcattatttggatggaatctctttggtcaaatgcacatttacagagagacactataaacaagtacacaaatttttcaatttttacatatttttaaattacttatcttctatccaaggaggtctacagagaaattaaagtctgccttatttgttacatttgggtataatgacaacagccaatttatagtgcaataaaatgtaattaattcaagtccttattatagactatttgaagcacaacctaatggaaaattgtagagaccttgctttaacattatctccagttaattaagtgttcatgtggtgcttggaaactgttgttttcctgaacatctaaagtgtgtagactgcattcttgctattattttattcttgtaatgtgaccttttcactgtgcaaagggagatttctagccaggcattgactattacaatttcattttggtggagtttagttttaggttttattgtatataaaatcctgcactgaatctgtgtctcctctgttacctacttttgccagtgaaatttaagttttaaaatactttcagaatgtatttttactactgcaagtttttggtctttaaaatgtcaagtagcatctctctctttctctctgtctctttctgtttctctctccagttttttttttttttttaatttccatatgggctaaagaatccaaatattttaaaaatctgtctctcttttcttctctcataaagtgaattattccttttttttgttttatgtaagtgtatatattcttagtttttcttgaaatcattgtaatgttaactttgttgtttcaaatatcttggtgattgcttcattatctcttcaacaaaaaaaacctttaattttgccattgaaactgtagaactatgccatgcttttattagaagcagtgctctgtgttaacaacaagaatggtgtaattagaattgggatgtggatatttactgtatgacaacacatttacagttctgtaatgcaaggatgcagtttaaaaatgtgaagtagtgatggtttttgaaataagctttaaaatatagggatcttgaaggctccctggggtaactattttataacttagataaaatggctagtcatatctgtgtgtttgtaaagttatttttttaatattttaagattacaattttaacaaatgtagaaatgagccaaactatttaaattttaaaacagtaaaacaaaatgaaacttaatagctcacaaaattccagtccatgtttcatgacttattttagtcaatgaattttctatttatactaaacatatggacattttaaatgtgtttctaatatttttgattatctataatgtgcctgtcttcaattcacaagattgggttataacaattatttgccagattaacactagggaattatttgataaccagcttatcttatcagtagttttattgctgatcaggcaaaaatagttttccaaagttatttttaataaagtatatacaaaattcttatatattactagtcatgataaagtaaattaagcagtttttaaaacttagtgtgagtttgttcatcacaggtctgatatgagtttaagggatttcgcactccctgaatcagagaagtaagaccccttccttagattcctgttatacattttttaaaatgtagagtttgttttggagacattttcagtgcattgttattgccatatttatataatatgactattctaaaggctgtgaggccatggggtattggttaagttgcttgcttttgctttgtccattttcatcattttaaaatgggggataataacagaacttgtttcctagggccattgtaagtcacttgaataaaaaatagttttgaagctaaaaaaaaaaaaaaaa

SEQ ID NO: 3517 - DNA, 4590 bp, Homo sapiens
gttggtccttgagcgcgtccgacagtctgtctgttcgcgatcctgccggagccccgccgccgccggcttggattctgaaaccttccttgtatccctcctgagacatctttgctgcaagatcgaggctgtcctctggtgagaaggtggtgaggcttcccgtcatattccagctctgaacagcaacatggggtgcaaagtcctgctcaacattgggcagcagatgctgcggcggaaggtggtggactgtagccgggaggagacgcggctgtctcgctgcctgaacacttttgatctggtggccctcggggtgggcagcacactgggtgctggtgtctacgtcctggctggagctgtggcccgtgagaatgcaggccctgccattgtcatctccttcctgatcgctgcgctggcctcagtgctggctggcctgtgctatggcgagtttggtgctcgggtccccaagacgggctcagcttacctctacagctatgtcaccgttggagagctctgggccttcatcaccggctggaacttaatcctctcctacatcatcggtacttcaagcgtagcgagggcctggagcgccaccttcgacgagctgataggcagacccatcggggagttctcacggacacacatgactctgaacgcccccggcgtgctggctgaaaaccccgacatattcgcagtgatcataattctcatcttgacaggacttttaactcttggtgtgaaagagtcggccatggtcaacaaaatattcacttgtattaacgtcctggtcctgggcttcataatggtgtcaggatttgtgaaaggatcggttaaaaactggcagctcacggaggaggattttgggaacacatcaggccgtctctgtttgaacaatgacacaaaagaagggaagcccggtgttggtggattcatgcccttcgggttctctggtgtcctgtcgggggcagcgacttgcttctatgccttcgtgggctttgactgcatcgccaccacaggtgaagaggtgaagaacccacagaaggccatccccgtggggatcgtggcgtccctcttgatctgcttcatcgcctactttggggtgtcggctgccctcacgctcatgatgccctacttctgcctggacaataacagccccctgcccgacgcctttaagcacgtgggctgggaaggtgccaagtacgcagtggccgtgggctccctctgcgctctttccgccagtcttctaggttccatgtttcccatgcctcgggttatctatgccatggctgaggatggactgctatttaaattcttagccaacgtcaatgataggaccaaaacaccaataatcgccacattagcctcgggtgccgttgctgctgtgatggccttcctctttgacctgaaggacttggtggacctcatgtccattggcactctcctggcttactcgttggtggctgcctgtgtgttggtcttacggtaccagccagagcagcctaacctggtataccagatggccagtacttccgacgagttagatccagcagaccaaaatgaattggcaagcaccaatgattcccagctggggtttttaccagaggcagagatgttctctttgaaaaccatactctcacccaaaaacatggagccttccaaaatctctgggctaattgtgaacatttcaaccagccttatagctgttctcatcatcaccttctgcattgtgaccgtgcttggaagggaggctctcaccaaaggggcgctgtgggcagtctttctgctcgcagggtctgccctcctctgtgccgtggtcacgggcgtcatctggaggcagcccgagagcaagaccaagctctcatttaaggttcccttcctgccagtgctccccatcctgagcatcttcgtgaacgtctatctcatgatgcagctggaccagggcacctgggtccggtttgctgtgtggatgctgataggcttcatcatctactttggctatggcctgtggcacagcgaggaggcgtccctggatgccgaccaagcaaggactcctgacggcaacttggaccagtgcaagtgacgcacagccccgccccccggaggtggcagcagccccgagggacgcccccagaggaccgggaggcaccccaccctccccaccagtgcaacagaaaccacctgcgtccacaccctcactgcagccaaaggtgcaattacttgacctgcagccccagcccaccctcggctctgcagccggttctccgggccctggtcacctccagacagctgcctggccggggccactaggctgcggctggccactgtgtctcctcacttctctgaacaaagcagttcctcccctaccagctcagccccgagctgccgcagcctcaggcagaacggaggtcaccttctctccttatcttgggaaccaggccttcctcccggggactgttctgggattgaaattgtgcatactccaaactttcgcagccatcttcccgctcagccccagacacccagcaatcaagccagatgagtaccacaaaacagtgtgtccccagcagctccccaccccagagccaaatgacagtagtgcacttaaaaaggaaaatcaggcctgttgtccttctccggttgcattcagttgggtcattagggccggaccctgcctgccccttggcttctcagggctttgctctgacaccatgacagctgcccggggctgagggcagctggctccactcaaatgaggaagaagggatcactcccattagggcctgctttgcttatgcatgtgtgtgcacatgcatgtaaaccagggaccttcagctcacggcctccaggcctgggccagttcttgctgctcctgccgtctcccccgactggctgtgtcctgagtaactggaacatgagactgtatctgcaggactggccccatggtggccgagtcagaagtctgtttcctgtgagtcgccaccgttcactcagtcttgccctcccatgctttggagccagtctggtggctcctgtaaggttctcaaggctggtggcagctcagtctggggtcaggacatgtcggggtcatgcgtttctggccctgacataagctgtctggcctctctgtgacatgatgaaattgaaatcaatccacagtccatgaaattgtgacactccaccagattaagttagggcataacattaacttggaaatggccatgtcatcacccctgcggctgtcctatagctgagatgcgtgggtcgcaggggaggtgatttctaggcatattgctgtcccttttgtgtatctgtcatccggatgcttcggaccccacgcctctgcaagtgggagagacccgagcatcctccccacccccatagctccagtgcacgccacccccgtcttgcctgggtcggggcctgcggccagcaccatttcacacacactccttgtagatgggagccagaggaaacctgaacgtgggtggagcgttccactgagtctacttcaggagacagaaggcccatgctgatgggggaggaggagggacgtgggcattttggacaccaggggaaatggaaatgctgctttcaaaacttagtttcctttccatttcttcctagtctggcctttgacacaaatctggtagaaagaagcctgataaattgagggcacttgtaccctccctgtgcccccagaaggttcttggagagaagtgcaagaatttgtgaacacggcggtggagggcgggtggatggccatgggctgggcctccgtatcaggcctgctcaccttgctgggagctttattctgatctcattttgaatgttccagagggagcatcataagagcccagagctccgatttccaaagagtgatattgacatttatggagattggtgttgtaacatattttgataaatactaacttattttgttggggttttggttgtctcttgtcttaggacctggtagttatttgcttgatttttttttccgttattttctacataggcaaagagaattcgagggatagacagtctccaagaaaagtgaagtggtgggagagaattgcttttttcttttttttcttttctctagtttttctttctggctgagatttccgtgcaagacagcacccaatagactatttagagttgacatttgacattttaatgggcgccatggctcattttgtagattgagaaggtgcgtctcccctgctccaagtctcatcatgacagcgtgctgacagctgggagtctgtggccttcctcacgcagaggccttaaagctggacacagaagcacgcctaggctgggcagggatgggacccatgccccctccttagaggacgggcttcctggttaggaaaggacacgtgggggtgccttgcataatagttcactggtcaccgtgcttttatgagtagtgtttttgtgcacttgccaggggttttctctctgtgtgcgaggggagtgatttaagcaatggtgtctggagtaagccttacaattttaatagactttttcttatcatatccctcatttctttccctgaaataaaaatacacacaagcaaaaaaaaaaaaaaaa

SEQ ID NO: 3518 - DNA, 4242 bp, Homo sapiens
gggggccagaccgcagagacaggttcggatccgcggtcctcttgcctctttccaggcctcgatgagtgttaaatcgccatttaatgtgatgtcaagaaataatttggaagcacctccttgtaagatgacagagccatttaattttgagaaaaatgaaaacaagcttccaccacatgagtctttaagaagtcctggaacacttcctaaccaccctaatttcaggctgaaaagctcagagaatggaaataaaaagaacaattttttgctttgtgagcaaaccaaacaatatttggctagtcaggaagacaattcagtttcttcaaacccgaatggcatcaacggagaagtagttggctccaaaggagacaggaaaaaattgccagcaggaaactcagtgtcaccaccaagtgctgaaagtaattcaccacccaaagaagtgaatattaagcctggaaataatgtacgtcctgcaaaatcaaaaaaactaaacaagttggtcgagaattccttgtccataagtaatccagggctcttcacctccttaggacctcctcttcggtccacaacttgccatcgctgtggcctatttggatcgctgaggtgctctcagtgcaagcagacctactattgctccacagcatgtcaaagaagagactggtctgcacacagcatcgtgtgcaggcctgttcagccaaatttccacaaacttgaaaataaatcatctattgaaacaaaggatgtggaggtaaacaataagagtgactgtccacttggagttactaaggaaatagccatttgggctgagagaataatgttttctgatttgagaagtctacaactcaagaaaaccatggaaataaagggtacggttaccgaattcaaacacccaggggacttctacgtgcagttatattcttcagaagttttagaatacatgaaccaactctctgccagcttaaaagaaacatatgcaaatgtgcatgaaaaagactatattcctgttaagggggaagtttgtattgccaagtacactgttgatcagacctggaacagagcaatcatacaaaacgttgatgtgcagcaaaagaaggcacatgtcttatatattgattatggaaatgaagaaataattccattaaacagaatttaccacctcaacaggaacattgacttgtttcctccttgtgccataaagtgctttgtagccaatgttatcccagcagaagggaattggagcagtgattgtatcaaagctactaaaccactgttaatggagcagtactgctccataaagattgtcgacatcttggaagaggaagtggttacctttgctgtagaagttgagctgccaaattcaggaaaacttttagaccatgtgcttatagaaatgggatatggcttgaaacccagtggacaagattctaagaaggaaaatgcagatcaaagtgatcctgaagatgttggaaaaatgacaactgaaaacaacattgtcgtagacaaaagtgacctaatcccaaaagtgttaactttgaatgtaggtgatgagttttgtggtgtggttgcccacattcaaacaccagaagacttcttttgtcaacaactgcaaagtggccgaaagcttgctgaacttcaggcatcccttagcaagtactgtgatcagttgcctccacgctctgatttttatccagccattggtgatatatgttgtgctcagttctcaggagtaaagccatcattaggaatttggactccagaagctatttgtctcatgaaaaaacttgtacagaacaaaataatcacagtgaaagtggtggacaagttggaaaacagttccctggtggagcttattgataaatccgagacgcctcatgtcagtgttagcaaagttctcctagatgcaggctttgctgtgggagaacagagtatggtgacagataaacccagtgacgtgaaagaaaccagtgttcccttgggtgtggaaggaaaagtaaatccattggagtggacatgggttgaacttggtgttgaccaaacagtagatgttgtggtctgtgtgatatatagtcctggagaattttattgccatgtgcttaaagaggatgctttaaagaaactcaatgatttgaacaagtcattagcagaacactgccagcagaagttacctaatggtttcaaggcagagataggacaaccttgttgtgctttttttgcagatatacagtctagaaacaaacattggtctgaagaagccataacaagattccagatgtgtgttgctgggataaaattgcaagccagagtggttgaagtcactgaaaatgggataggagttgaactcaccgatctctccacttgttatcccagaataattagtgatgttctgattgatgaacatctggttttaaaatctgcttcaccacataaagacttaccaaatgacagacttgttaataaacatgagcttcaagttcatgtacagggacttcaagctacctcttcagctgagcaatggaagacgatagaattgccagtggataaaactatacaagcaaatgtattagaaatcataagcccaaacttgttttatgctctaccaaaagggatgccagaaaatcaggaaaagctgtgcatgttgacagctgaattattagaatactgcaatgctccgaaaagtcgaccaccctatagaccaagaattggagacgcatgctgtgccaaatacacaagtgatgatttttggtatcgtgcagttgttctggggacatcagacactgatgtggaagtgctctatgcagactatggaaacattgaaaccctgcctctttgcagagtgcaaccaatcacctctagccacctggcgcttcctttccaaattattagatgttcacttgaaggattaatggaattgaatggaagctcttctcaattaataataatgctattaaaaaatttcatgttgaatcagaatgtaatgctttctgtgaaaggaattacaaagaatgtccatacagtgtcagttgagaaatgttctgagaatgggactgtcgatgtagctgataagctagtgacatttggtctggcaaaaaacatcacacctcaaaggcagagtgctttaaatacagaaaagatgtataggatgaattgctgctgcacagagttacagaaacaagttgaaaaacatgaacatattcttctcttcctcttaaacaattcaaccaatcaaaataaatttattgaaatgaaaaaactgttaaaaagttaagtaagttaaatcgtatgttttcgcctcttctgtgatcaccaataggacatcttcaggcatattggcaggatagagctaatggagtgaaacctattgtaaggctgtactttcgtgatttaatgacctgaggtttggtcataatgcttctgctgtttttgtaggtttatctgatcgttttcctttgctactgctaatggaactgaacccccaggggtattccagttgtaatagcctttccttactgttgtttggttctgtgaatgcctatgttattgatatgtggagggacttgtaaaacttgttgtgacataaagcttagcctcagattttttgtctagatctgaaattaactcagagctcacttatgcacattgctgtaaatatgtttagcactttttgcgaggggtatctaaagggccaagaacggaaagtggatctaaagggccaagaacggaaagtgggctgcactgagggtatttttcatttaaaaacaaaacatactccctgcttttggctgtggtgattctagtgtctaaagaacatactggtgagttttaaaccagtgttcctccccaccccacccccatattttaaatgtctgggatcctttgttgtaagatggttctcagaaataaatttttgattaagagccaattagaacttctgatcagggctgggggtggtggctcacgcctgtaatcccagcactttgggaggctgaggcgggcagatcacctgagcccaggcgttcgaagtcagcctggccaagatggcgaaacactgcctctacttaaaatacaaaattagctgggcatggtggtgcacacctgttaacccagctacttgggaggctgagacaggagaatcgcttgaatccaggaggcggcggttgcagtgagccaagactgctattatactccagcctgggtgacagagtgagagtttgtcgcaaaaaaaaaaaaaaaaaaaaaaaaaaaaaa

SEQ ID NO: 3519 - DNA, 489 bp, Homo sapiens
atgtggaaggtgtcagctctgctcttcgttttgggaagcgcgtcgctctgggtcctggcagaaggagccagcacaggccagccagaagatgacactgagactacaggtttggaaggcggcgttgccatgccaggtgccgaagatgatgtggtgactccaggaaccagcgaagaccgctataagtctggcttgacaactctggtggcaacaagtgtcaacagtgtaacaggcattcgcatcgaggatctgccaacttcagaaagcacagtccacgcgcaagaacaaagtccaagcgccacagcctcaaacgtggccaccagtcactccacggagaaagtggatggagacacacagacaacagttgagaaagatggtttgtcaacagtgaccctggttggaatcatagttggggtcttactagccatcggcttcattggtggaatcatcgttgtggttatgcgaaaaatgtcgggaaggtactcgccctaa

SEQ ID NO: 3520 - DNA, 4948 bp, Homo sapiens
acgatagtcacacctctcctttgggcctagcagggccagagaaagacggaatcactctacccactcaggttgcccagagagcactttaggttctgactcgcgtggggcgcgaggtaccccgtggggcagctaggtgcctccaagaaaccccgccccagaggacccgcacgagttgctgccatttttcgctgaagcccctgccctggggctggtgttcttctctatgattctaccaatcgtcggcatttttttcctcccttctttctttttaggaaggcgctggggtgtgcggcggcaacggcggcggtgaagggatcctcttgtggtatctcctcgtgggttcctgtcttgaaggatttcttctccgcctcaactttatgttcaagtagcgctttgggggttgggttggttttcatagcccccacccccggccctctccttttaaagggtgtgtggagttcagaggatgggtggagagcgggcttggccggaactgaattggtagaggtaaaaggggaacggaggaccttaagctctggccacttcggcccagcgaacccactttatttttgtccaaggaaaagctgcaggggggaggattctttttaggaagtctactctgccggcccctgatttttgggttggatgcttgagagctttgtttcccttgttccgagagtggcccagctgggtctgaatcgactccctcccctttcgaccccctcctcattttccagcccggagaaataggggagtgggggcccaagaacgagaagacgagaacgcgtcgccctgcgctatgtcagaatggggcgggtgtgaggggaacagctctcttgcgatcagctcaggagtatgagcctcccggaggacggcatgagttctggacacttcaggagtcctcagctagtgacatggtcggtcactgcttctgttcggaacagagatccccctgagatagaatacagaagtaatatgacttctccaacactcctggatgccaaccccatggagaacccagcactgtttaatgacatcaagattgagcccccagaagaacttttggctagtgatttcagcctgccccaagtggaaccagttgacctctcctttcacaagcccaaggctcctctccagcctgctagcatgctacaagctccaatacgtccccccaagccacagtcttctccccagacccttgtggtgtccacgtcaacatctgacatgagcacttcagcaaacattcctactgttctgaccccaggctctgtcctgacctcctctcagagcactggtagccagcagatcttacatgtcattcacactatcccctcagtcagtctgccaaataagatgggtggcctgaagaccatcccagtggtagtgcagtctctgcccatggtgtatactactttgcctgcagatgggggccctgcagccattacagtcccactcattggaggagatggtaaaaatgctggatcaggtaagtaacaatattgcctctttcctggccttcctgaatctattcccttttagagtcatcctatctcctgtctcttttcgcttcctccaattattcttgcacactgcttcaagagtaatctttcaaaagtactgttttttatgtctttttaatgcttaagaatgtacaatgagtcttgattagatcatgcttctcaaacaagtacaagtatgcatatctatcagtgacatatcaaacaacttcctggaacttccacattatttgatattaaataatttaagcattttatatttaaaatatgattatcttgtattacaaaatgcaaaatttaaaaacctgttaagataaaccacatgcttcaaaaatagttgaagcttactaaaggcatccaccctcagacttttcaggagaatgtgtttattttatgccattcagaatgctttggtgggaaagttgagaacaatatttctatctcaaacatacttagccagtattagctcctgcctctaccaatactttcccttttctcttccctacaaaagaagtaattgaaatattgtcatcttccctgtgttcttcctcatttggcatctatcactttccattttacttatttatttgcctgtatcacaagagtttgggcattattcacaactgaattgtaaattcctgaaaaataatactctatcttaatttttttatgtatgcctccagagaacttaacacagtgctagtagttgtcttgcaacagataatttgatgaacaaacaaacttgaaaatttgtccaagagagaattcaaatgctataatcttccattttattttatttttaaaataagttcagaattcagaaaggtataaattaagtctctcttccaccactatcccccaaccactagttttcctcccagaggtatatctgttttagtttgtaatcaggaatgatcaaggaaaattatgtggcctctaaagcaggctgataatgttttgcataaatcggaaaggccaaggggtggaaatgactaggaagcagatttcagcttactgtaaaagagtatctacccttgaaatttgatgccctgtactaaatgtaggaggctgaaaaacaacatactactaagcatcaagttgctgagactctgcactggtcttctgaatacaaatattattattgactagtggttaattgtggtaatgataagtgttcataatcttattttgagatgtgatatccattccatatatgaagggagagccaaacaaacaaaccaaaaaaaggaaacaaacaaaaaaggaaataaaattcctcgtgtgacagtttatgctgagataaaggcagtggtaacatcaaaggatggtttgaaggagctttgaatagtccccataatatcatcagtccatcagagccactctaaataaacaggataaattttaaatgtgctcaatgtggttccaagctaagggcattggcccaatggtgtctgtattagttcgttttcatgctgctgataaagacatactcgagactgggaagaaaaagaggtttaattggacttacagttccacatagctggggaggcctcagaatcatggtgggaggcaaaaggcacttcttacatggtggcagcaagagaaaaggaagaaagaatagcggaaagccctgataaacccatcagatctcatgagacttattcactatcatgagaatagcaggggaaaactggccaccatgattcaattaactcctcctgggtccctcccacaacatgtggaaattctgagagatacaattcaagttgagatttgggtgggggcacagccaaaccacatcagtatccaaaatggggggcttactaaaccttagggggcacatataaaacaattggagtgcaagaagaaagtatcaaaatttgtattttcttacccttaaaaattgacaggtaatattgtatgttttaatcatctatagcatgatgttttgaagtacatatgcattgtggaatggttaaatctagctaaataataaatgcattacctcattatcatttttgtggtgagagcacttaatgtccattctctttacaattttaataaataaaatgtatcatcattaactatacttgccttgctatacaatagatctcttgaaatgtattcctcctatctagctataattacgtatcctttgaccaatatctccccatccccctccccactagccaccccagcctctggtaactaccattctactctacttgcatgagattaacttttttagattccacatatgagtgagatcatgcactatttgtccttctgtgcctggcatatttcacttaacataatgtcctccaggttcatctatgctctcacaaatggcaggattttattctttgttataactgaataatattatattgtatatatatatatgtcacatttcatttattcattcatttgttgataggtattttaggttggttccacatcttggctgttgtgaataatgctgcactaaacagggatgcagttatcttttgggcatgtgattttatttcctttggatatatacccagaagggagattgccagatcatacggtagttctaattttaagtttttgaggaacctccatactattttccataaaggctataactagtttacattcccatcaacagtgtgtaagtgttcccttttctccacatactcaccagcacttactgtcttttgtcttttcgataatagtcactctaacttaagtgagatgacatactactttttgtttgttttcttataatgtatacaaaattgtaggataccgatacatgtatatcacatacatgcacaaacatgcacacctcaagatacatgcttaaaactttttagtgaatgatatgcaaagtatagagacaactcttttaaccaaatacttgttccccaccttatcaccacccccaagtttcttctctatagaaattttgaaggtttcactggatctaggagactgttgaccacctgattgagtttttaggaattagaaacatcaggggttgataataaggaacatttgacagcttctcccaacataggtggaaaggaaggttgtatcaagcacctactaggtggtaggtatacgtttcatctcattgacttatttctgtttaggagcacaaaggccaaggtggatgttctcacatctggactaatcctagaatttgattttaggacagccaggagctattcagtgagttcaattcaacacacacacacacacacacgttgaaactaacttttcagctgaccctgtcctggtagctggagatagaaagatgaatcatacccagaccacatcctagagacactctcatttgataccactcatagtggtatcagaactcttcatactactcttactttaaaggcatttctgttccctgctatgcaaaaaaaaaaaaaaaa

SEQ ID NO: 3521 - DNA, 2965 bp, Homo sapiens
gaacagatctggacccaagcctaataaaggtgacataaataaaggtgtcatgtcttggctgcgtttctggggcccatggcccctccttacgtggcaactattgtctttactagtcaaggaggctcagcctctggtgtgggtcaaggacccgctccagctgacctctaaccccctggggccacctgagccctggtcttcccgctcctcccatctcccatgggaatctccccatgcacctgctcccccagcagccccgggggactttgattacctggggccctctgcttcttcgcagatgtcagccctgcctcaggaaccaactgaaaatttggctccattcctgaaggaattggattcagctggagagctgcccctggggccagagccgttcttggctgcacatcaggacttaaatgacaagcggactccagaagaaaggctcccagaggtggttccgcttctcaaccgggatcagaaccaggccctagttcagcttcctcgcctcaagtgggttcaaactacagatctagatcgggctgcaggtcatcaggcagatgaaatacttgttccactagacagtaaggtttcaagaccaaccaaatttgttgtttcgcccaagaacctgaagaaagatctagctggacgttggagccttcctgagattgttgggattccacaccaattatccaaacctcagcgccagaaacagactttgccagatgattatttgagtatggacacactgtatcccggcagcctacctccagaactccgggtgaacgcagatgagcctccagggcctcctgagcaagttggactttctcaattccatctagagcccaaaagtcaaaatccagagacccttgaagacatccagtcctcttcactccaggaagaagccccagcgcagcttctacagctccctcaggaggtagaaccttcaacccagcaggaggccccagctctgcctccagagtcctctatggagagtctagctcaaactccactgaatcatgaagtgactgttcaacctccaggtgaggatcaagctcatcataatttgcccaagtttacagtcaaacctgcagatgtggaggttaccatgacttcagagcctaaaaatgagacagaatctacccaagcccagcaggaggccccaattcagcctcccgaggaggcggaaccttcttctacagccctgaggactacagatcctcctccagaacaccctgaggtgacacttccaccttcagacaagggtcaggctcagcattcacacctgactgaagccacagttcaacctctggacctggagcttagcataactacagagcctactacagaggttaaaccgtctccaaccacggaggaaacctcagctcagcctccagacccggggcttgccataactccagaacccactacagagattggacattccacagccctggaggagactagagctcctcatccagaccaggttcagactctgcatcgaagcctgactgaagtcacaggtccacctacaaagttagaatcttcgcaggattcattggtgcagtctgaaactgcaccagaggaacagaaggcctccacaagcaccaacatatgtgagctctgcacctgcggagatgagactctgtcatgtgttggtctcagcccaaagcagaggctccgccaagtgcctgtgccagagcccgacacctacaatggcatcttcaccaccttaaatttccaaggaaactatatttcataccttgatggaaatgtatggaaagcatacagttggaccgagaaactaattctcagtgaaaattatttgactgaattacctaaggattcatttgaaggcctgctatacctccagtatttagatttatcctgcaataaaatacgatatattgaaagacatacatttgaatcactaccatttttgcagtatataaatctgggctgcaatttaattacaaaactgagccttggaacatttcaggcctggcacggaatgcagtttttacacaacttaattctcaatcgcaatcctctgactactgtcgaagatccatatctctttgaactgccggcattaaaatatctagacatgggaacaacacacatcacacttacaacacttaagaacattctcacgatgtctgttgaactggaaaaactgatcttacctagccatatggcctgctgcctctgccaatttaaaaatagcattgaggctgtctgcaagacagtcaagctgcattgcaacactgcatgtctgactaacagcatacattgtcctgaagaagcatctgtagggaatccagaaggagcgttcatgaagatgttacaagcccggaagcagcacatgggcactcagctgactattgagtcggaggcgccctcagacagcagtggcatcaacttgtcaggctttgggggtgatcagcttgaaattcagctaaccgagcagctacggtccctcatccccaacgaggatgtgagaaagttcatgtctcatgttatccggaccttgaaaatggaatgttcagaaacacatgtgcaagggagctgtgccaagctcatgttgcgaacaggcctcctgatgaagcttctcagcgagcagcaggaagcaaaggcattgaatgtagaatgggatacggaccaacaaaaaacaaattatattaatgagaacatggaacagaatgaacagaaagagcagaagtcaagtgagctcatgaaagaagttccaggagatgactataagaacaaactcatcttcgcaatatctgtgactgtaatactaataattttgattataattttttgtcttatagaggtgaattcacataaaagggcatcagaaaaatacaaagacaacccatcaatatcaggagcctgagcatgagttaaagcatgtggatggcctggagctgtgtttttaaaattgttattaaatattggttttttactt

SEQ ID NO: 3522 - DNA, 3251 bp, Homo sapiens
cagcaactatgaaataatcgtagtatgagaggcagagatcggggcgagacaatggggatgtgggcgcgggagccccgttccggcttagcagcacctcccagccccgcagaataaaaccgatcgcgccccctccgcgcgcgccctcccccgagtgcggagcgggaggaggcggcggcggccgaggaggaggaggaggaggccccggaggaggaggcgttggaggtcgaggcggaggcggaggaggaggaggccgaggcgccggaggaggccgaggcgccggagcaggaggaggccggccggaggcggcatgagacgagcgtggcggccgcggctgctcggggccgcgctggttgcccattgacagcggcgtctgcagctcgcttcaagatggccgcttggctcgcattcattttctgctgaacgacttttaactttcattgtcttttccgcccgcttcgatcgcctcgcgccggctgctctttccgggattttttatcaagcagaaatgcatcgaacaacgagaatcaagatcactgagctaaatccccacctgatgtgtgtgctttgtggagggtacttcattgatgccacaaccataatagaatgtctacattccttctgtaaaacgtgtattgttcgttacctggagaccagcaagtattgtcctatttgtgatgtccaagttcacaagaccagaccactactgaatataaggtcagataaaactctccaagatattgtatacaaattagttccagggcttttcaaaaatgaaatgaagagaagaagggatttttatgcagctcatccttctgctgatgctgccaatggctctaatgaagatagaggagaggttgcagatgaagataagagaattataactgatgatgagataataagcttatccattgaattctttgaccagaacagattggatcggaaagtaaacaaagacaaagagaaatctaaggaggaggtgaatgataaaagatacttacgatgcccagcagcaatgactgtgatgcacttaagaaagtttctcagaagtaaaatggacatacctaatactttccagattgatgtcatgtatgaggaggaacctttaaaggattattatacactaatggatattgcctacatttatacctggagaaggaatggtccacttccattgaaatacagagttcgacctacttgtaaaagaatgaagatcagtcaccagagagatggactgacaaatgctggagaactggaaagtgactctgggagtgacaaggccaacagcccagcaggaggtattccctccacctcttcttgtttgcctagccccagtactccagtgcagtctcctcatccacagtttcctcacatttccagtactatgaatggaaccagcaacagccccagcggtaaccaccaatcttcttttgccaatagacctcgaaaatcatcagtaaatgggtcatcagcaacttcttctggttgatacctgagactgttaaggaaaaaaattttaaacccctgatttatatagatatcttcatgccattacagctttctagatgctaatacatgtgactatcgtccaatttgctttcttttgtagtgacattaaatttggctataaaagatggactacatgtgatactcctatggacgttaattgaaaagaaagattgttgttataaagaattggtttcttggaaagcaggcaagactttttctctgtgttaggaaagatgggaaatggtttctgtaaccattgtttggatttggaagtactctgcagtggacataagcattgggccatagtttgttaatctcaactaacgcctacattacattctccttgatcgttcttgttattacgctgttttgtgaacctgtagaaaacaagtgctttttatcttgaaattcaaccaacggaaagaatatgcatagaataatgcattctatgtagccatgtcactgtgaataacgatttcttgcatatttagccattttgattcctgtttgatttatacttctctgttgctacgcaaaaccgatcaaagaaaagtgaacttcagttttacaatctgtatgcctaaaagcgggtactaccgtttattttactgacttgtttaaatgattcgcttttgtaagaatcagatggcattatgcttgttgtacaatgccatattggtatatgacataacaggaaacagtattgtatgatatatttataaatgctataaagaaatattgtgtttcatgcattcagaaatgattgttaaaattctcccaactggttcgacctttgcagatacccataacctatgttgagccttgcttaccagcaaagaatatttttaatgtggatatctaattctaaagtctgttccattagaagcaattggcacatctttctatactttatatacttttctccagtaatacatgtttactttaaaaattgttgcagtgaagaaaaacctttaactgagaaatatggaaaccgtcttaattttccattggctatgatggaattaatattgtattttaaaaatgcatattgatcactataattctaaaacaattttttaaataaaccagcaggttgctaaaagaaggcattttatctaaagttattttaataggtggtatagcagtaattttaaatttaagagttgcttttacagttaacaatggaatatgccttctctgctatgtctgaaaatagaagctatttattatgagcttctacaggtatttttaaatagagcaagcatgttgaatttaaaatatgaataaccccacccaacaattttcagtttattttttgctttggtcgaacttggtgtgtgttcatcacccatcagttatttgtgagggtgtttattctatatgaatattgtttcatgtttgtatgggaaaattgtagctaaacatttcattgtccccagtctgcaaaagaagcacaattctattgctttgtcttgcttatagtcattaaatcattacttttacatatattgctgttacttctgctttctttaaaaatatagtaaaggatgttttatgaagtcacaagatacatatatttttattttgacctaaatttgtacagtcccattgtaagtgttgtttctaattatagatgtaaaatgaaatttcatttgtaattggaaaaaatccaataaaaaggatattcatttagaaaaaaaaaaaaaaaaaaaaaaaaaaaaaaaaaaaaaaaaaaaaaaaaaaaa

SEQ ID NO: 3523 - DNA, 2347 bp, Homo sapiens
gagcaatggagcttaccatctttatcctgagactggccatttacatcctgacatttcccttgtacctgctgaactttctgggcttgtggagctggatatgcaaaaaatggttcccctacttcttggtgaggttcactgtgatatacaacgaacagatggcaagcaagaagcgggagctcttcagtaacctgcaggagtttgcgggcccctccgggaaactctccctgctggaagtgggctgtggcacgggggccaacttcaagttctacccacctgggtgcagggtgacctgtattgaccccaaccccaactttgagaagtttttgatcaagagcattgcagagaaccgacacctgcagtttgagcgctttgtggtagctgccggggagaacatgcaccaggtggctgatggctctgtggatgtggtggtctgcaccctggtgctgtgctctgtgaagaaccaggagcggattctccgcgaggtgtgcagagtgctgagaccgggaggggctttctatttcatggagcatgtggcagctgagtgttcgacttggaattacttctggcaacaagtcctggatcctgcctggcaccttctgtttgatgggtgcaacctgaccagagagagctggaaggccctggagcgggccagcttctctaagctgaagctgcagcacatccaggccccactgtcctgggagttggtgcgccctcatatctatggatatgctgtgaaatagtgtgagctggcagttaagagctgaatggctcaaagaatttaaagcttcagttttacatttaaaatgctaagtgggagaagagaaaccttttttttggggggcggtttttttggtttgttgttggttttttttttttttttggcgggaagaaagagttttgctcttgttgcccaggctggagtgcaatggcgtggtctccgctcactgcaacctccacctcgcgggtttaggcgattcttctgcctcagcctccctagtagctgggattacaggtgcccaccaccatgcccagctaatttgtatttttagttgagacagggtttcactacgttggccaggctggtcttgaactcctgatctcaggcaatccacccacctcagcctcccaaagtgctgggatgacaggcgtgagcaaccgcacccagcttaaggtttttttgttttgttttgagacggagttttcgctcttgttgcccaggctggagtgcaatgctgtgatctcagcttaccacaacctccacctcccgggttcaggtgattcacctgcctcagcctcctgagtggctggtattacaggcatgcgtcaccacgccggctaattttgtacttttagtagagatggtgtttccccacgttggtcagtctggtctcaaattcctgacctcaggtgatctgcctgcctcggcctcccaaagtgctgtgattacagacgtcagccaccatgcctggcctgaaaccttttttaggtaaagttgaattccatccttaaaagtttctgttatatcctatttagccattttctattgtctcccaaagaattcacatcaaaaaaacagctttgaactcccccttcaaaggaaacagtcgactttcataattagcatctaccattatccccaaatcttattttattcattgacttgaaattttttccaattgctttttttttttttttttttaaggttaagagcagaggtttactaggccaaagaaagagaatagctctctgttgcagagaggggtcctggagaaatgggttaccccagttgtcttatttaaatggttacccatcagattttaattttatcttctctttgagagcttggtaataagaagcacttaaatcactccaaagaagactttaaaaagggagcagtgaaaaggtcttaataatttattgattgaattaagaaatactagctaattaagaatctgagtctaaacagcacagattttttctttctgcttttaaattgtgttttaaaaaaagagacagggggctgggcgtggtggctcacgcctgtaatcctagcactttgggaggccgaggcgggtggatcacgaggtaggagttaaagaccagcctggccaacatggcaaaaccctactaaagatacaaaaaaaaaaaaaaattggccaggcgtggtggtgggtgcctgtaatcccaggtacttggaaggctgaggcaggagaatctcttgaacccagaaggcgaaggttgcagtgaaccgagatcatgccattgtactctagcctgggtgacaagagcaagactccgtctcaaaaaaaaaaaaaaaaaaaaaaaaaaaaaaaaaaaaaaaaaaaaa

SEQ ID NO: 3524 - DNA, 1407 bp, Homo sapiens
cgcgaatcgcagcttctgagaccagggttgctccgtccgtgctccgcctcgccatgacttcctacagctatcgccagtcgtcggccacgtcgtccttcggaggcctgggcggcggctccgtgcgttttgggccgggggtcgcctttcgcgcgcccagcattcacgggggctccggcggccgcggcgtatccgtgtcctccgcccgctttgtgtcctcgtcctcctcgggggcctacggcggcggctacggcggcgtcctgaccgcgtccgacgggctgctggcgggcaacgagaagctaaccatgcagaacctcaacgaccgcctggcctcctacctggacaaggtgcgcgccctggaggcggccaacggcgagctagaggtgaagatccgcgactggtaccagaagcaggggcctgggccctcccgcgactacagccactactacacgaccatccaggacctgcgggacaagattcttggtgccaccattgagaactccaggattgtcctgcagatcgacaatgcccgtctggctgcagatgacttccgaaccaagtttgagacggaacaggctctgcgcatgagcgttgaggccgacatcaacggcctgcgcagggtgctggatgagctgaccctggccaggaccgacctggagatgcagatcgaaggcctgaaggaagagctggcctacctgaagaagaaccatgaggaggaaatcagtacgctgaggggccaagtgggaggccaggtcagtgtggaggtggattccgctccgggcaccgatctcgccaagatcctgagtgacatgcgaagccaatatgaggtcatggccgagcagaaccggaaggatgctgaagcctggttcaccagccggactgaagaattgaaccgggaggtcgctggccacacggagcagctccagatgagcaggtccgaggttactgacctgcggcgcacccttcagggtcttgagattgagctgcagtcacagctgagcatgaaagctgccttggaagacacactggcagaaacggaggcgcgctttggagcccagctggcgcatatccaggcgctgatcagcggtattgaagcccagctgggcgatgtgcgagctgatagtgagcggcagaatcaggagtaccagcggctcatggacatcaagtcgcggctggagcaggagattgccacctaccgcagcctgctcgagggacaggaagatcactacaacaatttgtctgcctccaaggtcctctgaggcagcaggctctggggcttctgctgtcctttggagggtgtcttctgggtagagggatgggaaggaagggacccttacccccggctcttctcctgacctgccaataaaaatttatggtccaagggaaaaaaaaaaaaaaaaaaaaaaaaaa

SEQ ID NO: 3525 - DNA, 769 bp, Homo sapiens
ctcgggcgcccgcggcgatgttcaaccgcgccgtgagccggctgagcaggaagcggccgccgtcagacatccacgacagcgatggcagttccagcagcagccaccagagcctcaagagcacagccaaatgggcggcatccctggagaatctgctggaagacccagaaggcgtgaaaagatttagggaatttttaaaaaaggaattcagtgaagaaaatgttttgttttggctagcatgtgaagattttaagaaaatgcaagataagacgcagatgcaggaaaaggcaaaggagatctacatgacctttctgtccagcaaggcctcatcacaggtcaacgtggaggggcagtctcggctcaacgagaagatcctggaagaaccgcaccctctgatgttccagaaactccaggaccagatctttaatctcatgaagtacgacagctacagccgcttcttaaagtctgacttgtttttaaaacacaagcgaaccgaggaagaggaagaagatttgcctgatgctcaaactgcagctaaaagagcttccagaatttataacacatgagcccccaaaaagccgggactggcagctttaagaagcaaaggaatttcctctcaggaccgtgccgggtttatcattgctttgttatttgtaaggactgaaatgtacaaaacccttcaatgggatgtgtgttttattaactgcttcaccagtaaattttgcatgatggctaagctaacataaaaaaagaaaaaaaaaaaaaaaaaaaa

SEQ ID NO: 3526 - DNA, 1785 bp, Homo sapiens
atgggcccgttccaggcagaaagagcaagagggcagggagggagcacaggggtggccagcgtagggtccagcacgtggggtggtaccccaggcctgggtcagacagggacatggcaggggacacaggacagaggggtccccagctgccacctcacccaccgcaattcatttagtagcaggcacaggggcagctccggcacggctttctcaggcctatgccggagcctcgagggctggagagcgggaagacaggcagtgctcggggagttgcagcaggacgtcaccaggagggcgaagcggccacgggaggggggccccgggacattgcgcagcaaggaggctgcaggggctcggcctgcgggcgccggtcccacgaggcactgcggcccagggtctggtgcggagagggcccacagtggacttggtgacgctgtgtgccctcaccgctcagcccctggggctggcttggcagacagtacagcatccaggggagtcaagggcatggggcgagaccagactaggcgaggcgggcggggcggagtgaatgagctctcaggagggaggatggtgcaggcaggggtgaggagcgcagcgggcggcgagcgggaggcactggcctccagagcccgtggccaaggcgggcctcgcgggcggcgacggagccgggatcggtgcctcagcgttcgggctggagacgaggccaggtctccagctggggtggacgtgcccaccagctgccgaaggccaagacgccaggtccggtggacgtgacaagcaggacatgacatggtccggtgtgacggcgaggacagaggaggcgcgtccggccttcctgaacaccttaggctggtggggctgcggcaagaagcgggtctgtttctttacttcctccacggagtcggcacactatggctgccctctgggctcccagaacccacaacatgaaagaaatggtgctacccagctcaagcctgggcctttgaatccggacacaaaaccctctagcttggaaatgaatatgctgcactttacaaccactgcactacctgactcaggaatcggctctggaaggtgagcaccagcgctccttccggaagcctccaggcccccgagcaccctgcccccatcccacccacgtgtcgctatctctaggtgaagctagaggaaccagacctcatcagcccaacatcaaagacaccatcggaacagcagcgcccgcagcacccaccccgcaccggcgactccatcttcatggccaccccctgcggtggacggttgaccaccagccaccacatcatcccagagctgagctcctccagcgggatgacgccgtccccaccacctccctcttcttctttttcatccttctgtctctttgtttctgagctttcctgtctttccttttttctgagagattcaaagcctccacgactctgtttcccccgtcccttctgaatttaatttgcactaagtcatttgcactggttggagttgtggagacggccttgagtctcagtacgagtgtgcgtgagtgtgagccaccttggcaagtgcctgtgcagggcccggccgccctccatctgggccgggtgactgggcgccggctgtgtgcccgaggcctcaccctgccctcgcctagtctggaagctccgaccgacatcacggagcagccttcaagcattccattacgccccatctcgctctgtgcccctccccaccagggcttcagcaggagccctggactcatcatcaataaacactgttacagcaaaaaaaaaaaaaaaa

SEQ ID NO: 3527 - DNA, 2740 bp, Homo sapiens
ctggcgcgcacctgctcaagaccagggtcctgccaagcgctaggagggcgcgtgccaggggcgctagggaactgcggagcgcgcgcgccatggggccgccgcctggggccggggtctcctgccgcggtggctgcggcttttccagattgctggcatggtgcttcctgctggccctgagtccgcaggcacccggttcccggggggctgaagcagtgtggaccgcgtacctcaacgtgtcctggcgggttccgcacacgggagtgaaccgtacggtgtgggagctgagcgaggagggcgtgtacggccaggactcgccgctggagcctgtggctggggtcctggtaccgcccgacgggcccggggcgcttaacgcctgtaacccgcacacgaatttcacggtgcccacggtttggggaagcaccgtgcaagtctcttggttggccctcatccaacgcggcgggggctgcaccttcgcagacaagatccatctggcttatgagagaggggcgtctggagccgtcatctttaacttccccgggacccgcaatgaggtcatccccatgtctcacccgggtgcagtagacattgttgcaatcatgatcggcaatctgaaaggcacaaaaattctgcaatctattcaaagaggcatacaagtgacaatggtcatagaagtagggaaaaaacatggcccttgggtgaatcactattcaatttttttcgtttctgtgtccttttttattattacggcggcaactgtgggctattttatcttttattctgctcgaaggctacggaatgcaagagctcaaagcaggaagcagaggcaattaaaggcagatgctaaaaaagctattggaaggcttcaactacgcacactgaaacaaggagacaaggaaattggccctgatggagatagttgtgctgtgtgcattgaattgtataaaccaaatgatttggtacgcatcttaacgtgcaaccatattttccataagacatgtgttgacccatggctgttagaacacaggacttgccccatgtgcaaatgtgacatactcaaagctttgggaattgaggtggatgttgaagatggatcagtgtctttacaagtccctgtatccaatgaaatatctaatagtgcctcctcccatgaagaggataatcgcagcgagaccgcatcatctggatatgcttcagtacagggaacagatgaaccgcctctggaggaacacgtgcagtcaacaaatgaaagtctacagctggtaaaccatgaagcaaattctgtggcagtggatgttattcctcatgttgacaacccaacctttgaagaagacgaaactcctaatcaagagactgctgttcgagaaattaaatcttaaaatctgtgtaaatagaaaacttgaaccattagtaataacagaactgccaatcagggcctagtttctattaataaattggataaatttaataaaataagagtgatactgaaagtgctcagatgactaatattatgctatagttaaatggcttaaaatatttaacctgttaacttttttccacaaactcattataatatttttcataggcaagtttcctctcagtagtgataacaacatttttagacattcaaaactgtcttcaagaagtcacgtttttcatttataacaattttcttataaaaacatgttgcttttaaaatgtggagtagctgtaatcactttattttatgatagtatcttaatgaaaaatactacttctttagcttgggctacatgtgtcagggtttttctccaggtgcttatattgatctggaattgtaatgtaaaaagcaatgcaaacttaggcgagtacttcttgaaatgtctatttaagctgctttaagttaatagaaaagattaaagcaaaatattcatttttactttttcttatttttaaaattaggctgaatgtacttcatgtgatttgtcaaccatagtttatcagagattatggacttaattgattggtatattagtgacatcaacttgacacaagattagacaaaaaattccttacaaaaatactgtgtaactatttctcaaacttgtgggatttttcaaaagctcagtatatgaatcatcatactgtttgaaattgctaatgacagagtaagtaacactaatattggtcattgatcttcgttcatgaattagtctacagaaaaaaaatgttctgtaaaattagtctgttgaaaatgttttccaaacaatgttactttgaaaattgagtttatgtttgacctaaatgggctaaaattacattagataaactaaaattctgtccgtgtaactataaattttgtgaatgcattttcctggtgtttgaaaaagaagggggggagaattccaggtgccttaatataaagtttgaagcttcatccaccaaagttaaatagagctatttaaaaatgcactttatttgtactctgtgtggcttttgttttagaattttgttcaaattatagcagaatttaggcaaaaataaaacagacatgtatttttgtttgctgaatggatgaaaccattgcattcttgtacactgatttgaaatgctgtaaatatgtcccaatttgtattgattctctttaaatataaaatgtaaataaaatattccaataaaaaaaaaaaaaaaaaaaaaaaaaaaaaaaaaaaaaaaaaaaaaaaaaaaaaaaaaaaaaaaaaaaaaaaaaaaaaaaaaaaaaaaa

SEQ ID NO: 3528 - DNA, 4214 bp, Homo sapiens
cagctatcaaaaaggccataaggattttgtccccaaatttcacatgagctaccttgcttcaaactactgagatgaagggggcaagattatttgtccttctttctagtttatggagtgggggcattgggcttaacaacagtaagcattcttggactatacctgaggatgggaactctcagaagactatgccttctgcttcagttcctccaaataaaatacaaagtttgcaaatactgccaaccactcgggtcatgtcggcggagatagctacaactccagaggcaagaacttctgaagacagtcttcttaaatcaacactgcctccctcagaaacaagtgcacctgctgagggtgtgagaaatcaaactctcacatccacagagaaagcagaaggagtggtcaagttacagaatcttaccctcccaaccaacgctagcatcaagttcaatcctggagcagaatcagtggtcctttccaattctacactgaaatttcttcagagctttgccagaaagtcaaatgaacaagcaacttctctaaacacagttggaggcactggaggcattggaggcgttggaggcactggaggcgtgggaaatcgagccccacgggaaacatacctcagccggggtgacagcagttccagccaaagaactgactaccaaaaatcaaatttcgaaacaactagaggaaagaattggtgtgcttatgtacataccaggttatctcccacagtgatattggacaaccaggtcacttatgtcccaggtgggaaaggaccttgtggctggaccggtggatcctgtcctcagagatctcagaagatatccaatcctgtctataggatgcaacataaaattgtcacctcattggattggaggtgctgtcctggatacagtgggccgaaatgtcaactaagagcccaggaacagcaaagtttgatacacaccaaccaggctgaaagtcatacagctgttggcagaggagtagctgagcagcagcagcagcaaggctgtggtgacccagaagtgatgcaaaaaatgactgatcaggtgaactaccaggcaatgaaactgactcttctgcagaagaagattgacaatatttctttgactgtgaatgatgtaaggaacacttactcctccctagaaggaaaagtcagcgaagataaaagcagagaatttcaatctcttctaaaaggtctaaaatccaaaagcattaatgtactgataagagacatagtaagagaacaatttaaaatttttcaaaatgacatgcaagagactgtagcacagctcttcaagactgtatcaagtctatcagaggacctcgaaagcaccaggcaaataattcaaaaagttaatgaatctgtggtttcaatagcagcccagcaaaagtttgttttggtgcaagagaatcggcccactttgactgatatagtggaactaaggaatcacattgtgaatgtaaggcaagaaatgactcttacatgtgagaagcctattaaagaactagaagtaaagcagactcatttagaaggtgctctagaacaggaacactcaagaagcattctgtattatgaatccctcaataaaactctttctaaattgaaggaagtacatgagcagcttttatcaactgaacaggtatcagaccagaagaatgctccagctgctgagtcagttagcaataatgtcactgagtacatgtctactttacatgaaaatataaagaagcagagtttgatgatgctgcaaatgtttgaagatttgcacattcaagaaagcaagattaacaatctcaccgtctctttggagatggagaaagagtctctcagaggtgaatgtgaagacatgttatccaaatgcagaaatgattttaaatttcaacttaaggacacagaagagaatttacatgtgttaaatcaaacattggctgaagttctctttccaatggacaataagatggacaaaatgagtgagcaactaaatgatttgacttatgatatggagatccttcaacccttgcttgagcagggagcatcactcagacagacaatgacatatgaacaaccaaaggaagcaatagtgataaggaaaaagatagaaaatctgactagtgctgtcaatagtctaaattttattatcaaagaacttacaaaaagacacaacttacttagaaatgaagtacagggtcgtgatgatgccttagaaagacgtatcaatgaatatgccttagaaatggaagatggcctcaataagacaatgactattataaataatgctattgatttcattcaagataactatgccctaaaagagactttaagtactattaaggataatagtgagatccatcataaatgtacctccgatatggaaactattttgacatttattcctcagttccaccgtctgaatgattctattcagactttggtcaatgacaatcagagatataactttgttttgcaagtcgccaagacccttgcaggtattcccagagatgagaaactaaatcagtccaacttccaaaagatgtatcaaatgttcaatgaaaccacttcccaagtgagaaaataccagcaaaatatgagtcatttggaagaaaaactactcttaactaccaagatttccaaaaattttgagactcggttgcaagacattgagtctaaagttacccagacgctcataccttattatatttcagttaaaaaaggcagtgtagttacaaatgagagagatcaggctcttcaactgcaagtattaaattccagatttaaggcgttggaagcaaaatctatccatctttcaattaacttcttttcgcttaacaaaactctccacgaagttttaacaatgtgtcacaatgcttctacaagtgtgtcagaactgaatgctaccatccctaagtggataaaacattccctgccagatattcaacttcttcagaaaggtctaagagaatttgtggaaccaataattcaaataaaaactcaagctgccctatctaatttaacttgttgtatagatcgatcgttgcctggtagtctggcaaatgttgtcaagtctcagaagcaagtaaaatcattgccaaagaaaattaacgcacttaagaaaccaacggtaaatcttaccacagtcctgataggccggactcaaagaaacacggacaacataatatatcctgaggagtattcaagctgtagtcggcatccgtgccaaaatgggggcacgtgcataaatggaagaactagctttacctgtgcctgcagacatccttttactggtgacaactgcactatcaagcttgtggaagaaaatgctttagctccagatttttccaaaggatcttacagatatgcacccatggtggcattttttgcatctcatacgtatggaatgactatacctggtcctatcctgtttaataacttggatgtcaattatggagcttcatataccccaagaactggaaaatttagaattccgtatcttggagtatatgttttcaagtacaccatcgagtcatttagtgctcatatttctggatttttagtggttgatggaatagacaagcttgcatttgagtctgaaaatattaacagtgaaatacactgtgatagggttttaactggggatgccttattagaattaaattatgggcaggaagtctggttacgacttgcaaaaggaacaattccagccaagtttccccctgttactacatttagtggctatttattatatcgtacataagttagtatgaaaaacagactatcacctttattgagaaacagccagtgttttcatttatctttgcttgcacatctgctctgttttggtttttctacaggaaatgaaaatcaacttgtttttttaatatgagtaaacttgtatgtctattttataaaattatttgaatattgtttaatgtctgaatatgaaagagttcttgatcctaaagaaatttagtggcacagaaaacaaagtgaatttgttagcataattattcctattcttatttcttcattttaagtcattgcaatggaaagtaatattataaaacggtaattacaacatattatcagtcacagttttctttccaattaaacacttaacttttgttattccctgtatataaatatataacacacattttctagattcacaaatttaaataaattactcaaaaaatgaaaaaaaaaaaaaaaa

SEQ ID NO: 3529 - DNA, 2537 bp, Homo sapiens
ggagctgctgcgagggtccgcttcgtctttcgagagtgactcccgcggtcccaaggctttccagagcgaacctgtgcggctgcaggcaccggcgtgttgagtttccggcgttccgaaggactgagctcttgtcgcggatcccgtccgccgtttccagcccccagtctcagagcggagcccacagagcagggcaccggcatggccaaagccgcggcgatcggcatcgacctgggcaccacctactcctgcgtgggggtgttccaacacggcaaggtggagatcatcgccaacgaccagggcaaccgcaccacccccagctacgtggccttcacggacaccgagcggctcatcggggatgcggccaagaaccaggtggcgctgaacccgcagaacaccgtgtttgacgcgaagcggctgatcggccgcaagttcggcgacccggtggtgcagtcggacatgaagcactggcctttccaggtgatcaacgacggagacaagcccaaggtgcaggtgagctacaagggggagaccaaggcattctaccccgaggagatctcgtccatggtgctgaccaagatgaaggagatcgccgaggcgtacctgggctacccggtgaccaacgcggtgatcaccgtgccggcctacttcaacgactcgcagcgccaggccaccaaggatgcgggtgtgatcgcggggctcaacgtgctgcggatcatcaacgagcccacggccgccgccatcgcctacggcctggacagaacgggcaagggggagcgcaacgtgctcatctttgacctgggcgggggcaccttcgacgtgtccatcctgacgatcgacgacggcatcttcgaggtgaaggccacggccggggacacccacctgggtggggaggactttgacaacaggctggtgaaccacttcgtggaggagttcaagagaaaacacaagaaggacatcagccagaacaagcgagccgtgaggcggctgcgcaccgcctgcgagagggccaagaggaccctgtcgtccagcacccaggccagcctggagatcgactccctgtttgagggcatcgacttctacacgtccatcaccagggcgaggttcgaggagctgtgctccgacctgttccgaagcaccctggagcccgtggagaaggctctgcgcgacgccaagctggacaaggcccagattcacgacctggtcctggtcgggggctccacccgcatccccaaggtgcagaagctgctgcaggacttcttcaacgggcgcgacctgaacaagagcatcaaccccgacgaggctgtggcctacggggcggcggtgcaggcggccatcctgatgggggacaagtccgagaacgtgcaggacctgctgctgctggacgtggctcccctgtcgctggggctggagacggccggaggcgtgatgactgccctgatcaagcgcaactccaccatccccaccaagcagacgcagatcttcaccacctactccgacaaccaacccggggtgctgatccaggtgtacgagggcgagagggccatgacgaaagacaacaatctgttggggcgcttcgagctgagcggcatccctccggcccccaggggcgtgccccagatcgaggtgaccttcgacatcgatgccaacggcatcctgaacgtcacggccacggacaagagcaccggcaaggccaacaagatcaccatcaccaacgacaagggccgcctgagcaaggaggagatcgagcgcatggtgcaggaggcggagaagtacaaagcggaggacgaggtgcagcgcgagagggtgtcagccaagaacgccctggagtcctacgccttcaacatgaagagcgccgtggaggatgaggggctcaagggcaagatcagcgaggcggacaagaagaaggttctggacaagtgtcaagaggtcatctcgtggctggacgccaacaccttggccgagaaggacgagtttgagcacaagaggaaggagctggagcaggtgtgtaaccccatcatcagcggactgtaccagggtgccggtggtcccgggcctggcggcttcggggctcagggtcccaagggagggtctgggtcaggccctaccattgaggaggtggattaggggcctttgttctttagtatgtttgtctttgaggtggactgttgggactcaaggactttgctgctgttttcctatgtcatttctgcttcagctctttgctgcttcacttctttgtaaagttaagttgtaacctgatggtaattagctggcttcattatttttgtagtacaaccgatatgttcattagaattctttgcatttaatgttgatactgtaagggtgtttcgttccctttaaatgaatcaacactgccaccttctgtacgagtttgtttgtttttttttttttttttttttttgcttggcgaaaacactacaaaggctgggaatgtatgtttttataatttgtttatttaaatatgaaaaataaaatgttaaactttaaaaaaaaaaaaaaaaaaaaaaaaaaaaaaa

SEQ ID NO: 3530 - DNA, 3825 bp, Homo sapiens
cgccgacctcccggctgcagtcctacctcttggaactacccgtgtttccgggcccagccctcgcagccccccacctcctcgccccggcccggggatccgttggggccgcgtcccccacgcgcccccggagacgccctttccgtgtgcgcccgggacttggtgaaactttgcaggcgccggctgcgaaatggatttaatccgaggcgtcttgctccggctcctgctcctggcttccagcctcggacccggcgcggtgtcgctccgagcggccatccgaaaaccaggcaaggtagggcctcctcttgacatcaagctgggcgcattgaactgtacggctttcagcatccagtggaaaatgccaaggcatcctggaagtcccatccttgggtacactgtcttttactctgaggttggcgcagataaatccctgcaggagcagttgcacagcgtgcctctcagccgggacatcccgaccacggaggaagtgattggagatttgaaaccaggcactgaatatcgtgtgagcatagcagcttacagccaggctggcaaagggcggctgagctctcctcggcatgtcaccactttgtcccaagattcctgcctgcctcctgcagctccccagcagccacatgtcattgtggtttcggattctgaggtggccctgtcttggaaacctggagcgagtgaaggaagcgcccctattcagtactattctgtggaattcatcaggccagatttcgacaagaagtggacctcaatccatgagcggatccagatggactccatggttatcaagggcctcgatccagataccaactaccagtttgccgtgagggcaatgaattcccatggccccagcccccgcagctggcccagtgacatcatccggaccctctgccctgaggaggcgggaagtggccgctatggaccccgttatatcaccgacatgggagctggtgaggatgatgaaggatttgaagacgacttagatttggatatttcctttgaggaggttaaaccacttcctgctaccaaaggagggaataagaaatttttggtggaaagcaagaagatgtctatatctaacccaaagaccatttctaggctcatcccccctacctcagcatctctccctgtgaccacggtggctccccagcccattcccatacagagaaaggggaagaatggtgtggccataatgtcaaggctctttgacatgccttgtgatgaaactctctgctctgctgacagcttctgtgtcaatgactacacctgggggggctcgcgatgccagtgcaccctgggcaaaggtggtgagagctgctcagaagatattgttatccagtatcctcagttctttggccactcctatgtaacgtttgaacctctgaagaattcttatcaggcatttcaaattactcttgaatttagggcggaggcagaggatggcttactgctctactgtggggagaacgaacacgggaggggggatttcatgtccctggctatcatccgacgctccctgcagttcaggtttaattgtggaactggggttgccatcatcgtaagtgagaccaaaatcaaactagggggttggcacatggttatgctctacagagatgggctgaacgggctgctgcagctgaacaatggcaccccagtgacaggccagtctcagggccaatacagtaaaattactttccggacacctctctatcttggtggcgctcccagcgcttactggttggttagagcaacagggacaaaccgaggctttcaaggctgtgtgcagtcgctcgctgtgaatgggaggagaattgacatgaggccctggcccctgggaaaagcactcagtggggctgatgtgggggaatgcagcagtggaatctgtgatgaggcctcgtgcatccatggtggcacctgcacagcaatcaaagccgactcctacatttgcctctgtccccttgggtttaaaggtcgacactgtgaagatgctttcaccttgaccattcctcagttcagagagtctctgagatcttacgctgcaactccctggccactggagccccagcattacctttccttcatggaatttgagatcacatttcggccagactcaggagatggtgtcctcctgtacagctatgacacaggcagcaaagacttcctgtccatcaacttggcagggggccacgtggagttccgctttgactgtggctctgggaccggtgtcctcaggagtgaagatcccctcaccctgggcaactggcacgagcttcgtgtatctcgcacagcaaagaatggaatcttacaggtggataagcagaagatagtggagggaatggcagagggaggcttcacacagattaagtgcaacacagacattttcattggcggagtccccaattatgatgatgtgaagaagaactcgggtgtcctgaagcctttcagcgggagcatccagaagatcatcctgaatgaccgaaccatccatgtgaagcatgacttcacctccggagtgaatgtggagaatgcggcccacccctgtgtgagagccccttgtgcccatgggggcagctgccggcccaggaaggagggctatgactgtgactgccccttgggctttgaggggcttcactgccagaaagcgatcatagaagccattgagatcccgcagtttatcggccgcagttacctgacgtatgacaacccagatatcttgaagagggtgtcaggatcaagatcaaatgtgttcatgaggtttaaaacaactgccaaggatggccttttgctgtggaggggagacagccccatgagacccaacagcgacttcatttccttgggccttcgggatggagccctcgtgttcagctataacctgggcagtggtgtggcatccatcatggtgaatggctccttcaacgatggtcggtggcaccgagttaaggccgttagggatggccagtcaggaaagataaccgtggatgactatggagccagaacaggcaaatccccaggcatgatgcggcagcttaacatcaatggagctctgtatgtgggtggaatgaaggaaattgctctgcacactaacaggcaatatatgagagggctcgtgggctgtatctctcacttcaccctgtccaccgattaccacatttccctcgtggaagatgccgtggatggaaaaaacatcaacacttgtggagccaagtaacaccagctggccttgtccaagggacagagccttctattctgagaatcccaggggccctcagaccctgcctgatgctatatgcagaggcccagggaccaggtgtgtttcctctcaccaagaagaaagtacacactgatgagaaactgagaaccaagacaggcatccctgggtggcctttcctgctgacactccacgagctgacccagcagaattctctgtgtaggaagcatcggactttgtccattgaatatgtagcggctgccagagatcacacatcaatgcaaattccagagcctgtctgctatagctcagtgactgtgttgtgattcatagtacattaaaaagagagagagagagaaagaatcccacagggcactattaaaatacttctctccttccctgactcatgacactcttcctgacagcagaatgactgtgtgaccttgaacttcacatttcccacattggcccttggattgttcggattaaccccttccactcctcactggctggttcactgtgttctgactagtccataaaaataaagatggaaggagatcaaaaaaaaaaaaaaaaaaaaaaaaaaaaaaaaaaaaaaaaaaaaaaaa

SEQ ID NO: 3531 - DNA, 2895 bp, Homo sapiens; identical to SEQ ID NO: 705

SEQ ID NO: 3532 - DNA, 4199 bp, Homo sapiens; identical to SEQ ID NO: 2433

SEQ ID NO: 3533 - DNA, 2052 bp, Homo sapiens
ccggctcccggcgtggacgccatggtgctgtgcccggtgattgggaagctgctgcacaagcgcgtggtgctggccagcgcctccccacgccgtcaggagatcctcagcaacgcgggtctcaggtttgaggtggtcccctccaagtttaaagagaagctggacaaagcctccttcgctactccgtatgggtacgccatggagaccgccaagcagaaggccctggaggtggccaaccggctgtaccagaaagacctgcgggcccccgacgtggtcattggagcggacacgatcgtgacggtcggggggctgattctggagaagccggtggacaagcaggacgcctacaggatgctgtcccggttgagtgggagagaacacagcgtgttcacaggtgtcgcgatcgtccactgctccagcaaagaccatcagctggacaccagggtctcggaattctacgaggaaacgaaggtgaagttctcggagctgtccgaggagctgctctgggaatacgtccacagcggggagcccatggacaaagctggcggctacgggatccaggccctgggcggcatgctggtggagtccgtacacggggactttctgaacgtggtgggattcccgctgaaccacttctgcaagcagctggtgaagctctactacccgccccgcccggaggacctgcggcggagtgtcaagcacgactccatcccggccgcggacaccttcgaagacctcagtgacgtggaggggggtggctcggagcccactcagagggacgcgggcagccgcgatgagaaggccgaggcgggagaggcgggacaggccacggcagaggctgagtgtcacaggactcgggagaccctgcctccgttcccgacacgcctcctggagctgattgagggctttatgctatccaagggcctgctcaccgcttgcaaactgaaggtgttcgatttgttaaaagatgaagcaccccagaaggctgcggatattgccagcaaagtggacgcctctgcgtgtggaatggagaggcttctggacatctgtgctgccatggggctcctggagaagacagagcaaggttacagtaacacagagacagcgaacgtctacctggcatcggatggcgaatactctctgcacggcttcatcatgcacaataatgacctcacatggaacctctttacatacctggagtttgccatccgagagggaacaaaccagcaccacagggcgttggggaagaaggcggaagatctgttccaggatgcgtactaccagagcccggagacgcggctgaggttcatgcgggccatgcacggcatgacgaagctgactgcgtgccaggtggccacggccttcaatctgtcccgcttctcctccgcctgcgacatgggaggctgcaccggtgcactggcccgagagctggcccgtgagtaccctcgtatgcaggtgactgtgtttgacctcccagacattatcgagctggccgcccacttccaaccccccggaccgcaggcagtgcagatccacttcgcagcaggtgactttttcagggaccccctccccagcgctgagctgtacgtcctgtgccggatcctgcatgactggccagacgacaaagtccacaagttactcagcagggtcgccgagagctgcaagccaggggccggcctgctgctggtggagacgctcctggatgaggagaagagggtggcgcagcgcgccctgatgcagtcactgaacatgctggtgcagactgaaggcaaggagcggagcctgggcgagtatcagtgcttgctggagctgcacggcttccaccaggtgcaggtggtgcacttggggggtgtcctggatgccatcttggccaccaaagtggccccctgaagcccaggcagcatgttcattatagggatgtcctcccccaggctgcaggtggaccgcccggtccccaagtaccataggacagtcacataggagcgtgtagtcgtgactgaataaagaaagcaaaagcctgaaaaaaaaaaaaaaaaaaaaaaaaaaaaaaaaaaa

SEQ ID NO: 3534 - DNA, 2592 bp, Homo sapiens
ggctgcaccatgcacgtgaacggcaaagtggcgctggtgaccggcgcggctcagggcataggcagagcctttgcagaggcgctgctgcttaagggcgccaaggtagcgctggtggattggaatcttgaagcaggtgtacagtgtaaagctgccctggatgagcagtttgaacctcagaagactctgttcatccagtgcgatgtggctgaccagcaacaactgagagacacttttagaaaagttgtagaccactttggaagactggacattttggtcaataatgctggagtgaataatgagaaaaactgggaaaaaactctgcaaattaatttggtttctgttatcagtggaacctatcttggtttggattacatgagtaagcaaaatggaggtgaaggcggcatcattatcaatatgtcatctttagcaggactcatgcccgttgcacagcagccggtttattgtgcttcaaagcatggcatagttggattcacacgctcagcagcgttggctgctaatcttatgaacagtggtgtgagactgaatgccatttgtccaggctttgttaacacagccatccttgaatcaattgaaaaagaagaaaacatgggacaatatatagaatataaggatcatatcaaggatatgattaaatactatggaattttggacccaccattgattgccaatggattgataacactcattgaagatgatgctttaaatggtgctattatgaagatcacaacttctaagggaattcattttcaagactatgatacaactccatttcaagcaaaaacccaatgaacagcttatgtgttagccatagctgaaaataagcacaaatagcttatattcagatcctatcttcatttgaatatagcttttaaatgaaatgttacagtttgaagttttccttcatgcacttggtgataaacgttttctaaatttttagttaagtatatggataaaaagttatgaactattaaaaatgtgatgtggaccaaaggctaggttgtaatcttgatagtctaaaaaatgatcaaaacaaatgattttcaaggaatattcaatattctgcctttcagaaagtgtatttatatctgtgcttcataaatattaatgttcttcagaacatcattttaaaggagatacttgaattgttatttaaatcaaaccagatgtaaaacactcacatacaagttcatactttaaaagaggaaagctacttaacaatgacaaatatttcacaataataatttttacttatataccatctttcaactgaacatttcagttcttccaagagcttcttagagtagtatattttgggggcagtcaaggaataaactacagtgtaaacatatcccagatgaaaactgctgtatggaaaaatgacagaaagtaactgattgacactgttgattcacagttcagcctcctatctgggaaagacatttctttcctctgctcactttaagaacttttaccgactccaaaaatctcaggaattaaacttttaacagttacagcaataaagaatagttagtactccaaaaatattatatttaagatgctcaacaagaaaaaaatgcaaatgtaatatttttttcaaattacttctttattgacttgtccaaatttcaaaagtgcctacccttcaataaaacttttttattctgatctccataaattacttagtcttctatgtatagctatcaaggaaataaaaccaattttgccacagccacaactgtaaatgtttttgtacccatgctgaaactcataacaacacagacataaaaatagctgtgaggttttgctttttttgttgtcagctatcttaagaatcattaaatacacctgctttgggtaaaactctttgcaagcagtaattaacactagtaacagtgaaagcacaagatttccaaatcagtcgttttctcaaaaaaatatcgtataagtgactcatcctgtctgctaactccagacctcccagcttgaagccaaatctttccatgtgagattgatatggatttcctagaagtactggaatgttgtcatatcttgccctattttaattctgctatagaaaacaattgccttcacttttaaggagtaatttgaatattaataactctggtctagattttcatataatgtattaaagacaaagtagtgaacatcaatgaacatctgatagagataaactgtaatcaggcataagcttgtttgtatgttctggcagtgactaatcagtaaatgatgtcggtttgcccagtatcacttatcttctgtatttttcctctgtcgtgtaaatagtataaccttttcatttatggacaattttttggactagtagccttcaatatacattctgctttgaattaattttttcaaatcaataaattatgtagacatttaaaatcaaatatcaagtagaattgaaaaatgtgagttacataagttaaaaacttactttaaatcttaccttctataggtagctctaaataaattcatatggttatatggcaaaaaaaaaaaaaaaaaaaaaaaaaaaaaaaaaaaaaaaaaaaaaaaaaaaaaaaa

SEQ ID NO: 3535 - DNA, 2594 bp, Homo sapiens; identical to SEQ ID NO: 2321

SEQ ID NO: 3536 - DNA, 3250 bp, Homo sapiens; identical to SEQ ID NO: 1987

SEQ ID NO: 3537 - DNA, 4053 bp, Homo sapiens; identical to SEQ ID NO: 120

SEQ ID NO: 3538 - DNA, 1600 bp, Homo sapiens; identical to SEQ ID NO: 121

SEQ ID NO: 3539 - DNA, 5820 bp, Homo sapiens; identical to SEQ ID NO: 214

SEQ ID NO: 3540 - DNA, 5826 bp, Homo sapiens; identical to SEQ ID NO: 209

SEQ ID NO: 3541 - DNA, 3176 bp, Homo sapiens; identical to SEQ ID NO: 810

SEQ ID NO: 3542 - DNA, 2030 bp, Homo sapiens
tggaggggcagcgtggggaacgagaaactctttgcctgtagggacccttctagctgcaaacttaaaaatgtatgtggcaagatgcaacccaagcaccgagcaggattccagacgagttataatcattctgaacggggagaggaaaggtaatgcaggtggtgaaggagcaggttatgagagcacttacaaccaagcctagctccctggaccagttcaagagcaaactgcagaacctgagctacactgagatcctgaaaatccgccagtccgagaggatgaaccaggaagatttccagtcccgcccgattttggaactaaaggagaagattcagccagaaatcttagagctgatcaaacagcaacgcctgaaccgccttgtggaagggacctgctttaggaaactcaatgcccggcggaggcaagacaagttttggtattgtcggctttcgccaaatcacaaagtcctgcattacggagacttagaagagagtcctcagggagaagtgccccacgattccttgcaggacaaactgccggtggcagatatcaaagccgtggtgacgggaaaggactgccctcatatgaaagagaaaggtgcccttaaacaaaacaaggaggtgcttgaactcgctttctccatcttgtatgactcaaactgccaactgaacttcatcgctcctgacaagcatgagtactgtatctggacggatggactgaatgcgctactcgggaaggacatgatgagcgacctgacgcggaatgacctggacaccctgctcagcatggaaatcaagctccgcctcctggacctggaaaacatccagatccctgacgcacctccgccgattcccaaggagcccagcaactatgacttcgtctatgactgtaactgaagtggccgggcccagacatgccccttccaaaactggaacacctagctaacaggagagaggaatgaaaacacacccacgccttggaaccgtcctttggtaaagggaagctgtgggtccacattcccttcagcatcacctctagccctggcaactttcagcccctagctggcatcttgctcaccgccctgattctgttcctcggctccactgcttcaggtcacttcccatggctgcagtccactggtgggacaagagcaaagcccactgccagtaagaaggccaaagggcccttccatcctagccctctgcaggcatgcccttccttcccttgggcaggaaagccagcagccccagactgcccaaaaacttgcccaccagaccaagggcagtgccccaaggcccctgtctggaggaaatggcctagctatttgatgagaagaccaaaccccacatcctcctttcccctctctctagaatcatctcgcaccaccagttacacttgaattaagatctgcgctcaaatctcctcccacctctctccctgcttttgccttgctctgttcctctttggtcccaagagcagcagccgcagcctcctcgtgatcctccctagcataaatttcccaaacagtccacaggtcccatgcccactttgcgtctgcactgtgatcgtgacaaatcttccctcctcaccagctagtctggggtttcctctccctgccccaggccagaactgccttcttcatttccacccacgctcccagcctcttagctgaaagcacaaatggtgaaatcagtagtctcgctccatctctaatagactaaacctaaatgcctctaggacggactgttgctatccaagcgtttggtgttaccttctcctgggaggtcctgctgcaactcaagttccacaggatggtcaagctgtcagacatccaagtttacatcattgtaattattactggtatttacaatttgcaagagttttgggttagtttttttttttttttgctttgtttttgtacaaaagagtctaacattttttgccaaacagatatatatttaatgaaaagaagagatacataaaaaaaaaaaaaaaaaaaaaaaaaaaaaaaaaaaaaaaaaaaaaaaaaaaaa

SEQ ID NO: 3543 - DNA, 3804 bp, Homo sapiens; identical to SEQ ID NO: 2505

SEQ ID NO: 3544 - DNA, 1103 bp, Homo sapiens; identical to SEQ ID NO: 2512

SEQ ID NO: 3545 - DNA, 1717 bp, Homo sapiens
aaagagattaccagccacagacgggtcatgagcccggtattactgctggccctcctggggttcatcctcccactgccaggagtgcaggcgctgctctgccagtttgggacagttcagcatgtgtggaaggtgtccgacctgccccggcaatggacccctaagaacaccagctgcgacagcggcttggggtgccaggacacgttgatgctcattgagagcggaccccaagtgagcctggtgctctccaagggctgcacggaggccaaggaccaggagccccgcgtcactgagtaccggatgggccccggcctctccctgatctcctacaccttcgtgtgccgccaggaggacttctgcaacaacctcgttaactccctcccgctttgggccccacagcccccagcagacccaggatccttgaggtgcccagtctgcttgtctatggaaggctgtctggaggggacaacagaagagatctgccccaaggggaccacacactgttatgatggtctcctcaggctcaggggaggaggcatcttctccaatctgagagtccagggatgcatgccccagccagtttgcaacctgctcaatgggacacaggaatttgggcccgtgggtatgactgagaactgcgatatgaaagattttctgcagctcaagccagtaggattacttgaggaacacaatgtgggagagaaagagcgtggtcaaggacaacaccaatgtgttcagctagactggcagaaacgagccgccacgggtattttctgacctgtcatcgggggaccaccattatgacacacggaaacttggctcaagaacccactgattggaccacatcgaataccgagatgtgcgaggtggggcaggtgtgtcaggagacgctgctgctcctagatgtaggactcacatcaaccctggtggcgacctaaagctgcagcgctgttggggctcaaaattcccagaagaccaccatccactcagcccctcctggggtgcttgtggcctcctatacccacttctgctcctcggacctgtgcaatagtgccagcagcagcagcgttctgctgaactccctccctcctcaagctgcccctgtcccaggagaccggcagtgtcctacctgtgtgcagccccttggaacctgttcaagtggctccccccgaatgacctgccccaggggcgccactcattgttatgatgggtacattcatctctcaggaggtgggctgtccaccaaaatgagcattcagggctgcgtggcccaaccttccagcttcttgttgaaccacaccagacaaatcgggatcttctctgcgcgtgagaagcgtgatgtgcagcctcctgcctctcagcatgagggaggtggggctgagggcctggagtctctcacttggggggtggggctggcactggccccagcgctgtggtggggagtggtttgcccttcctactaactctattacccccacgattcttcaccgctgctgaccacccacactcaacctccctctgacctcataacctaatggccttggacaccagattctttcccattctgtccatgaatcatcttccccacacacaatcattcatatctactcacctaacagcaacactggggagagcctggagcatccggacttgccctatgggagaggggacgctggaggagtggctgcatgtatctgataatacagaccctgtcctccca

SEQ ID NO: 3546 - DNA, 2894 bp, Homo sapiens
cggaccccacggctgcaaactgatctggcgcgcggggaggaggagagcgcaggcgagcgaacccgcgagagagggagagagcgagcgagcaacagcgagagcgagagcgagagagccgggaggcagagggagtagtgaccgccttccggagccgggattcatgcctgtcctcgggaccagcgaaggggactttacggctgagtatgagccaggctgctaggagccaggtacccccacgcctgcagtccccgcgccgtgcccggaatgcgagctggacgcagggctctcccaagttcccaccgagccgaataaaaagcgtccgcccgcagctctccgccaaagacggacattgactccaggactccacagaatggagcaagaatgagaggaaaaaggccggcagaaaagcatgaactggaggtttgttgagctcctctacttcctgtttatatggggccgtatctcagtgcagccctcccaccaggaaccagctgggacagaccaacatgtctccaaggaatttgattggctcatttcagacagggggcctttccaccactccaggagctacctatcctttgtggaaagacaccgtcaaggatttacaaccagatataaaatatacagggagtttgcccgttggaaggtgaggaacacagccatcgagaggagagatctggtccgccatccagtgcccctcatgccggagtttcaaaggagcatccgcctgcttggcaggagacctaccactcagcagttcatcgataccatcatcaaaaagtacggcacccacctgctcatctcagccacattgggaggggaggaggctttgaccatgtatatggacaaaagtcgcctcgacaggaagtcagggaatgccactcaaagtgttgaagctctgcaccagctcgcatcatcctactttgttgaccgtgatggtaccatgaggaggcttcatgagatccagatatcaactggagcaatcaaggtcacagagacacgcactgggcctctgggctgtaacagttatgacaatctggactctgtgagttccgtccttctgcaaagcacggagagcaaactgcaccttcaaggtcttcagataatctttcctcagtatctgcaagagaagtttgtccagtcggccttgagctatatcatgtgcaatggggagggggagtacctgtgccagaacagccagtgtcgctgccaatgtgccgaggagtttccgcagtgcaactgccccatcacggacatccagatcatggagtacacgctggccaacatggccaagtcttgggccgaagcttataaggacctggagaattcagatgagtttaaatcatttatgaagcgcctccccagcaaccacttcctgaccatcggaagcatccatcagcactggggcaatgactgggacctgcagaaccgctacaagctcctgcagagtgccacggaggcacagagacaaaagatccaacgcactgcccgcaagcttttcggcctcagtgtacgctgtcgccacaatcccaaccaccagctgcctagagagaggacaattcagcagtggcttgcaagggtccagtcactcctctactgtaatgagaatgggttttggggaaccttcctggagagccagcggagctgcgtgtgccacggcagcaccacgctgtgccagcgccccatcccctgcgtgataggcgggaacaacagctgcgccatgtgcagcctggccaacatctccctctgcggctcctgcaacaagggctacaagctgtatcgaggccgctgtgaaccacagaacgtggactcggagcggagcgagcagttcatcagctttgagactgacctggacttccaggacctggagctgaagtacctgctgcagaagatggactcacgcctctacgtccacaccaccttcatcagcaacgagatccgcctcgacaccttctttgaccctcggtggcgcaagcgcatgtccctcactctcaagagcaacaagaaccgcatggacttcatccacatggtgatcggcatgtccatgcgcatctgccagatgcgcaacagcagcctggaccccatgttctttgtctatgtcaacccctttagcgggagccattcggagggctggaacatgcccttcggggaatttggctacccacgctgggagaagatccgtctccaaaacagccagtgctacaactggactcttttgctgggcaatcggtggaaaacatttttcgagacggtccacatctacctacgtagtcggactcggctacctaccctactgcgaaatgagactggccagggccccgtggacctgtcggatccctccaagaggcagttctacatcaagatctcagacgtgcaggtgtttgggtatagcctgaggttcaacgccgacctcctgcgcagtgcagtgcagcaggtcaaccagtcctacacacagggcggccagttctattcctcttcgtcagtgatgctcctcttgttggatattcgggaccgaattaatcgcctggcccctcctgtggccccggggaaaccccagctggacttgttctcctgtatgctgaaacaccgcctgaaactgaccaacagcgagatcatcagggtgaaccacgccttggacctgtacaacacggagatcctcaaacagtcggaccagatgacagccaaactctgctaacccgggactccttgccatggacttttcctgttgttgtacacacacaacagaacaaaatgaagcaaaacaaaacaaaaaaacccacaaaaatttgtaaaatgtaattaatattcaaagaaaaggaggaaaatcttcatttgttggaaatgaaaacgttctagcaactgtataaaaaaaaaaaaaaaaaaaaaaaaaaaaa

SEQ ID NO: 3547 - DNA, 2270 bp, Homo sapiens
cgcttgcgggcgccgggcggagctgctgcggatcaggacccgagccgattcccgatcccgacccagatcctaacccgcgcccccgccccgccgccgccgccatgtacgacgcagagcgcggctggagcttgtccttcgcgggctgcggcttcctgggcttctaccacgtcggggcgacccgctgcctgagcgagcacgccccgcacctcctccgcgacgcgcgcatgttgttcggcgcttcggccggggcgttgcactgcgtcggcgtcctctccggtatcccgctggagcagactctgcaggtcctctcagatcttgtgcggaaggccaggagtcggaacattggcatcttccatccatccttcaacttaagcaagttcctccgacagggtctcggcaaatgcctcccggccaatgtccaccagctcatctccggcaaaataggcatctctcttaccagagtgtctgatggggaaaacgttctggtgtctgactttcggtccaaagacgaagtcgtggatgccttggtatgttcctgcttcatgcctttctacagtggccttatccctccttccttcagaggcgtgcgatatgtggatggaggagtgagtgacaacgtacccttcattgatgccaaaacaaccatcaccgtgtcccccttctatggggagtacgacatctgccctaaagtcaagtccacgaactttcttcatgtggacatcaccaagctcagtctacgcctctgcacagggaacctctaccttctctcgagagcttttgtccccccggatctcaaggtgctgggagagatatgccttcgaggatatttggatgcattcaggttcttggaagagaagggcatctgcaacaggccccagccaggcctgaagtcatcctcagaagggatggatcctgaggtcgccatgcccagctgggcaaacatgagtctggattcttccccggagtcggctgccttggctgtgaggctggagggagatgagctgctagaccacctgcgtctcagcatcctgccctgggatgagagcatcctggacaccctctcgcccaggctcgctacagcactgagtgaagaaatgaaagacaaaggtggatacatgagcaagatttgcaacttgctacccattaggataatgtcttatgtaatgctgccctgtaccctgcctgtggaatctgccattgcgattgtccagagactggtgacatggcttccagatatgcccgacgatgtcctgtggttgcagtgggtgacctcacaggtgttcactcgagtgctgatgtgtctgctccccgcctccaggtcccaaatgccagtgagcagccaacaggcctccccatgcacacctgagcaggactggccctgctggactccctgctcccccgagggctgtccagcagagaccaaagcagaggccaccccgcggtccatcctcaggtccagcctgaacttcttcttgggcaataaagtacctgctggtgctgaggggctctccacctttcccagtttttcactagagaagagtctgtgagtcacttgaggaggcgagtctagcagattctttcagaggtgctaaagtttcccatctttgtgcagctacctccgcattgctgtgtagtgacccctgcctgtgacgtggaggatcccagcctctgagctgagttggttttatgaaaagctaggaagcaacctttcgcctgtgcagcggtccagcacttaactctaatacatcagcatgcgttaattcagctggttgggaaatgacaccaggaagcccagtgcagagggtcccttactgactgtttcgtggccctattaatggtcagactgttccagcatgaggttcttagaatgacaggtgtttggatgggtgggggccttgtgatggggggtaggctggcccatgtgtgatcttgtggggtggagggaagagaatagcatgatcccacttccccatgctgtgggaaggggtgcagttcgtccccaagaacgacactgcctgtcaggtggtctgcaaagatgataaccttgactactaaaaacgtctccatggcgggggtaacaagatgataatctacttaattttagaacacctttttcacctaactaaaataatgtttaaagagttttgtataaaaatgtaaggaagcgttgttacctgttgaattttgtattatgtgaatcagtgagatgttagtagaataagccttaaaaaaaaaaaaaaaaaaaaaaaaaaaaaaaaaaaaaaaaaaaa

SEQ ID NO: 3548 - DNA, 2500 bp, Homo sapiens
gctagtgcaaatcttcaggggccgtccaggactacagagctgtttcaccctaccttggcttcaatctcttcccccatgctcgaaggtgcggagctgtacttcaacgtggaccatggctacctggagggcctggttcgaggatgcaaggccagcctcctgacccagcaagactatatcaacctggtccagtgtgagaccctagaagacctgaaaattcatctccagactactgattatggtaactttttggctaatcacacaaatcctcttactgtttccaaaattgacactgagatgaggaaaagactatgtggagaatttgagtatttccggaatcattccctggagcccctcagcacatttctcacctatatgacgtgcagttatatgatagacaatgtgattctgctgatgaatggtgcattgcagaaaaaatctgtgaaagaaattctggggaagtgccaccccttgggccgtttcacagaaatggaagctgtcaacattgcagagacaccttcagatctctttaatgccattctgatcgaaacgccattagctccattcttccaagactgcatgtctgaaaatgctctagatgaactgaatattgaattgctacgcaataaactatacaagtcttaccttgaggcattctataaattctgtaagaatcatggtgatgtcacagcagaagttatgtgtcccattcttgagtttgaggccgacagacgtgcttttatcatcactcttaactcctttggcactgaattgagcaaagaagaccgagagaccctctatccaaccttcggcaaactctatcctgaggggttgcggctgttggctcaagcagaagactttgaccagatgaagaacgtagcggatcattacggagtatacaaacctttatttgaagctgtaggtggcagtgggggaaagacattggaggacgtgttttacgagcgtgaggtacaaatgaatgtgctggcattcaacagacagttccactacggtgtgttttatgcatatgtaaagctgaaggaacaggaaattagaaatattgtgtggatagcagaatgtatttcacagaggcatcgaactaaaatcaacagttacattccaattttataacccaagtaaggttctcaaatgtagaaaattataaatgttaaaaggaagttattgaagaaaataaaagaaattatgttatattatctagactacacaaaagtaagccacactatatcttcatgagttgcaaatccatggaaacacagtaaaccagccctgaaacaaagcatttccttgttttcagtggtattagatcttgtttccacatgtctgtctcattcttcactgggccttacaggttagttttaattaactctatggtatttttcttattcttgtttgatcatgttaaaaattggacctaataaaagtattttattcttgcttttccatgcttctctacaggtccaaatactgaatgtctcctttactttttctcttttaaatttttttctagacagggtctcactctgtcacctaggctacagtgcagtggtgtgatcacagctcactgcagcctcgacttcccaggctcaagtgatcctcccagctctcagcctccaaagtagctggcactacaagtgtacacccccacacaaggctaagttttgtattttttgtagagacagggtttcaacatattatccaggctggtgtcgaattcctgggctccagggatccacagtcccccttggcctcccaaagtgttgggattacatgcatgagccactgtgctgggcttcatttacattttaactgtctgttccttgcctagattcacagaaatccaaagctgtatgtagtcaacatggttcacaagtgttggaaaatgtgttttttgttttgttttgttttgtttcgttttgttttgagacagagtttccctctgtcgcccaggctagagtgcaatggcgtgatctcggctcactgcaacctccacctcccagattcaagcaactctctgcctcagcctcccgagtagctgggattacaagcacccaccactacactcagctaattttttgtatttttagtagagccggggtttcaccatcttggccaggctgatcttgaactcctgagctcatgatccacccgcctcagcctcccaaagtgctgggattacaggccccttgttcagccactgcacctggccccttattttgtttttgttttctaatatactttgatgtaatcagcttgagaaagcaacacaatttcaaatcctatcttctagatgcaagcagtgttaaatttgttaataaatttgcttttcacacctttctttaaataaaaggtatatctctctttaaaaaaaaaaaaaaaaaaaaaaaaaaaaaaaaaaaaaaaaaaaaaaaaaaaaaaaaaaaaaaaaaaaaaaaaaaaaaaaaaaaaaaaaaaaaaaaaaaaaaaaaaaaaaaaaaaaaaaaaa

SEQ ID NO: 3549 - DNA, 3822 bp, Homo sapiens; identical to SEQ ID NO: 597

SEQ ID NO: 3550 - DNA, 3913 bp, Homo sapiens; identical to SEQ ID NO: 2282

SEQ ID NO: 3551 - DNA, 3494 bp, Homo sapiens
ctcctgtactgacaactccatgcagttcggaaccagaacgactacggctgaaccagggttcatggggacatggcaaaacgctgatactaacctcttattcagaatgtcccaacaggccatccgttgcacactggtaaactgcacatgtgaatgttttcagccagggaagattaacctgaggacttgtgatcagtgtaaacatggctgggtggcacatgccttggataagctcagcacgcagcacctgtaccaccccacccaagtggagattgtgcagtccaacgtcgtgtttgacatcagcagcctgatgctctatgggacacaagcagtgcctgtgcggctaaagatcctgctggaccgtctcttcagcgtcctgaagcaagaggaggtactgcacatactgcacggccttggctggactctgcgggactatgtccgaggatacatccttcaggatgctgctggcaaggtgctggaccgctgggccatcatgtctcgagaagaggaaatcatcacccttcagcagtttctgcggtttggagaaaccaaatccattgtggagctgatggcaattcaggagaaagaagggcaggccgtggctgtaccatcttcaaagacagactcagatataaggactttcattgagagcaataatcgcaccaggagtcccagcctccttgctcacttagagaacagcaatccttccagcattcatcacttcgaaaacatcccaaacagccttgcatttctgcttccattccagtacataaaccctgtctcagcaccactgctagggttgcctccaaatgggctactgttagagcaaccagggttgaggctgcgggaacccagcctttcaactcagaatgaatataatgagagcagcgaatccgaagtttctcccacaccttataagaatgatcaaacacccaatagaaatgccctgaccagcattactaatgtggagcccaaaaccgagccagcctgtgtctctcccattcagaattctgccccagtcagtgatctaaccaaaactgaacacccaaaaagctcattccggattcatcggatgagaaggatggggtcagcctctaggaaaggaagagtgttctgtaatgcatgtgggaagacattctatgacaaaggtactctcaaaattcattacaatgctgttcacctgaagatcaaacatcgatgcaccattgaaggttgcaacatggtctttagctccctccgaagtcgtaatcgccacagtgcaaaccccaatcctcgccttcacatgcctatgctaaggaataaccgagataaagatttaattcgggccacctcaggagctgccacccctgtcatagcaagtacaaaatcaaatctggcactcacaagccctggccgacccccaatgggttttaccactccccctctagaccctgtcttgcaaaatcctctccctagccagctagtattttctgggctaaagactgtacaaccagttcctccattttatagaagtttactcactccaggggaaatggtgagtcctccaacctccctcccaaccagtcccatcattccaaccagtggtaccatagagcagcaccccccgccaccctctgagccagtagtgccagcagtgatgatggccacccatgagcccagtgctgacctggcacccaagaaaaagcccaggaagtcaagcatgcctgtgaagattgagaaggaaattattgataccgccgatgagtttgatgatgaagatgatgaccccaatgatggtggagctgtggtcaatgacatgagccatgacaatcattgtcactcccaagaggagatgagcccaggcatgtctgtgaaggacttttctaagcataacaggacccggtgcatttcaaggactgaaataaggagggccgacagcatgacttctgaagaccaagaacctgagcgggactatgagaacgagtctgagtcttcggagcccaaactgggcgaggaatccatggaaggggatgagcacattcacagcgaagtgagtgaaaaagtcctgatgaatagtgagaggcctgatgagaaccacagtgagccctctcaccaggacgtcatcaaggtgaaggaagaatttacagaccccacttacgacatgttttacatgagccagtatggactgtacaatggtgggggtgccagcatggccgccttgcatgagagctttacatcgtctctgaattatggcagccctcaaaagttctccccagaaggtgacctatgttctagcccagaccccaaaatctgttatgtgtgcaagaagagtttcaaaagctcctacagtgtgaaacttcactacaggaacgttcacttgaaagagatgcacgtctgcacagtggctggttgcaatgctgcattcccctctcgccgaagccgagacagacacagtgccaacataaacctacatcgtaaactgttgaccaaagaactcgatgacatgggcctggactcgtcgcagccctcccttagcaaggacctccgcgatgaatttttggtgaagatatatggtgcccagcaccccatggggctcgatgtcagggaagacgcctcctctcccgcagggactgaagactcccacctgaacgggtatgggagaggcatggcagaggactacatggtccttgacttgagcaccacctccagcctccagtccagcagcagtatccattcctccagagaatccgacgcaggcagcgatgaggggattcttctcgatgacattgacggggcgagtgacagtggggagtcggcacacaaggccgaggcccctgccctccctggcagcctaggggctgaagtttcaggatctcttatgttcagcagcttgtctgggagcaatggtgggatcatgtgcaacatttgccacaaaatgtacagcaacaaggggaccctgagagtgcactacaaaactgtgcatttgagagaaatgcacaagtgcaaagtcccaggttgcaatatgatgttttcctctgtacgaagccgaaatcggcacagtcagaaccctaatctccacaaaaacattcccttcacttcagtagattagtctcagaatggacactacaaatgccagctctcaccagatggcctacgtgtttgaactgccatagtcagtgtgcgcttatgtacttggggtgtgtgtgtgtgtgtgtgtgtgtgtgcatttatgtatgctctgtggctacatatacacacacgtatttccttgagataaacaagataaacactaggtgcttttgaatttttttcacttccctttatagttttgggaaaggagtgggatctttgatttcagggtgaaaacagagtacccctttaaacacacacacacacacatgcacatacacacacacacacacacacacacacagtgtgcaactagccccagttttgacagaataattcttggtcttccccaaagagacaatttgttgtacccatgactgttgcctgca

SEQ ID NO: 3552 - DNA, 2221 bp, Homo sapiens; identical to SEQ ID NO: 678

SEQ ID NO: 3553 - DNA, 3038 bp, Homo sapiens; identical to SEQ ID NO: 2423

SEQ ID NO: 3554 - DNA, 2933 bp, Homo sapiens
tcaatcagaaagcccttttcattgcaggagaagaggacaaagatactcagagagaaaaagtaaaagaccgaagaaggaggctggagagaccaggatccttccagctgaacaaagtcagccacaaagcagactagccagccggctacaattggagtcagagtcccaaagacatgggcttgttagagtgctgtgcaagatgtctggtaggggccccctttgcttccctggtggccactggattgtgtttctttggggtggcactgttctgtggctgtggacatgaagccctcactggcacagaaaagctaattgagacctatttctccaaaaactaccaagactatgagtatctcatcaatgtgatccatgccttccagtatgtcatctatggaactgcctctttcttcttcctttatggggccctcctgctggctgagggcttctacaccaccggcgcagtcaggcagatctttggcgactacaagaccaccatctgcggcaagggcctgagcgcaacgtttgtgggcatcacctatgccctgaccgttgtgtggctcctggtgtttgcctgctctgctgtgcctgtgtacatttacttcaacacctggaccacctgccagtctattgccttccccagcaagacctctgccagtataggcagtctctgtgctgatgccagaatgtatggtgttctcccatggaatgctttccctggcaaggtttgtggctccaaccttctgtccatctgcaaaacagctgagttccaaatgaccttccacctgtttattgctgcatttgtgggggctgcagctacactggtttccctgctcaccttcatgattgctgccacttacaactttgccgtccttaaactcatgggccgaggcaccaagttctgatcccccgtagaaatccccctttctctaatagcgaggctctaaccacacagcctacaatgctgcgtctcccatcttaactctttgcctttgccaccaactggccctcttcttacttgatgagtgtaacaagaaaggagagtcttgcagtgattaaggtctctctttggactctcccctcttatgtacctcttttagtcattttgcttcatagctggttcctgctagaaatgggaaatgcctaagaagatgacttcccaactgcaagtcacaaaggaatggaggctctaattgaattttcaagcatctcctgaggatcagaaagtaatttcttctcaaagggtacttccactgatggaaacaaagtggaaggaaagatgctcaggtacagagaaggaatgtctttggtcctcttgccatctataggggccaaatatattctctttggtgtacaaaatggaattcattctggtctctctattaccactgaagatagaagaaaaaagaatgtcagaaaaacaataagagcgtttgcccaaatctgcctattgcagctgggagaagggggtcaaagcaaggatctttcacccacagaaagagagcactgaccccgatggcgatggactactgaagccctaactcagccaaccttacttacagcataagggagcgtagaatctgtgtagacgaagggggcatctggccttacacctcgttagggaagagaaacagggtgttgtcagcatcttctcactcccttctccttgataacagctaccatgacaaccctgtggtttccaaggagctgagaatagaaggaaactagcttacatgagaacagactggcctgaggagcagcagttgctggtggctaatggtgtaacctgagatggccctctggtagacacaggatagataactctttggatagcatgtctttttttctgttaattagttgtgtactctggcctctgtcatatcttcacaatggtgctcatttcatgggggtattatccattcagtcatcgtaggtgatttgaaggtcttgatttgttttagaatgatgcacatttcatgtattccagtttgtttattacttatttggggttgcatcagaaatgtctggagaataattctttgattatgactgttttttaaactaggaaaattggacattaagcatcacaaatgatattaaaaattggctagttgaatctattgggattttctacaagtattctgcctttgcagaaacagatttggtgaatttgaatctcaatttgagtaatctgatcgttctttctagctaatggaaaatgattttacttagcaatgttatcttggtgtgttaagagttaggtttaacataaaggttattttctcctgatatagatcacataacagaatgcaccagtcatcagctattcagttggtaagcttccaggaaaaaggacaggcagaaagagtttgagacctgaatagctcccagatttcagtcttttcctgtttttgttaactttgggttaaaaaaaaaaaaagtctgattggttttaattgaaggaaagatttgtactacagttcttttgttgtaaagagttgtgttgttcttttcccccaaagtggtttcagcaatatttaaggagatgtaagagctttacaaaaagacacttgatacttgttttcaaaccagtatacaagataagcttccaggctgcatagaaggaggagagggaaaatgttttgtaagaaaccaatcaagataaaggacagtgaagtaatccgtaccttgtgttttgttttgatttaataacataacaaataaccaacccttccctgaaaacctcacatgcatacatacacatatatacacacacaaagagagttaatcaactgaaagtgtttccttcatttctgatatagaattgcaattttaacacacataaaggataaacttttagaaacttatcttacaaagtgtattttataaaattaaagaaaataaaattaagaatgttctcaatcaaaaaaaaaaaaaaa

SEQ ID NO: 3555 - DNA, 3777 bp, Homo sapiens
aaaggtttctggtgatgatgtagcatccgaggctcttaggaaatcggggctgcaagcactggcccctgcttggggatggtgggaccctcgcccggagcgtaacgcctgacagtttccacctggatgtttgaggttgtgtagatgtggccggcacccttgagagtggagctagggggtgcagactgagcagtgaacagaaggagccttggacagggctgggccagcctcccgagttccaggagcgaattgcaaacccaccgggaaaatgagcgaagagacggtccccgaggctgcctcgccgccgcccccgcaggggcagccttactttgaccgcttctcagaggacgaccccgagtacatgcgccttcgcaaccgggcggcggacctgcggcaggacttcaacctgatggagcagaagaagcgcgtcaccatgatcctgcagagtccctctttcagggaggagctggaaggcctcatccaggagcagatgaagaaggggaacaactcctccaacatctgggccctgcgacagatcgcggacttcatggccagcacctcccacgcagtcttcccgacatcttccatgaatgtctccatgatgacgcctatcaatgacctccacacagctgactccctgaacctggccaaaggggagcggctcatgcggtgcaagatcagcagtgtctaccgactcctggacctctatggctgggcccagctgagtgacacctatgtcacgttgagagtcagcaaggagcaggaccacttcctgatcagccctaagggagtttcttgcagtgaagtcacagcgtccagcctgatcaaggtgaacattctgggagaggtggtggagaagggcagcagctgcttcccagtggacaccacaggcttctgtctgcactcggccatctatgcagcgaggcccgacgtgcgctgcatcatccacctgcacacaccggccacagcagcggtgtcggccatgaagtggggcctcctgcctgtctcccacaatgccctgctggtgggggacatggcctattatgacttcaatggggaaatggagcaggaagccgatcggatcaacctgcagaagtgccttggacccacctgcaagatcctggtgctaagaaaccatggagtggttgctctgggtgacacggtagaggaggcattttacaagatcttccacctgcaggctgcatgtgagatacaggtgtcggctctgtccagtgccgggggagtggagaacctcatcctcctggagcaggagaagcaccggccccatgaggtgggctccgtgcagtgggccgggagcacctttgggcctatgcagaagagtcggctgggggagcatgagtttgaggccctcatgaggatgctggacaacctgggctacagaacaggttacacgtatcgccacccctttgttcaagagaaaaccaaacacaaaagtgaggtggagattccagccacggtcacagccttcgtgtttgaggaggacggtgccccggtgcccgccctgcgacagcatgcccagaagcagcagaaggagaagacccgctggctcaatacgcccaacgcctacctgcgggtcaatgtggccgatgaggtccagaggagcatgggcagcccccgacccaagaccacgtggatgaaggctgacgaggtggagaaatccagcagtggcatgccgattcgcatcgaaaacccaaaccaatttgtgcctctctatactgacccccaggaagtactggagatgaggaacaagattcgagaacaaaaccgacaagatgtgaagtcagcggggcctcagtcccagctcctggcgagcgtcattgccgagaagagccgaagcccgtctacagagagccagctgatgtccaagggagacgaggataccaaagacgattcagaggagacggtgcccaaccccttcagccaactcactgaccaggagttggaggagtacaagaaagaggtggagaggaagaaactagaacttgatggagagaaagaaactgccccagaagagcctggctcacctgcaaagtctgcacctgcttctccagtgcagagcccagcgaaggaggcagagacaaagagccctttagtctctccttccaagtctttagaggaaggtactaagaagacagaaacaagcaaagccgccaccacagagcccgaaacaacccagccggaaggggtggtggtcaacgggagggaggaggagcagacggcagaggaaatcctcagcaaaggcctgagccagatgaccaccagtgctgacacggatgttgatacctctaaggacaaaaccgagtcggtcaccagcggccccatgtccccagagggctcaccttccaagtctccctcaaagaagaaaaagaaattccgaaccccctccttcctgaaaaagagcaaaaagaaggagaaagtggagtcctgattcatgacacccttgggctccctcctgcctcctctctctcctccccttcccttctcccatctctgtccctgcaagcacagggctaaggagggatagagtaggaccctggaccacattcggaaggggaacttagagatcacccgaccaacccttcgttttacagttgcccaagagaaatcaggtgacttgcccaaggtcacacagctagttagcggcagagcctgcactcgaattcaggtctcctgacttccagtccagtgctccttctactacacaacactgcctagttgtgggctgcctttgtttggatgctgtccaccaatctgagcctagggcaagaaggccagaaatgggccgtgagctctcacaggctcagactaaatcagaggtcaaggcttcccctgagtaaggtccatttcttcccaggaatccaatctcctgtggatggagctatctctacatttaaaaatctcttctcttttccactttgggtccctgccctgctgctcaaagtgactagccaaattgacccctccaacagaaagtaatctttgttcccaagggctgatggcttagcttgtactaccccaaacattaaccctgagctttcttcatggaacctcttgaatgatggatggaagagctataagaggtggtaggcataggggcaagccatgtaagctgaggattggggatggtttcatcaacataagaggccaggaacttgacccctttgaattgtgcatctcaggcacttcaaaactaaaaccaaatttagcataggaaaaagttgtttaatgctcagggcagaaatttggggaagttgaaatcctctgttggctttgggttgtataaggaggatcaaaacaacagaggaaatgctgactttctagctttgcatgacacctggagcaatgcactgtacctgcctcactcctgtccagtggtcaggtttcccctgaccttccctcacccccagaaacacttgcttacagaccgaaactggcatcttactcttggcaccttgacttgcaccctctgaggttccaactcagtcattctttgtccagcagaggagaatcagaaatgagcccttcaggattaatcctcttgcaccagctctcagagaaatgctgggtatccctgtccttgtccctatctgtccatcctggggcctggtaatggccacagttattgttttaaatgccaacactgtcttctcatgttcttccgtggggcattgattaatgagcatttgttggctcctaaaaattagacaatccattctcttgaaaaaaaaaaaaaaaaaaaaaaaaaaaaaaaaaaaaaaa

SEQ ID NO: 3556 - DNA, 2645 bp, Homo sapiens; identical to SEQ ID NO: 1632

SEQ ID NO: 3557 - DNA, 6276 bp, Homo sapiens; identical to SEQ ID NO: 2439

SEQ ID NO: 3558 - DNA, 1818 bp, Homo sapiens
gaacagggctggggtaaggccaggaaaattcaacaggcactaaaaatattgtcaagctgctgacagcacagccagaggccccaggcctgggtggcatccagacagccctgtcctttctagacagccccctcctccaggctcagggacctgtctggctgtgagctcccaggaggtcccaggggtgtgacctccctccctccctccctccctcttcccttcaccccaggccagcccagggccagctataaagctggcccagcctggctctcagcacacccagctgcctgagaccctccttcaacctccctagaggacagccccactctgcctcctgctcccccagggcagcaccatgtggcccctgtggctctgctgggcactctgggtgctgcccctggctggccccggggcggccctgaccgaggagcagctcctgggcagcctgctgcggcagctgcagctcagcgaggtgcccgtactggacagggccgacatggagaagctggtcatccccgcccacgtgagggcccagtatgtagtcctgctgcggcgcagccacggggaccgctcccgcggaaagaggttcagccagagcttccgagagctcagggcgactgtgaccctgaagcaccaatgaccgagggcacccgctgctgccgccaggagatgtacattgacctgcaggggatgaagtgggccaagaactgggtgctggagcccccgggcttcctggcttacgagtgtgtgggcacctgccagcagcccccggaggccctggccttcaattggccatttctggggccgcgacagtgtatcgcctcggagactgcctcgctgcccatgatcgtcagcatcaaggagggaggcaggaccaggccccaggtggtcagcctgcccaacatgagggtgcagaagtgcagctgtgcctcggatggggcgctcgtgccaaggaggctccagccataggcgcctggtgtatccattgagccctctaactgaacgtgtgcatagaggtggtcttaatgtaggtcttaactttatacttagcaagttactccatcccaatttagtgctcctgtgtgaccttcgccctgtgtccttccatttcctgtctttcccgtccatcacccatcctaagcacttacgtgagtaaataatgcagctcagatgctgagctctagtaggaaatgctggcatgctgattacaagatacagctgagcaatgcacacattttcagctgggagtttctgttctctggcaaattcttcactgagtctggaacaataataccctatgattagaactggggaaacagaactgaattgctgtgttatatgaggaattaaaaccttcaaatctctatttcccccaaatactgacccattctggacttttgtaaacatacctaggcccctgttcccctgagagggtgctaagaggaaggatgaagggcttcaggctgggggcagtggacagggaattgggatacctggattctggttctgacagggccacaagctaggatctctaacaaacgcagaaggctttggctcgtcatttcctcttaaaaaggaggagctgggcttcagctctaagaacttcattgccctggggatcagacagcccctacctacccctgcccactcctctggagactgagccttgcccgtgcatatttaggtcatttcccacactgtcttagagaacttgtcaccagaaaccacatgtatttgcatgttttttgttaatttagctaaagcaattgaatgtagatactcagaagaaataaaaaatgatgtttcaaaaaaaaaaaaaaa

SEQ ID NO: 3559 - DNA, 1617 bp, Homo sapiens
ctgggttcgaacacggcacccgcactgcacatcatggtgcaggcctggtatatggacgacgccccgggcgacccgcggcaaccccaccgccccgaccccggccgcccagtgggcctggagcagctgcggcggctcggggtgctctactggaagctggatgctgacaaatatgagaatgatccagaattagaaaagatccgaagagagaggaactactcctggatggacatcataaccatatgcaaagataaactaccaaattatgaagaaaagattaagatgttctacgaggagcatttgcacttggacgatgagatccgctacatcctggatggcagtgggtacttcgacgtgagggacaaggaggaccagtggatccggatcttcatggagaagggagacatggtgacgctccccgcggggatctatcaccgcttcacggtggacgagaagaactacacgaaggccatgcggctgtttgtgggagaaccggtgtggacagcgtacaaccggcccgctgaccattttgaagcccgcgggcagtacgtgaaatttctggcacagaccgcctagcagtgctgcctgggaactaacacgcgcctcgtaaaggtccccaatgtaatgactgagcagaaaatcaatcactttctctttgcttttagaggatagccttgaggctaggttatctttcctttgtaagattatttgatcagaatattttgtaatgaaaggatctagaaagcaacttggaagtgtaaagagtcaccttcattttctgtaactcaatcaagactggtgggtccatggccctgtgttagttcatgcattcagttgagtcccaaatgaaagtttcatctcccgaaatgcagttccttagatgcccatctggacgtgatgccgcgcctgccatgtaagaaggtgcaatcctagataacacagctagccagatagaagacacttttttctccaaaatgatgccttggggtggggagtggtagggggaagagctcccaccctaaggggcacacactgagttgcttatgccacttccttgttcaaaataaagtaactgccttaatcttatactcatggcttggagttaccttattttcaggtatatgtgatattttgcctggtttgttaaaattgccccatttagattccttctataattgttcttatagataagtaatttatatatgagctgtgttagtattttttcagtgtgagatctctggattctttcacaatcaagctgttgaattttaacaagagtattagtacataaattttctactcaacaattccgagataggattatgcctagtttgtcatatcacagaaaaactccaagttaacttcatgttttggaagggcaggtcgtttttaaagtatttctttttttaactggatgaaaaatcttcatgttaggattaattttcttaatcacctccacactgtacagaggaaactcaagccttaaatgtttaagtaaactctgtctcagttttaggattaaaatacccaccggtggtgtgatgatgccatataccgcagggcttgcttctgtcaagtgtgactctatctcagtaattaaaataagtgctgatctaaaaa

SEQ ID NO: 3560 - DNA, 1558 bp, Homo sapiens; identical to SEQ ID NO: 2446

SEQ ID NO: 3561 - DNA, 3580 bp, Homo sapiens
agttctggccgctgtcccggtgcgcacggacgtggctcgagtttcctctgctctccgctctcgcccgctagctctcctcccttccgctcctgcttctctccgggtctcccgctccagctccagccccacccggccggtcccgcacggctccgggtagccatggaggaccccacgctctatattgtcgagcggccgcttcccgggtaccccgacgccgaggccccggagccttcctccgctggggctcaggcagcggaggagccgtcgggggccggctcagaagagctgatcaagtcggaccaggtgaacggcgtgctggtgctgagcctcctggacaaaatcatcggggccgtagaccagatccagctgactcaagcacagctggaggagcggcaggcggagatggagggcgcagtgcagagcatccagggcgagctgagcaagctgggcaaggcgcacgccaccacgagcaatacggtgagcaagctgctggagaaggtgcgcaaggtcagcgtcaacgtgaagaccgtgcgcggcagcctggagcgccaggcggggcagatcaagaagctggaggtcaacgaggccgagctgctgcggcgccgcaactttaaagtcatgatctaccaggatgaagtgaagctgccggccaaactgagcatcagcaaatcgctgaaagagtcggaggcgctgccagagaaggagggcgaggagctgggcgagggcgagcggcccgaggaggacgcagcggcgctggagctttcgtcggacgaggcggtggaggttgaggaggttattgaggagtcccgcgcagagcgtatcaagcgcagcggcctgcggcgcgtggacgacttcaagaaggccttctccaaggagaagatggagaagaccaaggtgcgtacccgcgagaacctggagaagacgcgcctcaagaccaaggaaaacctggagaagacgcggcacaccctggagaagcgcatgaacaagctgggcacgcgcctggtgcccgccgagcggcgcgagaaactgaagacgtcgcgagacaagttgcgcaaatccttcacgcccgaccacgtggtgtacgcgcgctccaagaccgcggtctacaaggtgccacccttcaccttccacgtcaagaagatccgcgagggccaggtggaagtgctcaaggccaccgagatggtggaggtgggcgccgacgacgacgagggcggcgcggagcgcggggaggccggcgacctgcggcgcgggagcagccccgacgtgcacgcgctgctggagatcaccgaggagtcggacgccgtgctggtggacaagagcgacagcgactgagccgcccccgctgccacccaccccattcctcgctccttccgaacttcctctttcgcattctctctcggctcgagctggctgagatttttctaaattgaaaacacgcccccctccccacacctccaggaactccactcccagtcttagagctgttaggacccgatggggaggcagcccccgcagtggacagcccccgcttggacacagtccgagtggaatgggaagggaatggtcaatccctgtcctggttgtccaagtcgggatctcagaggaaattgcagtgattccacggttaggcccccctgggggggctgccttcccctcagcctctccccacaccacccacccagctgctgtcattccgctcactgagctcttcttcattctcaccctgatccctgggggactcaaagccaaaactgcccaaagaggaaagattgaatcctaaaggggatccttgcccccatgggaggccccctactagaaggacgtgaaagcagcttttgggggaaactgaggcagtggggaagacagagcagaatgagccctcaccctggctgggggtccagcacaggctgtatctgcagagggtcccagaggaacgctggagccaagagaagccctgggaaggaggggtggggaacgacatgcatgtgagggatggcacactgatgtgtttatgcacctgtacacaggagcgcatggccatggctttggaaaggagaatggaaaaatagaagaaggtcggccgggcttggtggcttaagcctgtaaccccagcactttgggaggccgaggtgggcggatcacctgaggtcaggagttcgggaccagcctggcaaacaccccatctctactaagcgaaaacccatctctactaaaattacaaaaattagctgggcatggttgcgcatgcctgtaatcccagctactttggaggctgaggtggggagaattgcttgaacctgggaggtggaggttgcagtgagccaaggtcgcgacactgcactccagcctgggtgacagagtgagactccatctcaacagaaggaaaaaaaaggaaaataggagaaggtggaaatgggtgaagagagaagtcccctcactagctgcatgagaaatctatcttactgtggttctccatgggcagcaggaccatttttcagaatcaagagggaggacagtgtgagaaggcgatgatccaaagaagacagagaggtcagccccacccgatccctcaaatgggctcttggaggcacccccaggggcagcccatttctcaaagtccagaaaattagggtcccagaagggggcagcagcaggctgggagttaggagggagagcagggtgccggccctgccaccaagttgagagctggaggggaggtggggagagaacatcacagagcagccagccctggttcactcctggcagtttcttctcaagctccttccctaggagcatggtggcacgtgcctgtggtctcagctacttgggaggctgaggcgggaggatcgccagagcccaggagtttgaggctgcagtgagctatgagggtgcctctgtgctccatcctaggcaacagagtgagacgctgtttaaaaaggaaaaaatccttccctagagctagtatcctaaagctgcagagctagcccagacctcattggtttccttgtccttggggtgcttttcctgaatctttgggggtgaagggagtgttgctcccagtccagaggcctgattctgttcggactgggttctcaagacacgaccaggttctcaagacacgagtccccttgttcctccccattaaagggggtttgtcagaagcaagaacagcccctctccccagtcacagcctgaagggaggccccgagagcttcctccttccccccacctgctccttaccttctctgccctgctttttagaactgcagttcattgttttaagggattgggggagggagcctggggacacaaaccttttatacaatacaaagctttgcttttttttttttttttcttccttttccctttctcggttctcttctctcctctgaatggctgaagacccctctgccgagggaggttggggattgtgggacaaggtcccttggtgctgatggcctgaaggggcctgagctgtgggcagatgcagttttctgtgggcttggggaacctctcacgttgctgtgtcctggtgagcagcccgaccaataaacctgcttttccaaaaaaaaaaaaaaaa

SEQ ID NO: 3562 - DNA, 2842 bp, Homo sapiens; identical to SEQ ID NO: 1903

SEQ ID NO: 3563 - DNA, 2404 bp, Homo sapiens
gagacgctcgctgtttgtatccattgaggagctgcctcgcgcagggggtgtgcgaggctgagtccaagagatagcaaatcgagtcttaaataatccggggagaaagacgcccgggtagatttgaggtgcagccttggagggagggattagaagccgctagactttttttcctcccctctcagtagcacggagtccgaattaattggatttcattcactggggaggaacaaaaactatctgggcagcttcattgagagagattcattgacactaagagccagcggctgcagctgggtgcagagagaacctccggctttacttctgtctcgtctgccccaaccgctagcctcggcttgggtaaggcgaggcggaattaaaccccgctccgagagcggcagcttcgcgcgcggtgcgctcggcctatgcctgccccgaggggcgtctggtaggcaccccgccctctcccgcagctcgacccccatgatagatacgctcagacccgtgcccttcgcgtcggaaatggcgatcagcaagacggtggcgtggctcaacgagcagctggagctgggcaacgagcggctgctgctgatggactgccggccgcaggagctatacgagtcgtcgcacatcgagtcggccatcaacgtggccatcccgggcatcatgctgcggcgcctgcagaagggtaacctgccggtgcgcgcgctcttcacgcgcggcgaggaccgggaccgcttcacccggcgctgtggcaccgacacagtggtgctctacgacgagagcagcagcgactggaacgagaatacgggcggcgagtcggtgctcgggctgctgctcaagaagctcaaggacgagggctgccgggcgttctacctggaagatgaagcccggggcaagaactgtggtgtcttggtacattgcttggctggcattagccgctcagtcactgtgactgtggcttaccttatgcagaagctcaatctgtcgatgaacgatgcctatgacattgtcaaaatgaaaaaatccaacatatcccctaacttcaacttcatgggtcagctgctggacttcgagaggacgctgggactcagcagcccatgtgacaacagggttccagcacagcagctgtattttaccaccccttccaaccagaatgtataccaggtggactctctgcaatctacgtgaaagaccccacacccctccttgctggaatgtgtctggcccttcagcagtttctcttggcagcatcagctgggctgctttctttgtgtgtggccccaggtgtcaaaatgacaccagctgtctgtactagacaaggttaccaagtgcggaattggttaatactaacagagagatttgctccattctctttggaataacaggacatgctgtatagatacaggcagtaggtttgctctgtacccatgtgtacagcctacccatgcagggactgggattcgaggacttccaggcgcatagggtagaaccaaatgatagggtaggagcatgtgttctttagggccttgtaaggctgtttccttttgcatctggaactgactatataattgtcttcaatgaagactaattcaattttgcatatagaggagccaaagagagatttcagctctgtatttgtggtatcagtttggaaaaaaaaatctgatactccatttgattattgtaaatatttgatcttgaatcacttgacagtgtttgtttgaattgtgtttgttttttcctttgatgggcttaaaagaaattatccaaagggagaaagagcagtatgccacttcttaaaacagaacaaaacaaaaaaagaaaattgtgctcttttctaatccaaagggtatatttgcagcatgcttgactttaccaattctgatgacatctttacggacactattatcactaagaccttgttatggcgaagtctttagtctttttcatgtattttcctcatgattttttctctttatgtagtttgactatgccttacctttgtaaatatttttgcttgtgttgtcgcaaaggggataatctgggaaagacaccaaatcatgggctcactttaaaaaaagaaagaataaaaaaaccttcagctgtgctaaacagtatattacctctgtataaaattcttcagggagtgtcacctcaaatgcaatactttgggttggtttctttcctttaaaaaaatttgtataaaactggaagtgtgtgtgtgtgagcatgggtacccatttgataagagaaatgcatttgattgtgaagaagggagagttaaattctccattatgttcgtggtgtaaagtttagagctggaatttattataagaatgtaaaaccttaaattattaataaataactattttggctattgaaaaaaaaaaaaaaaaaaaaaaaa

SEQ ID NO: 3564 - DNA, 887 bp, Homo sapiens; identical to SEQ ID NO: 1635

SEQ ID NO: 3565 - DNA, 2809 bp, Homo sapiens
gaaaccgtttctacatggctggctctaagccagatgatatttcatagtgcaaagagggatagaacctcactggtggccaaatgtgattatatgctataaccctgtgcccctactctgacacccacccccaagcagttaccctctgttggaagcctgcagctttctttgtttgtttctttaattatacagacagtaggatctgcatccttactagcatatagaaaaatcagagaaacaatgcaaccaagagtgctgttttcatttgtttcttctgcatccttttaatggaattttgtaggtctcttgaaagtgatgcagaagaccacaagcctttgaaaaaaggaagtcgaactccttcagacaggactgtgaaaaaagaagatagtgacgacagcctagttgactatggagaaggggttaatggccagttcaatgaggatggctcctttattggacaatacagtggtaagaaagagaaagagccggctgaaggaaacgaaagctcagaggcaccttctcctgtcaacgccatgaattcctttgtttaatttttaagctctttgccaatattccatttctctagaatgtttatcctaagcacttgtttgtcagccctctcatactatgaacatatgggtagagagtatattttctgctgtatgttagtattatgagaatagttacagcaaaaacataactcattcaaatgatatgttaatatgaactggaatgcaaagtgcatactttttcattcaaaatgggtattcttgatttcctcagaactgataaaaaataatgcaacatcaccaacagatcctgttatttcctctgcaggatacagttcaatatgatgcatgaaaaatgctccacatttaaaggacatacccgtgtatgttatgaaaacatggtttgatactttgtttatactaccctcagctgaacccctatatatgaattccgttttcattgtcaagagtgttactgtagtattctctagaacttcaatgtctttgtggacattgttgtgaaattggtgactatgtatagctgtcgttagtctttttgggagactgttaggaacagtttgtacagtatatacttgctaaatgagttcattatgacagtcacattgctgatgcttactgagaactattacctactcttggctcctgttactccgtaggcttcttaatcttccaggcattacagcagcacagtgttctactttttacatcatttctatgttcggttgtttttaggcataaacaatgtgtattgcagtgcatttcggcatttgtgccatactgaaagaatcaaaaacaaatcatccaaattaaatttcaaacattatttcagagaacacagggcaagacacatacagtgccttcagatattaagcattccacaacatcgtgcattctgtatcagctggtccagtccattctgggtcctagattactgtcattgtctaaaagtaacttttaaaaagcagagttcatgaaaactgcaatgctgggaaaagaaggaaacatgaaaataaaaataagacagtttattagaaatagcatttcctcataagcataaaaagaaaatctttgttgccaactgaagcacatgatgattttgtggtcctttatggtttctattacatgcagtaagaaagatgtcaacatgctagaaaattaattttaaaactaagttattccaacactaaaagcatacaacagcatgccaacagtaatatattattctccaagactttacctatgtaagtgttcaaaactctgcagcattaaacaacgtgtatgcaaattgttatggatacatttcagaatctaagaaatcaggcaagtgcttaaaaggccaacggtccaagggattacatctgcagtttaaaaagtaaatatatattctatcgtattcataaacaatatctatcaaatgggttacctccaaatatgaaaatctataacaacctatggttgaaggaatgctcagtttcatttgccaataaattggtttctcataacttgcatcaagtttaattttaagtaaagctttttatatgtagatattttgttgaatttgtaaatacacttaaaatgtagatgctatatgcttataggtgttacatacaaataaacatgcaatgtttatgttgtactgtataagaggtaagctaattaatgcagtgaatgggattggaaagcatctacttaaatatctattgggttcccccctccccccaccttttttgctgtgaaactgaaatagtgaacttttctacgtattgacagcagatttttcgatgaaatcttcagagctttgcctatggggcacagtaggcctagtaacctggcatgtttgatatatgtaggtaaagcataatttaaagtaatcccaggtaaagatggccctaaatactttcatgtctctatattcatttttcacagatccacctgtctcttgaaaatataaaaagacaaaacaggtttgccttggcatcagagagcacaaagattaaaagttactttaaatttgccaatattttgggagaacaataaaactacattttttcctcttccatactggtagatgcgaaatttatctgtgcatgaaagggtcacttctgtaatagtgcaacagatttggtattaaaaattaaatgtggttttaaaagttcctctctcttttgtaatttatgttcccaattgagtgtgaatgtccaagtaatggtgtatgtaatggtacaggcaaatgtgactggatttccctcaaaaaagtaactattaaacagtcttgatctctt

SEQ ID NO: 3566 - DNA, 5023 bp, Homo sapiens
  misc_feature (4997)..(4997): n is a, c, g, or t
  misc_feature (5001)..(5001): n is a, c, g, or t
gagcaccgcgcgcggccctgcccccggcacggcccccaggtgcgctccttctccggctgcttgtagcactggtctcactgtccccgccgtcagccaccggttccttatccgtctcattccccattgtggcttggctgagccggtcgccaggcctcgctgtcctcctttgccttcctctctcctcagcggccgtactttgcgccgtacctcacctggcctgcaggtgagcagcagcgcagcacccctgcccggcgagcttaacttgcccagcccggcccctgccggagtggcaccggcacctctccaagacgccctcttccctgcaggatgaagaaccccatgctggaggtggtgtctttactactggagaagctgctcctcatctccaacttcacgctctttagttcgggcgccgcgggcgaagacaaagggaggaacagtttttatgaaaccagctctttccaccgaggcgacgtgctggaggtgccccggacccacctgacccactatggcatctacctaggagacaaccgtgttgcccacatgatgcccgacatcctgttggccctgacagacgacatggggcgcacgcagaaggtggtctccaacaagcgtctcatcctgggcgttattgtcaaagtggccagcatccgcgtggacacagtggaggacttcgcctacggagctaacatcctggtcaatcacctggacgagtccctccagaaaaaggcactgctcaacgaggaggtggcgcggagggctgaaaagctgctgggctttaccccctacagcctgctgtggaacaactgcgagcacttcgtgacctactgcagatatggcaccccgatcagtccccagtccgacaagttttgtgagactgtgaagataattattcgtgatcagagaagtgttcttgcttcagcagtcttgggattggcgtctatagtctgtacgggcttggtatcatacactacccttcctgcaatttttattccattcttcctatggatggctggctaacttcatacccccatgtcagtgtgtgtattctgtatgtaaatatgtttatatttatagagcatcaatcaatataagcattattgagaaaaatgtgacccgtaacactgtgttctggataaaaatgtgattaggaatcacgcaaagtgcttactgtgtaagcccaagaacaaaggctttctgaatcttctcaggcagttcagatttaaagcaccatccaaaccttggaaatacgacagggtgtggtagaattcagcaatatgagaaaaccagcccctaaaatgatagccacaagagattaattgtgtttttttttctcctgtaatccttgtactgttcggctgaatttgaagattggaagacttatattgagaccagtaactttactgtaaatttactttgtttcattgaaaaaacaaattgataaacatattaaactggaagaattttctttattcaaatgaaaacatgtttgatgactggtcaaaaaataagctcataatctatttttttcatgtagtatataagtcaagaatgttttattgtcattatgtgaaaccaatattggcaaatagtactttaatgatgaagtaaatgaccagaaattatagaaatctgtgttttcctgtaaaaatagcactatagtatcacttgaacaatttgatttggctttacttactaggaagcctggaattcattatttttttccttttatgtgccactgtggctactttaaatcactctgagaggtaaatggatataggattgaagttatgtgggtatttggcatgtgtgtgtgaaataaatatgtagatagtcacatatacacagactgagagataaattgttcttgattgctttattatcatcatactagtgtgttcattatagagtatctgtagaggtgaatgtaaaagtaagtccaatctattttcttatgtcattgaatttgtagtgttaacttgcatatatgttattggatgggttgtcttttaaagcatttactaatgtactctgaaatttttaaaagccttcagatttgttttctagtcacttttttccatatcatttctaattatagtttatatccttaaaagaaggatgccacagtagtatgtaaaacccaaacaagtagaacccaagcaaataaaattatttaaaataattttaaagtggcttagtactgccagtcatgtaaattgattctgctgagggtcttataagaattgagatataacaatggtaaaacaagcattcaagcacttttacaaaattaccaaattcttaaaatgaagccacagctagacttgcatttcaggtattaaaattgctttcttaactgtcaagaatcacaaaataacaaatcatattatgagtgaatatggggagggcggggccaatcagtcaatgataatctgaacaaattttaagagcagattttagattaataatgttttatcaccactaatttgcccacaacaaactcagtatttaatttttcaaattaaatattaaattatttaagtattttaaataattaaaacattaaatggcaacaccatagaatataggtgttctctggacctattctaaccacttaaaattatcttaagtatgcatacataaaagcaaccactatgagaactaccgtgttagtggtttttcacttactgtatattacccttgtaggaatagtttaaggaaattcatttcttaaaaatatagtgtcctcaaataattaatttttttgcaaactttagttattacaggcagcaaaaaccactgtctgaaactaaatctgtgttcaaagatgaagacccctcattaaaagccaaggacgttcttaagattggaactgacataattagtcttgacttacttcattaaagcaagattcaattccttgttcatttgagtgttcattatatgccaggcattgaccagttgcaattttatggtccagaattaatattattattcgtaaactagctataatagagtatatacagtgctgtgggaatacaggggaagaagcaattaaatctgctagaagggtaagagaaatctgtatgcaggaggcaatgctagcattaagccaagaaatagtgtgaggtgatcttatcacactgatgtgttcaactgtttatgggaaaaggaaactaggatggttttatttgtgaaatgttctacaacgctagaactgttgaacttcttgggagaaaaggagaatctttgttttgttgtgctgagtttgattagttgcttaaccaagtagaaagaaaagcacatcttcctgatcacagttataaaagaaaccctgaggccgggcgcggtggctcaagcctgtaaccccagcactttgggaggccaaggagggaggatcacaaggtcaggagatcgagaccatcctggctaacacggtgaaaccccatctctactaaaaatacaaaattagctgggcgtggtggccggcgcctgtagtcccagctactcatgaggttgaggcaggagaatggcgtgaaccgaggaggcggagcttgcagtgagtggaaattgcgccactgcactccagcctgggcaacaaagtgagactccatctcaaaaaaaaaaaaaaaaaaaaaaaaaaaaaaagaagaagaaaccctgagccattaatgtgtctcgtaacttgaggaagttcatgaattctctgggcttcatccattaagattcatccttatgctcctgcaagtttcttatatttatgtatttctattctgatttctgaaatgataacctagtagtgtctgatgaagttttttcatgcttattttattctttgtcacagatgaaagaagaataggactaattggggctaagatgaattaatgtaagtgtcagatactaggcaggtgttagggatgaaatgatgaatgaggcatggacctgttcctcagagtttatggcccagtagacataattgtattaggactttctgcagttgacatttgcataaagctgactgactgaaggaacagaaagtgagacagacagatatgaccaaatttatacaaaccatgtaccaacacttgaaagatgggtggatattttccaggaaacagattttgggcaggacattccatgcactggaaatagcatgaacaaatgcatgaaaattgcctacaacatgcctggcacatagctgtgaggtaccctatgagttgttgacttgaaaacatggaactgcacagggcattcaggcaagtgcaagtggttcaggggccagcgcagagcagagtgctgagtaaagatgtcagaaaaggaaagcaatggtctggtacaagtcttgtatagaacaagaagtttagacttttgaacaggcaatcgagatttggggttcagaaagataaatcccaaaagtatggagaacaaaggaactcattttaaaggactagctaagatgctcaatctctaaaaaaaaaaggatctgtattcgtgagagtagagagaaaggttgtttaggaagagtcaacagactttagcaaaatccttttatttgattcatgcataactcctgatggagtgtcaaggaagactcattcacttttctttcctgccagaaagttggttcttgcaaaatagattaacttgatgactatgtgtatattggatactcctaattttagctctgttagatatgtttctttctaaggacaagcaactatgtatagacttgttgtttgaattttttttcagtatatatatgtttcttgtttttctatttttctacttcatactgttaatgtcaaatatcaaaaatgttttccagcaatatcaagttatggcaatggcaaaagtccttgttgtagatgagaagcatataagaaatggttgccaatctttgttttgtatgatctatttagagttttaaccaacctagatctgtcagctaagctaattttatatttggtatacatgcatgtcaaataaagttaattttncatncaaaaaaaaaaaaaaaaaaaaa

SEQ ID NO: 3567 - DNA, 5168 bp, Homo sapiens
ctggagtctcccctggtcgggagcctcagccttctggagactgacaccaccctcttactcagagacgaatcgttttgtcgttgccttcacctccctgaccacaagtgctccggggctctttctaagggaggcagctgttctaggcgggaggctggagtctcctgggcctggacgcaccccggggtgtgagtgatgggtatgcctgaaaggaggggaagtggcgcggctttaatcatctgggctagtccccggcgggcctgggggaacagggaaactggaggcggccttaaagcgtcaggatgagacatcgcaagaggagctgcagatactgagcgtgcgccccgggttctcgccgccttctctccgccgagcagcccttcggccaccctttgcccttaaaaatctgcagactgcgcctcctctccgcgggagcgagacctagcaggcccggggctgggcgtgccctcgcctgccacgctgcgcgctgccctcagccgggccgctggggccgtgcagtgcaccgggcacgccgcgccaggctgggggcaggcaccgagcctccgtgggaggtcccgaggcagcttcgcctgctcgccctggctccagccctcacctgccgcagccttagctgagcagccgccgccactgggcgccccccgctccccacttcgccagcgcccgctcctcggctcggcccggggtagtttgtagggacgcagctctccacgtgcgcgactgcgaggctggacgctacgggctcctggaaaggagacaccagcatttgccacaatgctgtcatccactgactttacatttgcttcctgggagcttgtggtccgcgttgaccatcccaatgaagagcagcagaaagacgtcacactgagagtatctggagaccttcatgttggaggagtgatgctcaagttagtagaacagatcaatatatcccaagactggtcagactttgctctttggtgggaacagaagcattgctggcttctgaaaacccactggaccctggacaaatatggggtccaggcagatgcaaagcttctcttcacccctcagcataaaatgctgcgccttcgtctgccgaatttgaagatggtgaggttgcgagtcagcttctcagctgtggtttttaaagctgtcagtgatatctgcaaaatcctgaatattagaagatcagaagagctttccttgttaaagccgtctggtgactattttaagaagaagaagaaaaaagacaaaaataataaggaacccataattgaagatattctaaacctggagagttctccaacagcttcaggttcatcagtaagtcctggtttatacagtaaaaccatgacccctatatatgaccccatcaatggaacaccagcatcatccaccatgacttggttcagtgacagccctttgacggaacaaaactgcagcatcctcgcattcagccaacccccccagtccccagaagcacttgcggatatgtaccagcctcggtctctggttgataaagccaagctcaatgcaggttggctagactcctcacgctcccttatggaacaaggcatccaagaggatgagcagctgctcttacgatttaaatattattctttcttcgacttgaatcctaaatatgatgctgtccgaataaaccaactctatgagcaagccaggtgggccattctcttagaagaaattgattgcacagaggaagaaatgttgatctttgcagctctacagtaccacattagcaaactgtcgttgtctgctgaaacacaggattttgcaggcgagtccgaggttgatgaaatagaagcggcgctttctaatttggaagtaaccctagaaggtggaaaagcggacagccttttggaggacattactgatatccctaaacttgcagataatctcaaattatttaggcccaagaagttactaccaaaagctttcaaacaatattggtttatctttaaagacacatccatagcatactttaaaaataaggaacttgaacaaggagaaccactagaaaaactaaatcttagaggctgcgaagttgtgcccgatgtaaatgtagcaggaagaaaatttggaatcaagttactaatccctgttgccgatggtatgaatgaaatgtatttgagatgtgaccatgagaatcaatacgcccaatggatggctgcctgcatgttggcatcgaagggcaaaaccatggcagacagctcctaccagccagaggtcctcaacatcctttcatttctgaggatgaaaaacaggaactctgcatctcaggtggcttccagtctcgaaaacatggatatgaacccagaatgttttgtgtcaccacggtgtgcaaagaaacacaaatccaaacagctggccgcccggatcctggaggcgcaccagaacgtggcccagatgcccctggtcgaagccaagctgcggttcatccaggcgtggcagtcactgcctgagtttggcctcacctactaccttgtcagatttaaaggaagcaaaaaagatgacattctgggagtttcatataacaggttgattaaaattgatgcagccaccgggattccagtgacaacatggagattcacaaatatcaaacagtggaatgtaaactgggaaacccggcaggtggtcatcgagtttgaccaaaacgtctttactgctttcacctgcctgagtgcagattgcaagattgtgcacgagtacattggcggctacattttcttgtccacccgctccaaggaccagaatgaaacactcgatgaggacttgttccacaaattgaccggcggtcaggattgaaacaagcacgcgtgctcggctcacaccaacaaggcaagccaaaggcgcccctccccagagggatccctaacgtgcccagcatgtagattctggactaacagacaacatacattcaccgctggtcacccagatcctcattcaaacccactgctggcacatccctttccttactttgccctgtgctaccagccacggaaggagcctctcttgttttttctataaaatgggtaggcaggagaaaagcaggtgccctaagattgctctaaggcccagcatgtggttacagttctctgacttgcagaacctgccaggtgtatggctacaagttatcctcgtgctgatctgtctcattactaagtcaatggagaagacagaaaggtaaaaatcacgtgtagcaagaacaactcttatttcacaaactcaggtatgaaacgaaacgcctgtccttcatggaactgcttttagctcctgtcttttcaaaatggcagagggagttcctacacacactttttccctggaggccaaggtctaggggtagaaaggggaggggtggggctaccaggtagcagttgacaacccaaggtcagaggagtggccctcagtgtcatctgtccacagtgatacctgccaagatgaccactgacccacatctggtcttagtcattggtctcctcagatttctggggccacctgcaagccccattccattcctacagatctctcagccacctgtaagtcctttgtgaagatgtgggtgacacagggggacaggaaaacccatttctcaacccagatccatgtctccactgcttctactctgggttgggattcaggaagacaggcacagtcctctctgttcatagaaacacctgccagtgtcaaggattccagtcaggtgtctatcccaactggtcagggagagaagggcagacccattctcaaagaccaccatgtccaaggtctgacagctccccactggctgcccccacaggggctttaggctggtctgggtcatggggaagcgtccctcttatcgctggtctgtgttctcctggatttggtatctatgttggtacgactcctggccttttatctaaaggactttggcttttgtaaatcacaagccaataatagacttttttctccccctctgttttttgctgtgtcatctctgccttgagactgccttgagacagtgcttgccttgagagagtgagccaattaacagctgcctgaattgtcattttccattttggtttgttagaggtgggaggggtgggttttgagaaggtcaaaagcaataccagaagtaaagggaaatatcagacaatattttattattttttcatagatgttctgccacacaaagaacttggggtgtaaggataaggcaaaagctccaatcccatttttcagttctcctaggatgcacccctcagggagcctggccagagttccgaggctcgtgagcgtcagctgttgctttattttccatcaaagccctctgagaagtgagacctcagcaattccgggagccacatagagacagacttggcaagggaccccctggttctgagccagtagctgccatctggaaattcctcttttagcctctccttagaggtgaatgtgaatgaagcctcccaggcacccgctgaatttctgaggccttgcttaaagctcagaagtggtttaggcatttggaaaatctggttcacatcataaagaacttgatttgaaatgttttctatagaaacaagtgctaagtgtaccgtattatacttgatgttggtcatttctcagtcctatttctcagttctattattttagaacctagtcagttctttaagattataactggtcctacattaaaataatgcttctcgatgtcagattttacctgtttgctgctgagaacatctctgcctaatttaccaaagccagaccttcagttcaacatgcttccttagcttttcatagttgtctgacatttccatgaaaacaaaggaaccaactttgttttaaccaaactttgtttggttacagttttcaggggagcgtttcttccatgacacacagcaacatcccaaagaaataaacaagtgtgacaaaaaaaaaaaaaaacaaacctaaatgctactgttccaaagagcaacttgatggttttttttaatactgagtgcaaaaggtcacccaaattcctatgatgaaattttaaattaatgggcacctttcaacatcatttgcttccttatctacagttgattcagaaatctgcattttttattcttttatatgacttttaagtaaaagatttatatggatttgaaaaaaaaaaaaaaaaa

SEQ ID NO: 3568 - DNA, 4973 bp, Homo sapiens; identical to SEQ ID NO: 2529

SEQ ID NO: 3569 - DNA, 1575 bp, Homo sapiens; identical to SEQ ID NO: 1757

SEQ ID NO: 3570 - DNA, 2180 bp, Homo sapiens; identical to SEQ ID NO: 533

SEQ ID NO: 3571 - DNA, 1781 bp, Homo sapiens
gactttgaatggtccgttaatgtggttacaaaacgtgactcggttcatcgggagccctcctctctcctcttccttcctccatggatctgcctattcaggacagccatgattcttccaccagtcccaaaggcaaacaacccactactgcagagaagagtgccacaaaaaaggaagacaaggtcccggtcaagaaacagaagaccagaactgtgttctcttccacccagctgtgtgtactcaatgatagatttcagagacagaaatacctcagcctccagcagatgcaagaactttccaacatcctgaacctcagctacaaacaggtgaagacctggttccagaaccagagaatgaaatctaagaggtggcagaaaaacaactggctgaagaatagcaatggtgtgacgcagggatgcctggtgaacccgactgggaaccttccaatgtggagcaaccagacctggaacaattcaacctggagcaaccagacccagaacatccagtcctggagcaaccactcctggaacactcagacctggtgcacccaatcctggaacaatcaggcctggaacagtcccttctataactgtggagaggaatctctgcagtcctgcatgcagttccagccaaattctcctgccagtgacttgcaggctgccttggaagctgctggggaaggccttaatgtaatacagcagaccactaggtattttaatactccacaaaccatggatttattcctaaactactccatgaacatgcaacctgaagacgtgtgaagatgagtgaaattgatgttactcagtctcagtctggacactggctgaatccttcctctcccctcctcccatccctcataggatttttcttgtatggaaactacgtgttctggtttccatgatgcctatccagtcaatctcatggagggtggggtatggttggagcctaatcagagaggtttctttcttttttcctattggatctttcctgagaaaagatattttaataaccttggctgctaaagacaacttgatagaagctgtctctggctatagataagtagatgtaatactagtttggatatctttagggtttagaatctaacctcaagaatgagaaataagctgggcgcggtggcttacatctgtaatcccagcactttgggagaccaaggcgggcgacagagtgagactctgtctcaaaaaaaaaaaaagaaaaagaaaaagaaaaggaaataaaagtacaaattggtgtgatgaagatatattcctattgtttgggattgggaggctttgtttatttttttaaaaactctattgaggctgggtgtggtggctcacacctgtaatggcagcactttgggaggccaaggtaggcagatcaccacaggttaggaattcaagaccagtctggccaacatggtgaaatcccgtctctactaaaatacaaaaattagctgggcatggtggcaggcgcctgtaatcccagctactcgggaggctgagcggagatggtgccacagcaatccagcctggatgacagagccagactccatgtcaaaataaaataaaaactctattgaggtgaagggtgaagctttaagttgttacatacttcactgatttcctcaaccctttttggctccgttttactatagcccgtattttgttggttatgactaatatttgtggaaagaggtcttgtgtttagtgcattataatggcatcagtactacttcggctggtttaagtactaatgaataaaacaaccatttttccttc

SEQ ID NO: 3572 - DNA, 1197 bp, Homo sapiens; identical to SEQ ID NO: 647

SEQ ID NO: 3573 - DNA, 1849 bp, Homo sapiens; identical to SEQ ID NO: 2379

SEQ ID NO: 3574 - DNA, 1867 bp, Homo sapiens; identical to SEQ ID NO: 656

SEQ ID NO: 3575 - DNA, 1743 bp, Homo sapiens
atctatccatctggccatccatccgtgggggtctgcaatggccacctttagccgccaggaatttttccagcagctactgcaaggctgtctcctgcctactgcccagcagggccttgaccagatctggctgctccttgccatctgcctcgcctgccgcctcctctggaggctcgggttgccatcctacctgaagcatgcaagcaccgtggcaggcgggttcttcagcctctaccacttcttccagctgcacatggtttgggtcgtgctgctcagcctcctgtgctacctcgtgctgttcctctgccgacattcctcccatcgaggcgtcttcctatccgtcaccatcctcatctacctactcatgggtgagatgcacatggtagacaccgtgacatggcacaagatgcgaggggcacagatgattgtggccatgaaggcagtgtctctgggcttcgacctggaccggggcgaggtgggtacggtgccctcgccagtggagttcatgggctacctctacttcgtgggcaccatcgtcttcgggccctggatatccttccacagctacctacaagctgtccaaggccgcccactgagctgccggtggctgcagaaggtggcccggagcctggcactggccctgctgtgccttgtgctgtccacttgcgtgggcccctacctcttcccgtacttcatccccctcaacggtgaccgcctccttcgcaagggcaccatggtaaggtggctgcgagcctacgagagtgctgtctccttccacttcagcaactattttgtgggctttctttccgaggccacggccacgttggcgggggctggctttaccgaggagaaggatcacctggaatgggacctgacggtgtccaagccactgaatgtggagctgcctcggtcaatggtggaagttgtcacaagctggaacctgcccatgtcttattggctaaataactatgttttcaagaatgctctccgcctggggaccttctcggctgtgctggtcacctatgcagccagcgccctcctacatggcttcagtttccacctggctgcggtcctgctgtccctggcttttatcacttacgtggagcatgtcctccggaagcgcctggctcggatcctcagtgcctgtgtcttgtcaaagcggtgcccgccagactgttcgcaccagcatcgcttgggcctgggggtgcgagccttaaacttgctctttggagctctggccatcttccacctggcctacctgggctccctgtttgatgtcgatgtggatgacaccacagaggagcagggctacggcatggcatacactgtccacaagtggtcagagctcagctgggccagtcactgggtcacttttggatgctggatcttctaccgtctcataggctgaggcacatctgtggaccctcataaccctcttaagacccctctcagggtgccactgatgggggatgagggaaggccctctctctactccttgaccccctccatccttgacccccaacacctcaacacacacacacacacacacacacaaaatcacaccattttcatgcctgtcaatccccaccccaccacaaggcaggaagggggtggtgcctgctggggcctagagggggatgcttggggaaacagagaaggggagatccagggcctccccgccttccttcttcctttttatatacaatttgttattgtcaaataaaagtaggaaatattcaataggct

SEQ ID NO: 3576 - DNA, 1761 bp, Homo sapiens
atctatccatctggccatccatccgtgggggtctgcaatggccacctttagccgccaggaatttttccagcagctactgcaaggctgtctcctgcctactgcccagcagggccttgaccagatctggctgctccttgccatctgcctcgcctgccgcctcctctggaggctcgggttgccatcctacctgaagcatgcaagcaccgtggcaggcgggttcttcagcctctaccacttcttccagctgcacatggtttgggtcgtgctgctcagcctcctgtgctacctcgtgctgttcctctgccgacattcctcccatcgaggcgtcttcctatccgtcaccatcctcatctacctactcatgggtgagatgcacatggtagacaccgtgacatggcacaagatgcgaggggcacagatgattgtggccatgaaggcagtgtctctgggcttcgacctggaccggggcgaggtgggtacggtgccctcgccagtggagttcatgggctacctctacttcgtgggcaccatcgtcttcgggccctggatatccttccacagctacctacaagctgtccaaggccgcccactgagctgccggtggctgcagaaggtggcccggagcctggcactggccctgctgtgccttgtgctgtccacttgcgtgggcccctacctcttcccgtacttcatccccctcaacggtgaccgcctccttcgcaacaagaaacgcaaagccaggggcaccatggtaaggtggctgcgagcctacgagagtgctgtctccttccacttcagcaactattttgtgggctttctttccgaggccacggccacgttggcgggggctggctttaccgaggagaaggatcacctggaatgggacctgacggtgtccaagccactgaatgtggagctgcctcggtcaatggtggaagttgtcacaagctggaacctgcccatgtcttattggctaaataactatgttttcaagaatgctctccgcctggggaccttctcggctgtgctggtcacctatgcagccagcgccctcctacatggcttcagtttccacctggctgcggtcctgctgtccctggcttttatcacttacgtggagcatgtcctccggaagcgcctggctcggatcctcagtgcctgtgtcttgtcaaagcggtgcccgccagactgttcgcaccagcatcgcttgggcctgggggtgcgagccttaaacttgctctttggagctctggccatcttccacctggcctacctgggctccctgtttgatgtcgatgtggatgacaccacagaggagcagggctacggcatggcatacactgtccacaagtggtcagagctcagctgggccagtcactgggtcacttttggatgctggatcttctaccgtctcataggctgaggcacatctgtggaccctcataaccctcttaagacccctctcagggtgccactgatgggggatgagggaaggccctctctctactccttgaccccctccatccttgacccccaacacctcaacacacacacacacacacacacacaaaatcacaccattttcatgcctgtcaatccccaccccaccacaaggcaggaagggggtggtgcctgctggggcctagagggggatgcttggggaaacagagaaggggagatccagggcctccccgccttccttcttcctttttatatacaatttgttattgtcaaataaaagtaggaaatattcaataggct

SEQ ID NO: 3577 - DNA, 6364 bp, Homo sapiens; identical to SEQ ID NO: 168

SEQ ID NO: 3578 - DNA, 3897 bp, Homo sapiens; identical to SEQ ID NO: 1718

SEQ ID NO: 3579 - DNA, 1356 bp, Homo sapiens
ccccagcctctgccaggttcggtccgccatcctcgtcccgtcctccgccggcccctgccccgcgcccagggatcctccagctcctttcgcccgcgccctccgttcgctccggacaccatggacaagttttggtggcacgcagcctggggactctgcctcgtgccgctgagcctggcgcagatcgatttgaatataacctgccgctttgcaggtgtattccacgtggagaaaaatggtcgctacagcatctctcggacggaggccgctgacctctgcaaggctttcaatagcaccttgcccacaatggcccagatggagaaagctctgagcatcggatttgagacctgcaggtatgggttcatagaagggcacgtggtgattccccggatccaccccaactccatctgtgcagcaaacaacacaggggtgtacatcctcacatccaacacctcccagtatgacacatattgcttcaatgcttcagctccacctgaagaagattgtacatcagtcacagacctgcccaatgcctttgatggaccaattaccataactattgttaaccgtgatggcacccgctatgtccagaaaggagaatacagaacgaatcctgaagacatctaccccagcaaccctactgatgatgacgtgagcagcggctcctccagtgaaaggagcagcacttcaggaggttacatcttttacaccttttctactgtacaccccatcccagacgaagacagtccctggatcaccgacagcacagacagaatccctgctaccagagaccaagacacattccaccccagtggggggtcccataccactcatggatctgaatcagatggacactcacatgggagtcaagaaggtggagcaaacacaacctctggtcctataaggacaccccaaattccagaatggctgatcatcttggcatccctcttggccttggctttgattcttgcagtttgcattgcagtcaacagtcgaagaaggtgtgggcagaagaaaaagctagtgatcaacagtggcaatggagctgtggaggacagaaagccaattggactcaacggagaggccagcaagtctcaggaaatggtgcatttggtgaacaaggagtcgtcagaaactccagaccagtttatgacagctgatgagacaaggaacctgcagaatgtggacatgaagattggggtgtaacacctacaccattatcttggaaagaaacaaccgttggaaacataaccattacagggagctgggacacttaacagatgcaatgtgctactgattgtttcattgcgaatcttttttagcataaaattttctactcttaaaaaaaaaaaaaaaaaa

SEQ ID NO: 3580 - DNA, 3864 bp, Homo sapiens
ggcgcagccgcgcctccctccctccccgcctcccgggcgccggggttggcgatgtggagacgtgaggggacccgtcggctgctccggcttctccaggactccgccaggcgcccgcgcgtccctcctcacccggaggaggagaggctccgcgcggggctccgaggcgggcggcgcgcggagccggagtcccagcctcgccatgggacataacgggagctggatctctccaaatgccagcgagccgcacaacgcgtccggcgccgaggctgcgggtgtgaaccgcagcgcgctcggggagttcggcgaggcgcagctgtaccgccagttcaccaccaccgtgcaggtcgtcatcttcataggctcgctgctcgagtttggcaacatggaggtcactagaaaacttgataagagcagactgcctgggattaggttcattaaaaacctggcctgctcggggatttgtgccagcctggtctgtgtgcccttcgacatcatcctcagcaccagtcctcactgttgctggtggatctacaccatgctcttctgcaaggtcgtcaaatttttgcacaaagtattctgctctgtgaccatcctcagcttccctgctattgctttggacaggtactactcagtcctctatccactggagaggaaaatatctgatgccaagtcccgtgaactggtgatgtacatctgggcccatgcagtggtggccagtgtccctgtgtttgcagtaaccaatgtggctgacatctatgccacgtccacctgcacggaagtctggagcaactccttgggccacctggtgtacgttctggtgtataacatcaccacggtcattgtgcctgtggtggtggtgttcctcttcttgatactgatccgacgggccctgagtgccagccagaagaagaaggtcatcatagcagcgctccggaccccacagaacaccatctctattccctatgcctcccagcgggaggccgagctgcacgccaccctgctctccatggtgatggtcttcatcttgtgtagcgtgccctatgccaccctggtcgtctaccagactgtgctcaatgtccctgacacttccgtcttcttgctgctcactgctgtttggctgcccaaagtctccctgctggcaaaccctgttctctttcttactgtgaacaaatctgtccgcaagtgcttgatagggaccctggtgcaactacaccaccggtacagtcgccgtaatgtggtcagtacagggagtggcatggctgaggccagcctggaacccagcatacgctcgggtagccagctcctggagatgttccacattgggcagcagcagatctttaagcccacagaggatgaggaagagagtgaggccaagtacattggctcagctgacttccaggccaaggagatatttagcacctgcctggagggagagcaggggccacagtttgcgccctctgccccacccctgagcacagtggactctgtatcccaggtggcaccggcagcccctgtggaacctgaaacattccctgataagtattccctgcagtttggctttgggccttttgagttgcctcctcagtggctctcagagacccgaaacagcaagaagcggctgcttccccccttgggcaacaccccagaagagctgatccagacaaaggtgcccaaggtaggcagggtggagcggaagatgagcagaaacaataaagtgagcatttttccaaaggtggattcctagcaaggattgtaaattcttggaagcaacggggagcttccatattcccaccagagtgtgggaatgctgtggccatgtgattgtatgatctccttgcaactcagtgtgagttgattcctccaatatgggccagatgcttttgaatgatagggaaatctacataaaatccagtgtcctctttattgagggagtatatgtatccatctcagtgatccatgtccttagtgaagtccacattattctctgtggggacaagagctgggcagttttgaatgggtcttgaggtgggtaccccatgtgcactttctgaggatgcctcacttccctgggctctgcagagaacacacagagagaagactttcagagctcacaggagcagggagcaggagcactctaagggaattccaagatcatgatggagcatggtggctccagagaaaatgcctgtttgatgaacttaaacatgtcaaacattttctgttgagaaggtagggatttggcgtcttacactgtttctctggaagccccagtcatatgactcactgtttctcctgatacccttcgtccctttcattgggatgtaggtaaggaatgacgattcctcacctatggtacacatggcgatagatgtgcccgggagtaagggagatattttgtccttgataattctgattttcccttggcatcaccaacgcctcagagagatacacctgcaccctccagtcagggtcagtgttggctggaaaacactgaaaagtcttcgctctgtctttcaccttaaattgtgttttctcaacaaatgagagagaagcttacgggggagatgcctgagagatgcctatggcgctgtagtttttttttcttccctatgatctcacatgaaaggtgctatgtaacaaccagtatgagtcaaatatattgaaaaaatcatcttatgcaaactttaggaattaaaaggtatttttaaaatggagagttagtgtaagctgggtcctttggaaacatcaaactgaaaaggcctgatttggaaaggtgactctgcccaaaaggttggcaagaatctgacaaagatggtttccttccgaggaagactccggaactcaggtgtggccagtctccttttcagtctgtttgtacagctgcggttctctcttaattttggacacagaggaggaacagaacagggagaaataatcattgtagagtgccaaggcaacatctgacccagatgagctcttcacttcctccttccctgtcgttgtagagccagactgggtagaagagggagggcagtgtcctcaactcatcagcctcacaagcaatttgggacccctctggggtggatttcaccaggttgaattagaaccgcagataatacttccctgttagtgaggacaaaccaagcgccagctctgcccttttctctagagtgttgtgttcttgctcttggtacttacaggagctagtctggtgccttgagcaagcttgaagggaagtgggtgtcctcaccagcaaacttccacatctcaactcgtgccctcttttggccacactggccccgtctcttggagggagcccagaccctgtagggagttttgttttcctttcttctcttgggtgtggtgtcttgtgtttctgaatgtgaacccaaagaccctacccctggagaggaagcaccttcctctttgtgttggtctcctcatagcactgtttgctcacagcagaaacggggctgccacagcctcctgcggctctgctgccttctgggccctgcgtgcatggcatctatagctccttgccctgatagtcaatgctgtggcccttcaagcttgtctttcaaagctttcacaatcattacaacttttatcaaggggaataataatctctaggaaaattatgtccactttaggagaatctgtcaagtgtagccactttggtgttgttctgataatatactgtatatgtacaacttaataaattttgatgaggcaaaatttattctgatggttgggtatgtttcttatatatgtttgaagcagatggctgactactaacaggtcattgccaggtgtatttctatactctttgaagaataacattttaataaaaaaaaaaaaaaaaaa

SEQ ID NO: 3581 - DNA, 2370 bp, Homo sapiens
caggagaagtgaagatgtaacatgttatctgtcgctcctcttagctggcggagagaatttacatttaaagattagcagagtgagaaagagaaatctgccttttgttgtgtggggtgaggaggaggcatctacccctggccttgacgctatctcccatcacctctgctatccagacaggactcaccgagatcgtactgagaagcactccacaatgccagactcacctgtggatgtgaagacgcaatctaggctgactcctccaacaatgccacctcccccaactactcaaggagctccaagaaccagttcatttacaccgacaacgttaactaatggcacgagccattctcctacagccttgaatggcgccccctcaccacccaatggcttcagcaatgggccttcctcttcttcctcctcctctctggctaatcaacagctgcccccagcctgtggtgccaggcaactcagcaagctgaaaaggttccttactaccctgcagcagtttggcaatgacatttcacccgagataggagaaagagttcgcaccctcgttctgggactagtgaactccactttgacaattgaagaatttcattccaaactgcaagaagctactaacttcccactgagaccttttgtcatcccatttttgaaggccaacttgcccctgctgcagcgtgagctcctccactgcgcaagactggccaaacagaaccctgcccagtacctcgcccagcatgaacagctgcttctggatgccagcaccacctcacctgttgactcctcagagctgcttctcgatgtgaacgaaaacgggaagaggcgaactccagacagaaccaaagaaaatggctttgacagagagcctttgcactcagaacatccaagcaagcgaccatgcactattagcccaggccagcggtacagtccaaataacggcttatcctaccagcccaatggcctgcctcaccctaccccacctccacctcagcattaccgtttggatgatatggccattgcccaccactacagggactcctatcgacaccccagccacagggacctcagggacagaaacagacctatggggttgcatggcacacgtcaagaagaaatgattgatcacagactaacagacagagaatgggcagaagagtggaaacatcttgaccatctgttaaactgcataatggacatggtagaaaaaacaaggcgatctctcaccgtactaaggcggtgtcaagaagcagaccgggaagaattgaattactggatccggcggtacagtgacgccgaggacttaaaaaaaggtggcggcagtagcagcagccactctaggcagcagagtcccgtcaacccagacccagttgcactagacgcgcatcgggaattccttcacaggcctgcgtctggatacgtgccagaggagatctggaagaaagctgaggaggccgtcaatgaggtgaagcgccaggcgatgacggagctgcagaaggccgtgtctgaggcggagcggaaagcccacgacatgatcacaacagagagggccaagatggagcgcacggtcgccgaggccaaacggcaggcggcggaggacgcactggcagttatcaatcagcaggaggattcaagcgagagttgctggaattgtggccgtaaagcgagtgaaacctgcagtggctgtaacacagcccgatactgtggctcattttgccagcacaaagactgggagaagcaccatcacatctgtggacagaccctgcaggcccagcagcagggagacacacctgcagtcagctcctctgtcacgcccaacagcggggctgggagcccgatggacacaccaccagcagccactccgaggtcaaccaccccgggaaccccttccaccatagagacaacccctcgctagacgtgaactcagaactgtcggaggaaagacaacacaaccaacgcgaaaccaattcctcatcctcagatgctcaaagttgttttttttgtttgtttgtttattagatgaattatcctatttcagtacttcagcaagagagaacctaactgtatcttgaggtggtagtaaaacacagagggccagtaacgggtcgtaatgacttattgtggataacaaagatatcttttctttagagaactgaaaagagagcagagaatataacatgaaatgatagatttgacctcctccctgttattttcaagtagctgggattttaaactagatgacctcattaaccgatgctttaccaaacagcaaaccaagagattgctaattgctgttgaaagcaaaaatgctaatattaaaagtcacaatgttctttatatacaataatggaaaaaaaaaaaaaaaaaaaa

SEQ ID NO: 3582 - DNA, 4916 bp, Homo sapiens; identical to SEQ ID NO: 732

SEQ ID NO: 3583 - DNA, 5054 bp, Homo sapiens
aaaaagtacagagtccagggaaagacttgcttgtaactttatgaattctggatttttttttttcctttgctttttcttaactttcactaagggttactgtagtctgatgtgtccttcccaaggccacgaaatttgacaagctgcacttttcttttgctcaatgatttctgctttaagccaaagaactgcctataatttcactaagaatgtcttctaattcagatactggggatttacaagagtctttaaagcacggacttacacctattggtgctgggcttccggaccgacacggatcccccatccccgcccgcggtcgccttgtcatgctgcccaaagtggagacggaagccctgggactggctcgatcgcatggggaacagggccagatgccggaaaacatgcaagtgtctcaatttaaaatggtgaattactcctatgatgaagatctggaagagctttgtcccgtgtgtggagataaagtgtctgggtaccattatgggctcctcacctgtgaaagctgcaagggattttttaagcgaacagtccaaaataataaaaggtacacatgtatagaaaaccagaactgccaaattgacaaaacacagagaaagcgttgtccttactgtcgttttcaaaaatgtctaagtgttggaatgaagctagaagctgtaagggccgaccgaatgcgtggaggaaggaataagtttgggccaatgtacaagagagacagggccctgaagcaacagaaaaaagccctcatccgagccaatggacttaagctagaagccatgtctcaggtgatccaagctatgccctctgacctgaccatttcctctgcaattcaaaacatccactctgcctccaaaggcctacctctgaaccatgctgccttgcctcctacagactatgacagaagtccctttgtaacatcccccattagcatgacaatgccccctcacggcagcctgcaaggttaccaaacatatggccactttcctagccgggccatcaagtctgagtacccagacccctataccagctcacccgagtccataatgggctattcatatatggatagttaccagacgagctctccagcaagcatcccacatctgatactggaacttttgaagtgtgagccagatgagcctcaagtccaggctaaaatcatggcctatttgcagcaagagcaggctaaccgaagcaagcacgaaaagctgagcacctttgggcttatgtgcaaaatggcagatcaaactctcttctccattgtcgagtgggccaggagtagtatcttcttcagagaacttaaggttgatgaccaaatgaagctgcttcagaactgctggagtgagctcttaatcctcgaccacatttaccgacaagtggtacatggaaaggaaggatccatcttcctggttactgggcaacaagtggactattccataatagcatcacaagccggagccaccctcaacaacctcatgagtcatgcacaggagttagtggcaaaacttcgttctctccagtttgatcaacgagagttcgtatgtctgaaattcttggtgctctttagtttagatgtcaaaaaccttgaaaacttccagctggtagaaggtgtccaggaacaagtcaatgccgccctgctggactacacaatgtgtaactacccgcagcagacagagaaatttggacagctacttcttcgactacccgaaatccgggccatcagtatgcaggctgaagaatacctctactacaagcacctgaacggggatgtgccctataataaccttctcattgaaatgttgcatgccaaaagagcataagttacaacccctaggagctctgctttcaaaacaaaaagagattgggggagtggggagggggaagaagaacaggaagaaaaaaagtactctgaactgctccaagtaacgctaattaaaaacttgctttaaagatattgaatttaaaaaggcataataatcaaatacttaatagcaaataaatgatgtatcagggtatttgtattgcaaactgtgaatcaaaggcttcacagccccagaggattccatataaaagacattgtaatggagtggattgaactcacagatggataccaacacggtcagaagaaaaacggacagaacggttcttgtatatttaaactgatctccactatgaagaaatttaggaactaatcttattaattaggcttatacagcgggggatttgagcttacaggattcctccatggtaaagctgaactgaaacaattctcaagaatgcatcagctgtacctacaatagcccctccctcttcctttgaaggccccagcacctctgccctgtggtcaccgaatctgtactaaggacctgtgttcagccacacccagtggtagctccaccaaatcatgaacagcctaattttgagtgtctgtgtcttagacctgcaaacagctaataggaaattctattaatatgttagcttgccattttaaatatgttctgagggttgttttgtctcgtgttcatgatgttaagaaaatgcaggcagtatccctcatcttatgtaagtgtgaattaatattaagggaaatgactacaaactttcaaagcaaatgctccatagctaaagcaacttagaccttatttctgctactgttgctgaaatgtggctttggcattgttggatttcataaaaaatttctggcaggaagtcttgttagtatacatcagtctttttcatcatccaagtttgtagttcatttaaaaatacaacattaaacacattttgctaggatgtcaaatagtcacagttctaagtagttggaaacaaaattgacgcatgttaatctatgcaaagagaaaggaaaggatgaggtgatgtattgactcaaggttcattcttgctgcaattgaacatcctcaagagttgggatggaaatggtgatttttacatgtgtcctggaaagatattaaagtaattcaaatcttccccaaaggggaaaggaagagagtgatactgacctttttaagtcatagaccaaagtctgctgtagaacaaatatgggaggacaaagaatcgcaaattcttcaaatgactattatcagtattattaacatgcgatgccacaggtatgaaagtcttgccttatttcacaattttaaaaggtagctgtgcagatgtggatcaacatttgtttaaaataaagtattaatactttaaagtcaaataagatatagtgtttacattctttaggtcctgaggggcagggggatctgtgatataacaaaatagcaaaagcggtaatttccttaatgttatttttctgattggtaattatttttaacagtacttaattattctatgtcgtgagacactaaaatcaaaaacgggaatctcatttagactttaatttttttgagattatcggcggcacaatcactttgtagaaactgtaaaaaataaaagtatctcctagtcccttaattttttcataaatatttctggcttttgagtagtgtatttatattgtatatcatactttcaactgtagacaattatgatgctaatttattgtttcttggtttcacctttgtataagatatagccaagactgaagaaaccaaatatatgtgtttactgtagcatgtcttcaaattagtggaacttagttcagggacatagaagagtcttaatgaattaaaatcattcacttgattaaatgtctgtaaatcttcatcattcctactgtagtttatttaatatctattgtaaattatgtgacttgtagcttcctctggttttcaagtaaactcaacaaggtggagtcttacctggttttcctttccaagcattgtaaattgtataccaaagatattagttattacttctgtgtgtacaaagaggattattttattatgtttattaatcacctctaatactcatccacatgaagggtacacattaggtaagctgggcgttgactcatgcgcagtctcagtcacccgtgttatcttcgtggctcaaaggacaatgcaaaatcgccgatcagagctcatacccaaagcattacagagaacagcagcatcattgccctccccagctgaaaaacaagttggctagaagatacatggagaggaatggtgtggtcaacagttaatgaaacggttctatcatgcatgtgtaatgtggatggagacaattataagatttgactataactatttggagggtctttaacattgccaaaaaaacaaatatgttgatttttattttattttattttttattttaagaggcgggatcttgatctcacatgttgcccaggctggccttgaactcctgggctcaagcattcctcctgcctcagcctcccccatagctgggactaggggtgcatgccagcatacctggctacgttgactcttaaaatctatgttctcttattttaaagatacagtgctccccactgaaaattaaacctaaaaaatgtcacatattggtatgttgttaacctggtagattaaatcatgagaatgattagaaagacgggcaacacagcgggttacatccacactgctgatcacaccaacgacaggagctgataagcaagaaagcgtcacagccagcgtctgttcacccaaggttgacaagtgaagtttctctaatgttgattgttagccgatttgtaacctggcatttacttagcaactgccttatcaattacaggatttgccggtaaaagcagactcaaatataaaggtttttggcttaacttggtttattatagttgctctatgtttgtaaacagacaatctctaatgtctgattatttgtatcacagatctgcagctgccttggacttgaatccatgcaatgtttagagtgtgaagtcagttacttgttgatgttttcttactgtatcaatgaaatacatattgtcatgtcagttcttgccaggaacttctcaacaaaatggaattttttttttcagtatttcaataaatattgatatgcccagcctgataatttttaaaaaaaaaaaa

SEQ ID NO: 3584 - DNA, 1980 bp, Homo sapiens; identical to SEQ ID NO: 819

SEQ ID NO: 3585 - DNA, 2849 bp, Homo sapiens
cttggtgcgccgggccgtggtgagtccgggctcccgtggccgcgtgctgggaggagactggagcccggttaggaagaatggagttggcgactcgctaccagatccctaaagaagtggctgacatctttaacgcccccagtgatgatgaagagtttgttggcttccgagatgatgttcccatggaaaccctctcgtcagaggagagctgcgatagttttgactcactagagtcagggaaacaggatgtgcgctttcattccaaatacttcacagaagagctaagaagaatttttatagaggacactgactcagagactgaggattttgcaggatttacgcagagtgatctgaatggaaagactaacccagaagtaatggtcgtggagtcagatttgagtgatgatggcaaagcatctttggtgagcgaggaagaggaagatgaagaagaagataaggctacccctagaagaagcaggtctagaagaagtagtattggtcttcgagtagcctttcagttccccaccaagaagctggccaacaaaccagataaaaacagttcttccgagcagttgttttctagcgcacgcttacagaatgagaaaaaaacaattcttgaaagaaagaaagactgtagacaggtgatacaaagggaagattctacctctgagtctgaggatgactctcgggatgagagccaggagagttcagatgctttgctgaaaaggaccatgaacatcaaggagaacaaagccatgcttgcccagttattggcggaattgaactcgatgccagatttcttcccagtacgaaccccaacctcagcttctaggaagaagacagtgaggcgggccttctcggagggacagatcacgcggcgtatgaacccaacccggagtgcgcggcctcctgagaagtttgctctagagaacttcactgtctcagccgctaaatttgcggaagagttttacagcttccgaagaaggaagacaattggggggaaatgccgggagtacagacgacgtcaccgtatatcttcttttcggccagtggaggatatcaccgaagaggacttagaaaatgttgccataactgttcgagataaaatctatgataaagttctgggtaacacgtgccatcagtgtcgacaaaagaccatcgacaccaagacagtgtgtcggaaccagggttgctgtggtgtgcgaggacagttctgtggaccatgcctgcggaaccgctatggggaggatgtcagatcggcattgctggacccggattgggtgtgtcccccctgtcgtgggatctgcaattgcagctactgtcggaagcgtgacggccgctgtgccacaggaatcctcattcatctggccaagttttatggttatgacaatgttaaggaatatctggagagcttacaaaaggagctggtagaagacaattaagaggaaaacaaacagaaccagccacctcaccatagagtactccaacaagacatgcataccattggtgcctaagatttttttacagttgtgtttttatacagaaattctttgtagaaattactattttttgttaaagattgtttatatgcttacaaagatttctcaggaagacagcagagcagaggaatctatatagatgtatgcacagacctgtctgtatgctgaactttgttaaaaatatctgccagttattaaaaagcacagtttaaatggggtggggttaaagttcaggtaagtaagttagagagaaaacattgtatgatcagctcctgcacttgatctatctttggcttcccaaacagtaactcactccaggccaagtgtgccttagcacgagtgaccacagtttaatagaccacacacatcgtttaacctgctcttggtcattggaaatttacactgaacaaagtgcaattaactgtagaacagtttcatttttattaaaacttgactgaacaaaaggggaccatcaacattgtagacactggaggccttacagagtgctagcctcttccttcaggactcacctggggcctgctgcttttatattttgaaagagtttaagggctaataatttaatttgttgtttgttaaaaattaaaatctccgttctttccggctgcattgcttttgcatgttcacatatgatgtacttttatgatgtactttttttttttttgagatggagtcttgttctgttgcccaggagggagtgcagtggtgcaacctcggctcactgcaacctttgcctcctaggttcaagtgattctcctacctcctgagtaactgggattacagtcgtgtgccaccacgctcagccctgagttagtttctagtatttttttctgactttcactctaaggatagcgttgaaaaaagaatgcacgtgtgagttactaaaaagttagaataatgtgcatgggaacagtgcagcaacatgctagaaaatcctcactgcactccagcagaggctagaggaatgccagtgttaccttacgcttctagaagcagagccactccagccagaacccattttgcagtcttctcttcgctcttcagcctgaaggtccagatgtagctggggcctctcagtttggttctatacacagggcactcgtaggtctgtttggtttcttgtctgtccacgggggtggcttttgcaaagatgaccggcatagggcatgccagctccttgagacgggcttcaacaatggttcctgcttgggtgtcccagcgggcgcctatggcaaaaacacagcggttgcaattgtgtggcagcttgctactaatgataatgatcaagttgtttgatgcaataaacattcaacattcaaaaaaaaaaaaaaaaaa

SEQ ID NO: 3586 - DNA, 5277 bp, Homo sapiens
gccaggctttatcttgttgagtagttgtgaagagtaaaccttcacatgaagcatagggccgtctccgtggggccgatgcgacggcaggcgaaggcgatggagctctggctcgagggcttggccggacgacggtgacactggtcgcccgcctgctggaactgcagtgaccgaggtcctggcaaggattattcaagatcaggttgtagccattttcaacaaggatcactgatcaaaattttctttttacaaagagatttacaagttaaacatgaagggaaaatactggaatcatttggattctgacaggataaagaatacaatatttcacatttacttgtaatggaacctttgtaagattcatcacttgtcattcacccagttgggaacatggaagttggtttttctcgtactactgttcagacactgtcaagaagccactgcaaaaacatcaaacaaaaaatttctcaatgggaaggaagggctaatggtatatctaatccagaaaagtggtgtccaaaggactttggagtgagatataactgtcaccaagagatccgtcttaagaaaaatcctatagctgagagaaagagcaaaaacttggatgtaaccagccgtgaaaatgtgggtctagatataaatgaaaataccaaaagccatgatcaaagtgagaatgaaaataagaaacatgaatatgacgatacacacttctttaaaaatgaatcagaatccaactgggtatgttctcgggtcaaagaaattgaaagctgtaaagaagatgtcttagatccagagacttcattacctccaggaaacttctatacctcacaaatactgtggaagaaaatagaagcacttcccccagataaactcttaaatttggctttagaacattgtgactcttcagaaaaagaactgaacttcagagttctggatagttcatacggaataaccaagagcttagaaaatatttactctgaacctgaggggcaagaatgtggaccttccataaatcctttgccaaaacctcgtaggacattcagatatttatccgaatctggtgttacgccgtataaagaaagaaactgtgacaaaaaatactgtgaaaataactcttgtgcacaatcttctttggcctcttctcaggaacctgaaccaaagaaatatggtggaaaaatcagaggaagatctaaaaggaaatcctttgaatttgaggatattcagcactttcgaaatcggaactcacagacgattcgtgaagaacttggaagaaattctgggtcagcactttattacacacagtctgaggacaatatctatgaagatatcatatatcccaccaaagaaaatccatatgaagatattccagtgcagcctttacctatgtggagatccccttcagcatggaagctaccacccgctaaaagtgcttttaaagcacccaagctccctccaaaacctcagttccttcaccggaagactatggaagtaaagaactcacaggcttatttgcggtcaaagcttacaaaagatacaactttgccggtcactttaacggaatggaagcttttccgagctggtgaagttgcaaacacgaaaaggaaaaatcttccaaggcttgtattgaaaatagatgacatatttgaatctaaaagagggaagaagaaggtaaagttacattcttacactggaaaggaattacctccgacaaaaggtgaaaccagtgggaatgaaagtgatgccgagtatctgccaaagaatcgccataaacgcttagcacaactgcaaccgtcttccaagaggaatcctcactaccagaccttggagcgggatcttattgaattacaggagcagcagctgtttgaactttttgtggtggtgtctctacagaagaaaccatcaggaataagctatattccccaggtcatacaacaattccctggcaaggatgatcatggctataagcagtccaaagacatggaagagagacttaaagttattccaaaattttgttttcctgattcaaaggactggatgccaacctcagaactcaagagtgaaacattctcctttgtcttgactggtgaagatggaagccggtggtttggttactgtaagaagctcttgccagtaggcaaaggaaagcgactccctgaggtatactgcatggttagtcgcctaggctgcttcaatcttttttcaaagattctggatgaagtagagaagagaagagaaatgtctccagcccttgtttacccattcatgcgaagtgtcatggaagctcctttcccagctcctggacgcaccatcacactccaggacctacccattgaagaggtgctgatagttgatctctgtgcagacaagttcttacaggaggtatctgatgaggatgaaattctaccaccaaaacttcaagctgccctgatgcagattttggaagaacgaaatgaaatcttgactcaggagcagaatttttcacaagatgtgacactcaactctctggtgtccgaagcatttgtcaggttttttgtggagttggtaggacattattctttgaacatgactgtcactgagcgtggggagcgtgttttccaaagggaaccattccgtaagtcccacacctcccgaagtgtacgccacttcctggatctcttcatggaaactcagatgtttgcaggattcatccaggaccgagagcttcggaaaagtggagttaaaggtttgtttgagatccgggccatccagtatttggaaacaattcctgagtcggagcccagtgggatgaatagaattttgcggagtcttggaagcaaaatgaaatttctgcaaaagaaatgaaatctctgattgtctccatcctgaatatacaacagaaagtgccaaagaaaatatttttctaagggctgcagcgctggtggaggaggaaactcgcagataccgacctactaagaactacctgagctacctgacagccccggattattctgcctttgaaactgacataatgagaaatgaatttgaaagactggctgctcgacaaccaattgaattgctcagtatgaaacgatatgagcttccagccccctcctctggtcaaaaaaatgacattactgcatggcaagaatgtgtaaacaattctatggcccagttagagcatcaagcagttagaattgagaatctggaactaatgtcacagcatggatgtaatgcctggaaagtatacaatgaaaatctagttcatatgattgaacacgcacagaaggaacttcagaagttaagaaaacatattcaagatttaaactggcagagaaagaacatgcaactcacagctggatctaaattgagagaaatggagtcaaattgggtatccctggtcagtaagaattatgagattgaacggactattgttcagctagaaaatgaaatctatcaaattaagcagcaacatggagaggcaaacaaagaaaacatccggcaagacttctgaaaagacaatttagcaggcataaatccacaaagacaaagaaaatgagagatgagacaacagcaagaaattggagaagatggaatgcaaatggaagaggggtaactgattcaacagatgcaaagaagctaaaccttaaaccaacagtgagaaagcaaaatatgaaagttaaaaagcagttttgtttatccacacaaccttctggacccaggatttggtagcaccagtgacctctgggagtgggggtgactgtgaggtcaactgatactacatcaaccagagcccccacccttccgatgagaacatggcctagagaaaaaataaaaatataaggaaaaaaagaaaaaaaaccctaaaaaccaaagcgccttcaccctaaataacatgatctagaagctcaaatgctgatgaggatatggagcaaaagaaattctcattcattgatggaaggaatgcaaaatggtacagccactgtggaagacagtttcttacaaaactaaacctactcttataatagcatccagcaattgtactccttggtatttacctaaataagttgaaaacttacatccttacagaaacctgcatacagatgtttatagcagctttaattatgattgacagaactttaaagcaaccaagctgtacttcaacagtttgtccaggtcgagaatcagggcatggtttagctgggcacttctggctcaaggtctctcatgagattacagtcaagttatcagccagggctgcagtctcatgtgaagattcaactgggggcctccctaacttcatggacatcagatgccttgcggatgaacgacgcaaacaccatatcgacatcctgctcgaccccaaaattcaggtcctggatgtcctctgacacagcaggcaagtccacagcagccccaggaaggttcacacccttcttgctgcccgaggaaccaccagtttccacctccgtcaccaggaagtcagcacctttctgctttacctggagagaaataagcccatcatccacgtagatcttgctgcccacttccatcaccttgcagatgttcttgtagtccagccacaggatgttctcgtcacactttttcatgtaggtgttatccagcatgattttgagagtggctcccatcttcagccccacctccatggtgctgctgcccttgatgagcccagttcggatctcaggtcctttagtatccagagccaaagcaacaggccggtagaggatggggtcagcagcaaagctttccgtggctgtgcacatgttcttgatggtctccacgtggtactcatgagttccatgagagaagttcagacaagccacattcgttccagacttaatcatctccttcaacatctccaccgattgggaagctgggctaatggtacagatgatgccagtgttccaggctgggatgggtggtgtgtgaatgtccaggtggcacatgtgctccaggaatgtgtcagccgtggctgcatgtagctgctgggtctgaatgaaggcagtcccggcttcactatggggcttcaacatggctgctgaggtcctccagtgctgaccgatttgggctacactgcaaacgcaaagaggaatagggagagcacctcttaaatgaggttcttatgagctgcttcaggggagaatgaagaagcaagagtgacctacctgcttttgctgttttctcaaatgctaaggtgctgtatttggggggtatcatggccggaatcccattactttcaaattattcatttatttttatcaaaaaaaaaaaaaaaaaaaaaaa

SEQ ID NO: 3587 - DNA, 1787 bp, Homo sapiens
atgtactccctcctgagaagctggaccccttggtaaaagacaaggccttctccaagaagaatatgaaagtgttactcagacttatttgtttcatagctctactgatttcttctctggaggctgataaatgcaaggaacgtgaagaaaaaataattttagtgtcatctgcaaatgaaattgatgttcgtccctgtcctcttaacccaaatgaacacaaaggcactataacttggtataaagatgacagcaagacacctgtatctacagaacaagcctccaggattcatcaacacaaagagaaactttggtttgttcctgctaaggtggaggattcaggacattactattgcgtggtaagaaattcatcttactgcctcagaattaaaataagtgcaaaatttgtggagaatgagcctaacttatgttataatgcacaagccatatttaagcagaaactacccgttgcaggagacggaggacttgtgtgcccttatatggagttttttaaaaatgaaaataatgagttacctaaattacagtggtataaggattgcaaacctctacttcttgacaatatacactttagtggagtcaaagataggctcatcgtgatgaatgtggctgaaaagcatagagggaactatacttgtcatgcatcctacacatacttgggcaagcaatatcctattacccgggtaatagaatttattactctagaggaaaacaaacccacaaggcctgtgattgtgagcccagctaatgagacaatggaagtagacttgggatcccagatacaattgatctgtaatgtcaccggccagttgagtgacattgcttactggaagtggaatgggtcagtaattgatgaagatgacccagtgctaggggaagactattacagtgtggaaaatcctgcaaacaaaagaaggagtaccctcatcacagtgcttaatatatcggaaattgaaagtagattttataaacatccatttacctgttttgccaagaatacacatggtatagatgcagcatatatccagttaatatatccagtcactaatttccagaagcacatgattggtatatgtgtcacgttgacagtcataattgtgtgttctgttttcatctataaaatcttcaagattgacattgtgctttggtacagggattcctgctatgattttctcccaataaaagcttcagatggaaagacctatgacgcatatatactgtatccaaagactgttggggaagggtctacctctgactgtgatatttttgtgtttaaagtcttgcctgaggtcttggaaaaacagtgtggatataagctgttcatttatggaagggatgactacgttggggaagacattgttgaggtcattaatgaaaacgtaaagaaaagcagaagactgattatcattttagtcagagaaacatcaggcttcagctggctgggtggttcatctgaagagcaaatagccatgtataatgctcttgttcaggatggaattaaagttgtcctgcttgagctggagaaaatccaagactatgagaaaatgccagaatcgattaaattcattaagcagaaacatggggctatccgctggtcaggggactttacacagggaccacagtctgcaaagacaaggttctggaagaatgtcaggtaccacatgccagtccagcgacggtcaccttcatctaaacaccagttactgtcaccagccactaaggagaaactgcaaagagaggctcacgtgcctctcgggtagcatggacaagttgcc

SEQ ID NO: 3588 - DNA, 852 bp, Homo sapiens
ggccccgccccgccccgccccgcccggctgctccatggcgctgtgcgaggccgcgggctgcgggagtgccctgctctggcctcgcttgttgctcttcggggactccatcacccaggttacaataccaggtgggccaaaattatccttccaagattaatcaggaaaggaaacagtttggacatcccagtagcagttacaattttctttggggccaatgacagtgcactaaaagatgagaatcccaagcagcacattcccctggaggagtacgctgcgaacctaaagagcatggtgcagtacctgaagtccgtggacatccctgagaatcgagtcattctcatcacgccgaccccactttgtgaaacagcctgggaagaacagtgcatcatacaaggttgcaaactaaatcgcctgaactctgttgttggtgaatatgccaatgcgtgtttacaagtggcccaagactgtgggactgacgtacttgacctgtggaccctgatgcaggacagccaggacttctcatcttatttatcagatggactacatttgtctccaaaggggaatgaatttttgttctcgcatctctggcctttgatagagaaaaaggtctcttctctacctttgctgcttccttactggcgggatgtagcagaagcaaaacctgaattaagtctgctgggagatggagaccattagccaatcacaggagacccaaatctgcttgttatctacagaactcaaagttgtcaatacgtagaggtacgcttttttcctcaggcttaaacctttgccactgatattaataataaaagtattagatgattaaaaaaaaaaagaaaaaaaaaaaaaaaa

SEQ ID NO: 3589 - DNA, 1787 bp, Homo sapiens
atggtgactccctcctgagaagctggaccccttggtaaaagacaaggccttctccaagaagaatatgaaagtgttactcagacttatttgtttcatagctctactgatttcttctctggaggctgataaatgcaaggaacgtgaagaaaaaataattttagtgtcatctgcaaatgaaattgatgttcgtccctgtcctcttaacccaaatgaacacaaaggcactataacttggtataaagatgacagcaagacacctgtatctacagaacaagcctccaggattcatcaacacaaagagaaactttggtttgttcctgctaaggtggaagattcaggacattactattgcgtggtaagaaattcatcttactgcctcagaattaaaataagtgcaaaatttgtggagaatgagcctaacttatgttataatgcacaagccatatttaagcagaaactacccgttgcaggagacggaggacttgtgtgcccttatatggagttttttaaaaatgaaaataatgagttacctaaattacagtggtataaggattgcaaacctctacttcttgacaatatacactttagtggagtcaaagataggctcatcgtgatgaatgtggctgaaaagcatagagggaactatactcgtcatgcatcctacacatacttgggcaagcaatatcctattacccgggtaatagaatttattactctagaggaaaacaaacccacaaggcctgtgattgtgagcccagctaatgagacaatggaagtagacttgggatcccagatacaattgatctgtaatgtcaccggccagttgagtgacattgcttactggaagtggaatgggtcagtaattgatgaagatgacccagtgctaggggaagactattacagtgtggagaatcctgcaaacaaaagaaggagtaccctcatcacagtgcttaatatatcggaaattgaaagtagattttataaacatccatttacctgttttgccaagaatacacatggtatagatgcagcatatatccagttaatatatccagtcactaatttccagaagcacatgattggtatatgtgtcacgttgacagtcataattgtgtgttctgttttcatctataaaatcttcaagattgacattgtgctttggtacagggattcctgctatgattttctcccaataaaagcttcagatggaaagacctatgacgcatatatactgtatccaaagactgttggggaagggtctacctctgactgtgatatttttgtgtttaaagtcttgcctggggtcttggaaaaacagtgtggatataagctgttcatttatggaagggatgactacgttggggaagacattgttgaggtcattaatgaaaacgtaaagaaaagcagaagactgattatcattttagtcagagaaacatcaggcttcagctggctgggtggttcatctgaagagcaaatagccatgtataatgctcttgttcaggacggaattaaagttgtcctgcttgagctggagaaaatccaagactatgagaaaatgccagaatcgattaaattcattaagcagaaacatgggactatccgctggtcaggggactttacacagggaccacagtctgcaaagacaaggttctggaagaatgtcagataccacatgccagtccagcgacggtcaccttcatctaaacaccagttactgtcaccagccactaaggagaaactgcaaagagaggctcacgtgcctctcgggtagcatgagaagttgc

SEQ ID NO: 3590 - DNA, 1789 bp, Homo sapiens
atggtgactccctcctgagaagctggaccccttggtaaaagacaaggccttctccaagaagaatatgaaagtgttactcagacttatttgtttcatagctctactgatttcttctctggaggctgataaatgcaaggaacgtgaagaaaaaataattttagtgtcatctgcaaatgaaattgatgttcgtccctgtcctcttaacccaaatgaacacaaaggcactataacttggtataaagatgacagcaagacacctgtatctacagaacaagcctccaggattcatcaacacaaagagaaactttggtttgttcctgctaaggtggaggattcaggacattactattgcgtggtaagaaattcatcttactgcctcagaattaaaataagtgcaaaatttgtggagaatgagcctaacttatgttataatgcacaagccatatttaagcagaacctacccgttgcaggagacggaggacttgtgtgcccttatatggagttttttaaaaatgaaaataatgagttacctaaattacagtggtataaggattgcaaacctctacttcttgacaatatacactttagtggagtcaaagataggctcatcgtgatgaatgtggctgaaaagcatagagggaactatacttgtcatgcatcctacacatacttgggcaagcaatatcctattacccgggtaatagaatttattactctagaggaaaacaaacccacaaggcctgtgattgtgagcccagctaatgagacaatggaagtagacttgggatcccagatacaattgatctgtaatgtcaccggccagttgagtgacattgcttactggaagtggaatgggtcagtaattgatgaagatgacccagtgctaggggaagactattacagtgtggaaaatcctgcaaacaaaagaaggagtaccctcatcacagtgcttaatatatcggaaattgaaagtagattttataaacatccatttacctgttttgccaagaatacacatggtatagatgcagcatatatccagttaatatatccagtcactaatttccagaagcacatgattggtatatgtgtcacgttgacagtcataattgtgtgttctgttttcatctataaaatcttcaagattgacattgtgctttggtacagggattcctgctatgattttctcccaataaaagcttcagatggaaagacctatgacgcatatatactgtatccaaagactgttggggaagggtctacctctgactgtgatatttttgtgtttaaagtcttgcctgaggtcttggaaaaacagtgtggatataagctgttcatttatggaagggatgactacgttggggaagacattgttgaggtcattaatgaaaacgtaaagaaaagcagaagactgattatcattttagtcagagaaacatcaagcttcagctggctgggtggttcatctgaagagcaaatagccatgtataatgctcttgttcaggatggaattaaagttgtcctgcttgagctggagaaaatccaagactatgagaaaatgccagaatcgattaaattcattaagcagaaacatggggctatccgctggtcaggggactttacacagggaccacagtctgcaaagacaaggttctggaagaatgtcaggtaccacatgccagtccagcgacggtcaccttcatctaaacaccagttactgtcaccagccactaaggagaaactgcaaagagaggctcacgtgcctctcgggtagcatggagaacttgcc

SEQ ID NO: 3591 - DNA, 7110 bp, Homo sapiens; identical to SEQ ID NO: 150

SEQ ID NO: 3592 - DNA, 3959 bp, Homo sapiens
aaggcttccgggcatgcgcacagcgttgtgcaaatgaatgccttccactgaaccgaggcactgttatagaagaatggaagaagatacagattatagaatcaggtttagttctttgtgtttctttaatgatcacgttggatttcatggcactataaaaagctcaccaagtgactttattgttattgaaattgatgaacagggacagttagttaataagaccatcgatgagcctattttcaagattagtgaaatacaacttgagccaaataattttcccaaaaaaccaaaactagatcttcaaaatctgtccttagaagatggaagaaaccaagaagttcatactttgattaagtacactgatggtgaccaaaatcatcagtctggttcagaaaaggaagatactatcgttgatggaacttccaaatgtgaagaaaaagctgatgttttaagctcctttttggatgaaaaaactcatgagttactgaataattttgcctgtgatgtaagagagaagtggctttctaaaacagagctaattggactacctcctgaattctcaataggcagaatcgttgacaaaaaccagagggctagtttacacagtgccattaggcagaaatttccatttttagtaactgtaggaaaaaacagtgaaattgttgtaaaaccaaatcttgaatataaagaactttgtcatttggtatctgaagaggaagcatttgacttttttaaatatttggatgcaaagaaagaaaattccaaatttacctttaaacctgatacaaacaaagaccacagaaaagctgtccaccattttgtcaacaaaaagtttggaaaccttgtggaaaccaaatctttttctaaaatgaattgcagtgctggtaatccgaatgtggtggtaacagtaagatttcgggaaaaagcacacaaacgtgggaaaaggcctctttctgaatgccaagaaggaaaagttatatatacagcttttaccctacgaaaggaaaacctggaaatgtttgaagcgattggttttttagctatcaaacttggtgttattccttcggattttagttatgcaggccttaaagacaagaaagccatcacctatcaagcaatggttgttagaaaagtgactccagagaggttgaaaaatattgaaaaagaaattgaaaagaaaagaatgaatgtctttaatattcggtctgtagatgattccctgagacttggtcagctcaaaggaaatcactttgatattgtcattagaaatttaaaaaaacaaataaatgattctgcaaacctgagggagagaattatggaagcaatagaaaatgttaagaaaaaaggctttgtgaattactatggaccacagagatttgggaagggaaggaaagttcacacagaccaaattggactagctttgctgaagaatgaaatgatgaaagccataaaattgtttcttacaccagaagacttggatgatcctgtaaatagagcaaagaagtattttcttcaaactgaggatgctaaaggcacactttcattgatgcctgaattcaaagtgcgtgagagagcattgttggaggcattgcaccgctttggcatgaccgaggaaggttgtatccaggcatggttctctttaccccattccatgcgcatattctatgttcacgcatataccagcaaaatttggaatgaggcagtatcttacagacttgaaacctatggagcaagagtagtgcagggtgatttggtctgtttggatgaagacattgatgacgagaatttccaaaatagtaaaattcacctggtaactgaagaggagggatcagctaatatgtatgcaatacatcaggtggttcttccagtacttggatacaatattcagtacccgaagaacaaagtagggcagtggtaccatgacatacttagcagagatggactacagacatgtaggtttaaagtacctactctgaaactgaatataccaggttgctatagacagattttgaaacatccctgtaatctctcataccaactaatggaagatcatgacattgatgtcaaaacgaaaggttcccacattgatgaaacagctttgtctcttttgatctcttttgatcttgatgcttcatgctatgctaccgtttgtctgaaggaaataatgaagcatgacgtttaaaactgatacccttggtataaccatatatatgtcactctttgaaggaaagggggctaaaatgtcttaagcaccttccatgtgttaggaacttcataattgttatctcttttaattttcacagcatcctgagaagttaggatttgatactgtaattttatagaggatatgtaagtgtcagggtccaaatttaaggtccatgtgaccccaaagcctgtgttttttttctattatatgtttcagtgacctttattctgtgtcataaagttacaatcttttaaaaccattaggaatatatataatactgcaagataacatttaagaaaaaaagttgtgaatattcatatcctccagctccttgcttagaacactagtaaaattaggtcgcagtgaagcaaatgttggagagaaagatagatgaagcattttgctaattattattgtccccctttcctgtttttgaaattattgatcagaacaatatacaagggaaatgccatacctctgtttgtgatagataccccagagtagttattacctctttgtgagataagtaatctttgatgaagattgaaatacaatttctcatccaatttttatatcttggcatacgctgaccctcttgaccatttgtaattttttcatattatctaaaacaggtgttagagtcagacagattcattcttagattctagctctgacacttactagtgattttgagtatgttgttgatttttttgtgtgtggttactgatagaatcaagacaattacaacttcataaatgacaaataataggattatctccacattttctgttgctggaggaacaaaacattgtgcccatttgaaaattttaatttttgttggtttaactatcccacattataaatcatccttcaccattttatatcagttaaatatgggtgtgttggggaggaatgactggcatgtagacatgtattgatttaggaagatctgagcatttctttcattgttggtaagatataatgatgaaatttaaaaagcagtatggagcattatatatcagtaatgtgatatatatacttaagccagtttaaccattttgggaaatgttagcattaggaaataaaatccaaaagaaggaagagaagctatatgcaatgcaaaatttgcttattgcaatattttcatatacagacactaaaaacagttttcaaagtccagcattacgtaactaaagtaagtaaaatgatgtgtatcaacttgatggtaaaatatgtagttatttaaaaaagcaatgaacaatttagtttcatgagaaaatgttgccccctaaaagtagaacacatatgttacaactgcaataatactctgaattcatctttcacaaataagagacatgttagcatagtgattaaaagcacagatattggagacaaactaacccagtttgaaccctggcactgccacgtatagcactgcagccttgggaaagttatttaaactcatgggcttcagtttcaacatctgtaaaatgggcatgttaacattgcctacctcataggattactgtgagaattttctaagttaatatatgtaaagcaactttaaaaagtgcctggcacttagttattgttaagtaagtgtctgcagatgcaagtttggaagagaaaagcaaataaatgaaaatcccttcctgttaagatgatggggtatttggatttttttttaatactaaaaagttttttttgttatatgttttggcaataaataattctcaatacaaaaaaaaaaaaaaaa

SEQ ID NO: 3593 - DNA, 2914 bp, Homo sapiens
actacggcggccgagaaggggcgagtacagcccagtcctgaggtcgcgggaggctgcgaggactgcaaaagggtggagtcggcctcgcccccgcccaggccccgcccctgcagggaacccactttcccagtcctaggcggcggtcagatccttgcaagcatggtcgcgccggggcttgtactcgggctggtgctgccattaatcctgtgggccgacagaagtgcaggtattggttttcgctttgcttcatacatcaataatgatatggtgctgcagaaggagcctgctggggcagtgatatggggcttcggtacacctggagccacagtgaccgtgaccctgcgccaaggtcaggaaaccatcatgaagaaagtgaccagtgtgaaagctcactctgatacgtggatggtggtactggatcctatgaagcctggaggacctttcgaagtgatggcacaacagactttggagaaaataaacttcaccctgagagttcatgacgtcctgtttggagatgtctggctctgtagtgggcagagtaacatgcagatgactgtgttacagatatttaatgctacaagggagttgtctaacactgcggcatatcagtctgtccgcatcctctctgtctctcccattcaagcagagcaggagctggaggaccttgttgcggttgacttgcagtggtctaagcccacctcagaaaacttaggccatggatatttcaagtacatgtcagcagtgtgctggctctttggacgtcacctttatgacactctgcagtatcccatcgggctgatcgcctccagctggggcgggacacccattgaagcctggtcatctggacggtcactgaaagcctgtggggtccctaaacaagggtccattccatacgattctgtaactggtcccagtaagcactctgttctctggaatgccatgatccatccactgtgcaatatgactctgaaaggggtagtatggtaccagggggagtccaatataaattataacacggatctgtacaattgcacattccctgcactcatcgaagactggcgtgaaaccttccaccgtggttcccaggggcagacggagcgtttcttcccatttggacttgtccagttatcttcagatttgtctaagaagagctcagacgatggatttccccagatccgttggcatcaaacagcagacttcggctatgtccccaacccaaagatgcccaatactttcatggctgtagctatggatctctgtgatagagactcgccttttggcagcatccaccctcgagataaacagactgtggcttatcggctgcatttgggggcccgtgctctggcttatggtgagaagaatttgacctttgaaggaccactgcctgagaagatagaactcttggctcacaaggggctgctcaatctcacatattaccagcaaatccaggtgcagaaaaaggacaacaagatatttgagatctcctgttgcagtgaccatcgatgcaagtggcttccagcttctatgaacaccgtctccacccagtccctgaccctggcgatcgattcttgtcatggcactgtggttgctctccgctatgcttggaccacgtggccttgtgaatataagcagtgtcccctataccaccccagtagtgccctgccagcccctccattcattgctttcattacagaccagggtcctggacatcagagcaatgttgctaaatgactgtttcagtatgatcagaacttagatataaggatgggtccttcagattttagcatttaggagtttcaataataaccattgcttttaaaggaaattaatagaaagcctcattgaatggctttcagctagcacatggctgtttctatattctgatgagcccaggcttataggtaacttgaaatgcttgctttttgttccctagttggtctaagggtctgtattggactaattctgaactacagacaaattggacctcaatgtcatttacttccctcatattaatgggagtgaaatgtctaatacttttgcccctttttatccagagttgtgggaatctcaggattggaagagattttaaaggccacataggccagctagtgttcatgtgttctttataaaatttctcccatccaagtactaaccaggcccgaccctgcttagcttccgagatcagatgagatcaggcgcgttcagggtgatatggccgtagacgtctttacaaaattcctgacaggtggttactgaatctctctatgaactttccattcaaaactttccaagtttttccttatgtggaaccgaaatctttctttctcccgtgaaactttactactatcagataattgaagacagatctctttgtattctcttcaagcccaaaccaattctgttccttcaatctaaatagtggtaatatgaatgtttaagaaatgaaataagaaacatgtgcaggcactttggaaggtgctaagtgactgccctaaggaatgaaaagcaagggccaggtgggagtagcccagcgaaggcacttgggctgccaggaacaggaggcgtgggaaactctggcttaggaaaacatgaacacaggggcaacagaggcaaactgttgttcgagttaaatataaatctcaggctctttaaaggtaaaaggtttaaggataatccatttggaagaagaaaagagtgaggctgaaagtaaagccacatgacaagcatataaaaaaaaatgcagatgatacaaatatgaaagaggccttcagtgtttgtttattaagaatcttaatgcagtttactgatggattaaaaacagctaacattgtctgaaaattatgttacctataagaagttggaaataaataaaagcataatcactaaaaaaaaaaaaaaacaaaaaaaaaaaaaa

SEQ ID NO: 3594 - DNA, 3127 bp, Homo sapiens
agcgggtcccgccatggctctgaggcgcgccctgcccgcgctgcgcccctgcattccccgcttcgtgcagctgtccacggcgccggcctcccgcgagcagcccgcagcgggcccagcggccgtgccaggaggtgggtcggccacggcagtgcggccgccggtgcccgccgtggacttcggcaacgcgcaggaggcgtaccgcagccggcgaacctgggagctggcgcggagcctgctggtgctgcgcttgtgcgcctggcccgcgctgctggcgcgccacgagcagctgctgtatgtttccaggaaacttctaggacagaggctattcaacaagctcatgaagatgaccttctatgggcattttgtagccggggaggaccaggagtccatccagcccctgcttcggcactacagggccttcggtgtcagcgccatcctggactatggagtggaggaggacctgagccccgaggaggcagagcacaaggagatggagtcctgcacctcagctgcggagagggatggcagtggcacgaataagcgggacaagcaataccaggcccaccgggccttcggggaccgcaggaatggtgtcatcagtgcccgcacctacttctacgccaatgaggccaagtgcgacagccacatggagacattcttgcgctgcatcgaagcctcaggtagagtcagcgatgacggcttcatagccattaagctcacagcactggggagaccccagtttctgctgcagttctcagaggtgctggccaagtggaggtgcttctttcaccaaatggctgtggagcaagggcaggcgggcctggctgccatgggcaccaagctggaggtggcggtgctgcaggaaagtgtcgcaaagttgggcatcgcatccagggctgagattgaggactggttcacggcagagaccctgggagtgtctgggtgagagcagcccccaggctgagaggacacgagcatcagccatggttccagccaagccccagtgacgtctcccagtcctggctgccctgcctgagagggtgggccctgggatgacagtgctgaaggaactgcttttcacacagcaggacttgatggcttcaggagtccctgaggctggggctgggctgggcaggggagacacagggccagcacagaccccatagagggctctttatagaattatctgggtctagagcaaaggtggcactctcagccctccctggagtccacgccggcaggtgaaggatcagagccccatgccccatccttggggccaggggctgggacccaggtcaccaggagcctccagttgaagtggggaggtgactggggtggtgcagtagtgagccatcccctcacacactgccagccttgcccactgtgtcctccctggccgcccggagctgtgtccgcctcctgcctggctgcctgtgctcggcccctccacaagcccaaaacagccctagggtactcagtgttttcagagccgcctagatgcagggctgtttgtgttttggttttaaatttttttaattaatttattttttatagagaccaggtctcaccatgttgcccaggctggtttcaaacccctgggctcaagtgacctgcccgccgcagcctcccaaagtgctgggattataagtttgagcccccgcatgccactggttttaaatttttaaacagaaaacaatatttatatttcctctgtcttttaaaactgaacaccgaggtgggttttgtggtgggtggtgaacggacaggtttgggcctcgatcccccacccgaccctagcacccacaggtgggggtgccccctctgctgatgcgcctcctccctcagcaccatggacctgctggactggagcggcctcatcgacagcaggaccaagctgtccaagcacctggtagtccccaacgcacagacaggacagctggagcccctgctgtcccggttcactgaggaggaggagctacagatgaccaggatgctacagcggatggatgtcctggccaagaaagccacagagatgggcgtgcggctgatggtggatgccgagcagacctacttccagccggccatcagccgcctgacgctggagatgcagcggaagttcaatgtggagaagccgctcatcttcaacacataccagtgctacctcaaggatgcctatgacaatgtgaccctggacgtggagctggctcgccgtgagggctggtgttttggggccaagctggtgcggggcgcatacctggcccaggagcgagcccgtgcggcagagatcggctatgaggaccccatcaaccccacgtacgaggccaccaacgccatgtaccacaggtgcctggactacgtgttggaggagctgaagcacaacgccaaggccaaggtgatggtggcctcccacaatgaggacacagtgcgctttgcactgcgcaggatggaggagctgggcctgcatcctgctgaccaccgggtgtactttggacagctgctaggcatgtgtgaccagatcagcttcccgctgggccaggctggctaccccgtgtacaagtacgtgccctatggccccgtgatggaggtgctgccctacttgtcccgccgtgccctggagaacagcagcctcatgaagggcacccatcgggagcggcagctgctgtggctggagctcttgaggcggctccgaactggcaacctcttccatcgccctgcctagcacccgccagcacacccttagcctccagcaccccccgcccccgcccaggccatcaccacagctgcagccaaccccatcctcacacagattcaccttttttcaccccacacttgcagagctgctggaggtgaggtcaggtgcctcccagccctgcccagagtatgggcactcaggtgtgggccgaacctgatacctgcctgggacagccactggaaacttttgggaactctcctcgaatgtgtgggcccaaggcccccacctctgtgacccccatgtccttggacctagaggattgtccaccttctgccaaggccagcccacacagcccgagccccttggggagcagtggccgggctggggaggcctgcctggtcaataaaccactgttcctgcaaaaaaaaaaaaaaa

SEQ ID NO: 3595 - DNA, 4909 bp, Homo sapiens; identical to SEQ ID NO: 707

SEQ ID NO: 3596 - DNA, 1722 bp, Homo sapiens
caccgagcctggctctactgcaggcgctgggggttggggtgggggagaggcccagggcacatgatgccgcccccagcccgcccagcacatgacccaggcaggccggcggggtcctggcacacccgagccgcgtccgcgaacacagcccatggcctccccgcgcctagggaccttctgctgccccacgcgggacgcagccacgcagctcgtgctgagcttccagccgcgggccttccacgcgctctgcctgggcagcggcgggctccgcttggcgctgggccttctgcagctgctgcccggccgccggcccgcgggccccgggtcccccgcgacgtccccgccggcctcggtccgcatcctgcgcgctgccgctgcctgcgaccttctcggctgcctgggtatggtgatccggtccaccgtgtggttaggattcccaaattttgttgacagcgtctcggatatgaaccacacggaaatttggcctgctgctttctgcgtggggagtgcgatgtggatccagctgttgtacagtgcctgcttctggtggctgttttgctatgcagtggatgcttatctggtgatccggagatcggcaggactgagcaccatcctgctgtatcacatcatggcgtggggcctggccaccctgctctgtgtggagggagccgccatgctctactacccttccgtgtccaggtgtgagcggggcctggaccacgccatcccccactatgtcaccatgtacctgcccctgctgctggttctcgtggcgaaccccatcctgttccaaaagacagtgactgcagtggcctctttacttaaaggaagacaaggcatttacacggagaacgagaggaggatgggagccgtgatcaagatccgatttttcaaaatcatgctggttttaattatttgttggttgtcgaatatcatcaatgaaagccttttattctatcttgagatgcaaacagatatcaatggaggttctttgaaacctgtcagaactgcagccaagaccacatggtttattatgggaatcctgaatccagcccagggatttctcttgtctttggccttctacggctggacaggatgcagcctgggttttcagtctcccaggaaggagatccagtgggaatcactgaccacctcggctgctgagggggctcacccatccccactgatgccccatgaaaaccctgcttccgggaaggtgtctcaagtgggtgggcagacttctgacgaagccctgagcatgctgtctgaaggttctgatgccagcacaattgaaattcacactgcaagtgaatcctgcaacaaaaatgagggtgaccctgctctcccaacccatggagacctatgaaggggatgtgctgggggtccagaccccatattcctcagactcaacaattcttgttctttagaactgtgttctcaccttcccaacactgcactgccgaagtgtagcggcccccaaaccttgctctcatcaccagttagagcttcttcccgaagggcctttaggataggagaaagggttcatgcacacacgtgtgagaatggaagagccccctccagaccactctacagctgctctagccttagttgccactaggaagttttctgaggctggctgtaaagtaagtgtaaggtccacatccttggggaagtagttaaataaaatagttatgactgaaaaaaaaaaaaaaaaaaaaaaaaaaa

SEQ ID NO: 3597 - DNA, 6404 bp, Homo sapiens; identical to SEQ ID NO: 697

SEQ ID NO: 3598 - DNA, 6368 bp, Homo sapiens
ttacatcttatagcacccagtgaattatgatatggggctgcggtttatttgctctggcgacaatatggcttacttgccgtggaatatcccggtatttcagaagtaacatattatttttaaagagggagctttgctttctctaaatcacatggtgcaaagttgggaatacagtggcctgtaaattacaaatattatttacaaactagaaggaaagctgacatgtgtttgtgcctgtgtgacagtttcactaaggaattccaaaactgtggatagcctgttacttgagaaaaatacacggtggcagtcttgcagatgtttttcccgcctgttagccctccaggttcaaaaactgtttggtgcattttaaggcggcagtctcaccagatcgcaggattctagtctaattggcttctaaccttcaatctaaccttgccggcttccttgcaaagcccggtgcaagggcctctttcaaaatgaacccactggtgtgcctagcagtcggtagaagaagcgggagggcgtccggtctgcacgcccgccgcgaggttacaatgctgaacgcatgagatggaagataccaacgggaggccgaggggatccacggcgcccgcgcgggctccggcttcctcctgctctcggcgccgctgggcgaccgcccatgacccgctcttgcgggctctgtccggttgacaggcgaccctgtggcccggggaagcgcgggagggcgccggcggaaagttgaagagcgtttttctcgccgccgcgtgcattaggagctcgacgagtccgccctgggcttcctggtggggctgggcgggcgggggaggggccgcgcagcagcagcggaagccagacctcggcgataagaggctgcacagcgacatgcaacagtcttttcactgcagctgaatgagttgtggcgcccacaatgctcccatgacaaggagctgacaagttccattttccgtcgcgggcatcttggaatcatgactcccacaatgccttgggcacttggtcgacagtggggccgcctctgaaaaaaaaatgtgagaggttggtactaagaagtgcctttcctgacgtctctgctgcttggaaccgcttctagagcagtctctgcttttgccttgcttgctgccagctagactgtgacgacagcacatccaccctccacctctagcccagacacccccatttctacttataatcaagagaaaagctctaagtatctggcattgccctaggctgctttagtgttaaaagaaaagtttgctgaaaaagtaagatatcttctgccaggaaatcaaggaggaaaaaaaaaatcattttctcgattttgctctaaactgctgcatctgtctatgccaaactaatcaataccgattgcaccaccaaactccattgcaaattcagctgtgaggagattccctttcagacaactttgctgaaagcagcttggaaattcggtgtcgaagggtctgccacgttttcatgcttgcattttgggctccaaattggcactgggaaggggttactgagagcacaaggctgataccaggccctacttttaaacgttcatctacttacaatcctagtatttctctaaaaaccaaaacctctttgaattaacagtttcatgctgtgaatttctagtgggagatcttttccttgatattgacgacacaattttccatgtacttttaaagcagggagtggggaaaagtattttgaggggacattttcatcatcagttcagctttttttttttggttgttgctcttttttgggggggttgggtttgttggtttcactgaaacatttaactacctgtaaaatctaaacatggctgttagtgtcacaccaattcgggacacaaaatggctaacactggaagtatgtagagagttccagagggggacttgctcacggccagacacggaatgtaaatttgcacatccttcgaaaagctgccaagttgaaaatggacgagtaatcgcctgctttgattcattgaaaggccgttgctccagggagaactgcaaatatcttcatccacccccacatttaaaaacgcagttggagataaatggacgcaataacttgattcagcagaagaacatggccatgttggcccagcaaatgcaactagccaatgccatgatgcctggtgccccattacaacccgtgccaatgttttcagttgcaccaagcttagccaccaatgcatcagcagccgcctttaatccctatctgggacctgtttctccaagcctggtcccggcagagatcttgccgactgcaccaatgttggttacagggaatccgggtgtccctgtacctgcagctgctgcagctgctgcacagaaattaatgcgaacagacagacttgaggtatgtcgagagtaccaacgtggcaattgcaaccgaggagaaaatgattgtcggtttgctcatcctgctgacagcacaatgattgacaccaatgacaacacagtcactgtgtgtatggattacatcaaagggagatgctctcgggaaaagtgcaaatactttcatccccctgcacatttgcaagccaagatcaaggctgcccaataccaggtcaaccaggctgcagctgcacaggctgcagccaccgcagctgccatgggaattcctcaagctgtacttcccccattaccaaagaggcctgctcttgaaaaaaccaacggtgccaccgcagtctttaacactggtattttccaataccaacaggctctagccaacatgcagttacaacagcatacagcatttctcccaccagttcccatggtgcacggtgctacgccagccactgtgtccgcagcaacaacatctgccacaagtgttcccttcgctgcaacagccacagccaaccagatacccataatatctgccgaacatctgactagccacaagtatgttacccagatgtagaattttcatcactaaacaatcatgctaaagaggaaaggacagtgtgcttggttagagtaaaggacgaggtcattagccatattgtatatatcgtcaagcaacacacacaaaagttcctcagccacaagacatccacatattgcatgttaaccagaagaaaagacaacattttccggaaatccactgcacactgttgcctatacactttgtacatttaattgatatttgtgctgaggtgatattcctgtctaaaagaacaacattgtctttcttttctagcacagagttatgcattcaaagatgcatacctagttagtttcctatatattcatgccatcttgaaaagacagactatggtgtaaccatgattctattatgtattggtacgtctgtagaccaagatataattttttaaaaataagtttatttctttcaaggtttacaaataacaaaggtgcaccttgtatttaaaattgccattatagatgagagcgtgcatgcacagtcatttttgtttaagagtaatatttttaatgtaatagattgtaagacgtggtgagggagggatctgacagagatgaatgtgccaagcaaaaccacaactgtgtatattttaaagcacatcatggctttaagtaccatgttgttaaggattctcatgaagtgccatagactgtacatcaaattagagtattatttcttcagtgttattgttttcagagccacattttgttgcatatttgctagtactaatcagtcaaagggcaccattctttttttttttttttgaaaccaaagctgtctcagaaatggccaatttaactttacagtaacaatagacagcacaacacaaactctctcaatacagataaactcacacatactggagatatatatataatagatatatataaaattattttaatgcattgtagtgtaatatttatgcatactatactgtataacatgttattcaaaagggattgccatttctgagacacagtaacaaaaaaatgaggaaattattttgcttctatttatagcctctgtcaaaagtcaaaagactataaatgctttgcaaaaatggtttcacgtttgcttaaatgcttcatcacagtcacattcaaaatagtgactctaaacaaagaagaaagcagcactgtcatcagatgcatgataaaccaaaatatgaaaatgggaaatgtttaattaacctagtaattgggtgggttaagtacatgggtgaattttatatgtgatttttgttttgttttgttttgttcagattaactgcttatagccttagaaagccttttacaaaattaaaaaaaaaatagatgtgcattcagtttttaagaatggaatcatccaaaggaattcctttttttgaggtttggatgttgcagctagtaaaggatatttttgctctgttcagcagttctaaaaattgctgaagtaggggccaggtcactggtagttatagtatggaatgggagaagtgaaagttcagttatagaactttccatacttccaagtttactgcaagtttttatgcttgagagagatgctttctaatataagactgatgtgttgattttactgattgtactgtacatctattaaagccttagattattacattacgggttggaacccataccaatgtaatttcaatcgtgttaagaaagtaatggtgacttcacatgttattgtagttagttacattatagaatattacttatttttcttgttaaaatgtagtttttcatttcctacatttattagattttcattttctattaacaattgaataccatttcagtttatagacttgttttattagattttaccaatgaatttttcaaaatacaaaaaaaagtagtttttccttcataacatactcagttttgaattacatgtagtgtcacatgaatattcgtattgttaactaaatgatttatattttactgatttaatattacagtgtaagaatgtcagtcattgttagttcttgtctagttttcattaaaagaacaaagatcttttatatggatatcttataaatatataatcattgctaagtaagaagttaagttgttgctatcgcaacaatcctggcagacaattgagtaatattttgatgatttattttgtttgtaattagttattataagaagatctagatcctagatattagaataaaatttattttctactgtatccatttcaaatgttaaaatattgtttaatatttttgaaatccctgagtatcaggccttgttataaataagctgcataatcaataaatagaacaagggactttttgttgataatccaaatactcaaagtttacgtaatgaaaattatagcgtgtgtgcaaactcttgagggttgattatgctgcaatttagcatgttggaacgtctagggagaaggttgactttttgcacttctgtatatagtcaaaagagagaaacctgtataatagtaagatcttattttgaataaaaacgtctataattacaaggagttttgttaaggctaatacaatgacagactgagcaaaattgcttgcaaaagtggcacagagttagcactccataccccttcaaacatgttgctttgctttcttgtggacagcttgtagtttgccaggattttttcagctggaaagatacgccatcctttcaaaccctcatgactgacaaaaactccatggggccaaatctgcctgaagatcattaccaaaaatagcaggtacttctaccattaaggtgaaatcatggatcagatattccttacatttttcaaaactactgcatgtttaaaacttcaacaaaaaaagagagaaagaactatactaagaacatatattattcagatcagtttctgccaatttcagtggtttattgttcacaaaaaaatcttcaaaacaagtattgactttcacaaaatttaaatcataaacaggcaaaccaaacagcacactgtagctatagttgttatgtgattgttttttaattgctgtaggatcctgttctttcagcaggtgaaaaataaaacgcagttcaaatttcatggttttaattttcaactcagaagcactcaaaaatgcaaaatgtgataatgggcacttgtttaaaagaattagtgtatccagccttcactccagctggttaaaaatgttgcacttatcagcaaccctaccactttcatctgctgaaaggacaaatgtgcttggttttactattatgtaatcacaacttactttctgcttgtagttgcttaaaattatgtattttgtcttgggctgcaatttgttttatgcttattttattattactgcagtagttgactttgctgtatggaaaaataaagtgaaattgccctaataaaacttctctttcttaagt

SEQ ID NO: 3599 - DNA, 5390 bp, Homo sapiens
gttggtactaagaagtgcctttcctgacgtctctgctgcttggaaccgcttctagagcagtctctgcttttgccttgcttgctgccagctagactgtgacgacagcacatccaccctccacctctagcccagacacccccatttctacttataatcaagagaaaagctctaagtatctggcattgccctaggctgctttagtgttaaaagaaaagtttgctgaaaaagtaagatatcttctgccaggaaatcaaggaggaaaaaaaaaatcattttctcgattttgctctaaactgctgcatctgtctatgccaaactaatcaataccgattgcaccaccaaactccattgcaaattcagctgtgaggagattccctttcagacaactttgctgaaagcagcttggaaattcggtgtcgaagggtctgccacgttttcatgcttgcattttgggctccaaattggcactgggaaggggttactgagagcacaaggctgataccaggccctacttttaaacgttcatctacttacaatcctagtatttctctaaaaaccaaaacctctttgaattaacagtttcatgctgtgaatttctagtgggagatcttttccttgatattgacgacacaattttccatgtacttttaaagcagggagtggggaaaagtattttgaggggacattttcatcatcagttcagctttttttttttggttgttgctcttttttgggggggttgggtttgttggtttcactgaaacatttaactacctgtaaaatctaaacatggctgttagtgtcacaccaattcgggacacaaaatggctaacactggaagtatgtagagagttccagagggggacttgctcacggccagacacggaatgtaaatttgcacatccttcgaaaagctgccaagttgaaaatggacgagtaatcgcctgctttgattcattgaaaggccgttgctccagggagaactgcaaatatcttcatccacccccacatttaaaaacgcagttggagataaatggacgcaataacttgattcagcagaagaacatggccatgttggcccagcaaatgcaactagccaatgccatgatgcctggtgccccattacaacccgtgccaatgttttcagttgcaccaagcttagccaccaatgcatcagcagccgcctttaatccctatctgggacctgtttctccaagcctggtcccggcagagatcttgccgactgcaccaatgttggttacagggaatccgggtgtccctgtacctgcagctgctgcagctgctgcacagaaattaatgcgaacagacagacttgaggtatgtcgagagtaccaacgtggcaattgcaaccgaggagaaaatgattgtcggtttgctcatcctgctgacagcacaatgattgacaccaatgacaacacagtcactgtgtgtatggattacatcaaagggagatgctctcgggaaaagtgcaaatactttcatccccctgcacatttgcaagccaagatcaaggctgcccaataccaggtcaaccaggctgcagctgcacaggctgcagccaccgcagctgccatgactcagtcggctgtcaaatcactgaagcgacccctcgaggcaacctttgacctgggaattcctcaagctgtacttcccccattaccaaagaggcctgctcttgaaaaaaccaacggtgccaccgcagtctttaacactggtattttccaataccaacaggctctagccaacatgcagttacaacagcatacagcatttctcccaccagttcccatggtgcacggtgctacgccagccactgtgtccgcagcaacaacatctgccacaagtgttcccttcgctgcaacagccacagccaaccagatacccataatatctgccgaacatctgactagccacaagtatgttacccagatgtagaattttcatcactaaacaatcatgctaaagaggaaaggacagtgtgcttggttagagtaaaggacgaggtcattagccatattgtatatatcgtcaagcaacacacacaaaagttcctcagccacaagacatccacatattgcatgttaaccagaagaaaagacaacattttccggaaatccactgcacactgttgcctatacactttgtacatttaattgatatttgtgctgaggtgatattcctgtctaaaagaacaacattgtctttcttttctagcacagagttatgcattcaaagatgcatacctagttagtttcctatatattcatgccatcttgaaaagacagactatggtgtaaccatgattctattatgtattggtacgtctgtagaccaagatataattttttaaaaataagtttatttctttcaaggtttacaaataacaaaggtgcaccttgtatttaaaattgccattatagatgagagcgtgcatgcacagtcatttttgtttaagagtaatatttttaatgtaatagattgtaagacgtggtgagggagggatctgacagagatgaatgtgccaagcaaaaccacaactgtgtatattttaaagcacatcatggctttaagtaccatgttgttaaggattctcatgaagtgccatagactgtacatcaaattagagtattatttcttcagtgttattgttttcagagccacattttgttgcatatttgctagtactaatcagtcaaagggcaccattctttttttttttttttgaaaccaaagctgtctcagaaatggccaatttaactttacagtaacaatagacagcacaacacaaactctctcaatacagataaactcacacatactggagatatatatataatagatatatataaaattattttaatgcattgtagtgtaatatttatgcatactatactgtataacatgttattcaaaagggattgccatttctgagacacagtaacaaaaaaatgaggaaattattttgcttctatttatagcctctgtcaaaagtcaaaagactataaatgctttgcaaaaatggtttcacgtttgcttaaatgcttcatcacagtcacattcaaaatagtgactctaaacaaagaagaaagcagcactgtcatcagatgcatgataaaccaaaatatgaaaatgggaaatgtttaattaacctagtaattgggtgggttaagtacatgggtgaattttatatgtgatttttgttttgttttgttttgttcagattaactgcttatagccttagaaagccttttacaaaattaaaaaaaaaatagatgtgcattcagtttttaagaatggaatcatccaaaggaattcctttttttgaggtttggatgttgcagctagtaaaggatatttttgctctgttcagcagttctaaaaattgctgaagtaggggccaggtcactggtagttatagtatggaatgggagaagtgaaagttcagttatagaactttccatacttccaagtttactgcaagtttttatgcttgagagagatgctttctaatataagactgatgtgttgattttactgattgtactgtacatctattaaagccttagattattacattacgggttggaacccataccaatgtaatttcaatcgtgttaagaaagtaatggtgacttcacatgttattgtagttagttacattatagaatattacttatttttcttgttaaaatgtagtttttcatttcctacatttattagattttcattttctattaacaattgaataccatttcagtttatagacttgttttattagattttaccaatgaatttttcaaaatacaaaaaaaagtagtttttccttcataacatactcagttttgaattacatgtagtgtcacatgaatattcgtattgttaactaaatgatttatattttactgatttaatattacagtgtaagaatgtcagtcattgttagttcttgtctagttttcattaaaagaacaaagatcttttatatggatatcttataaatatataatcattgctaagtaagaagttaagttgttgctatcgcaacaatcctggcagacaattgagtaatattttgatgatttattttgtttgtaattagttattataagaagatctagatcctagatattagaataaaatttattttctactgtatccatttcaaatgttaaaatattgtttaatatttttgaaatccctgagtatcaggccttgttataaataagctgcataatcaataaatagaacaagggactttttgttgataatccaaatactcaaagtttacgtaatgaaaattatagcgtgtgtgcaaactcttgagggttgattatgctgcaatttagcatgttggaacgtctagggagaaggttgactttttgcacttctgtatatagtcaaaagagagaaacctgtataatagtaagatcttattttgaataaaaacgtctataattacaaggagttttgttaaggctaatacaatgacagactgagcaaaattgcttgcaaaagtggcacagagttagcactccataccccttcaaacatgttgctttgctttcttgtggacagcttgtagtttgccaggattttttcagctggaaagatacgccatcctttcaaaccctcatgactgacaaaaactccatggggccaaatctgcctgaagatcattaccaaaaatagcaggtacttctaccattaaggtgaaatcatggatcagatattccttacatttttcaaaactactgcatgtttaaaacttcaacaaaaaaagagagaaagaactatactaagaacatatattattcagatcagtttctgccaatttcagtggtttattgttcacaaaaaaatcttcaaaacaagtattgactttcacaaaatttaaatcataaacaggcaaaccaaacagcacactgtagctatagttgttatgtgattgttttttaattgctgtaggatcctgttctttcagcaggtgaaaaataaaacgcagttcaaatttcatggttttaattttcaactcagaagcactcaaaaatgcaaaatgtgataatgggcacttgtttaaaagaattagtgtatccagccttcactccagctggttaaaaatgttgcacttatcagcaaccctaccactttcatctgctgaaaggacaaatgtgcttggttttactattatgtaatcacaacttactttctgcttgtagttgcttaaaattatgtattttgtcttgggctgcaatttgttttatgcttattttattattactgcagtagttgactttgctgtatggaaaaataaagtgaaattgccctaataaaacttctctttcttaagtaaaaaaaaaaaaaaaaaaaaa

SEQ ID NO: 3600 - DNA, 5132 bp, Homo sapiens
gttggtactaagaagtgcctttcctgacgtctctgctgcttggaaccgcttctagagcagtctctgcttttgccttgcttgctgccagctagactgtgacgacagcacatccaccctccacctctagcccagacacccccatttctacttataatcaagagaaaagctctaagtatctggcattgccctaggctgctttagtgttaaaagaaaagtttgctgaaaaagtaagatatcttctgccaggaaatcaaggaggaaaaaaaaaatcattttctcgattttgctctaaactgctgcatctgtctatgccaaactaatcaataccgattgcaccaccaaactccattgcaaattcagctgtgaggagattccctttcagacaactttgctgaaagcagcttggaaattcggtgtcgaagggtctgccacgttttcatgcttgcattttgggctccaaattggcactgggaaggggttactgagagcacaaggctgataccaggccctacttttaaacgttcatctacttacaatcctagtatttctctaaaaaccaaaacctctttgaattaacagtttcatgctgtgaatttctagtgggagatcttttccttgatattgacgacacaattttccatgtacttttaaagcagggagtggggaaaagtattttgaggggacattttcatcatcagttcagctttttttttttggttgttgctcttttttgggggggttgggtttgttggtttcactgaaacatttaactacctgtaaaatctaaacatggctgttagtgtcacaccaattcgggacacaaaatggctaacactggaagtatgtagagagttccagagggggacttgctcacggccagacacggaatgtaaatttgcacatccttcgaaaagctgccaagttgaaaatggacgagtaatcgcctgctttgattcattgaaaggccgttgctccagggagaactgcaaatatcttcatccacccccacatttaaaaacgcagttggagataaatggacgcaataacttgattcagcagaagaacatggccatgttggcccagcaaatgcaactagccaatgccatgatgcctggtgccccattacaacccgtggtatgtcgagagtaccaacgtggcaattgcaaccgaggagaaaatgattgtcggtttgctcatcctgctgacagcacaatgattgacaccaatgacaacacagtcactgtgtgtatggattacatcaaagggagatgctctcgggaaaagtgcaaatactttcatccccctgcacatttgcaagccaagatcaaggctgcccaataccaggtcaaccaggctgcagctgcacaggctgcagccaccgcagctgccatgggaattcctcaagctgtacttcccccattaccaaagaggcctgctcttgaaaaaaccaacggtgccaccgcagtctttaacactggtattttccaataccaacaggctctagccaacatgcagttacaacagcatacagcatttctcccaccagttcccatggtgcacggtgctacgccagccactgtgtccgcagcaacaacatctgccacaagtgttcccttcgctgcaacagccacagccaaccagatacccataatatctgccgaacatctgactagccacaagtatgttacccagatgtagaattttcatcactaaacaatcatgctaaagaggaaaggacagtgtgcttggttagagtaaaggacgaggtcattagccatattgtatatatcgtcaagcaacacacacaaaagttcctcagccacaagacatccacatattgcatgttaaccagaagaaaagacaacattttccggaaatccactgcacactgttgcctatacactttgtacatttaattgatatttgtgctgaggtgatattcctgtctaaaagaacaacattgtctttcttttctagcacagagttatgcattcaaagatgcatacctagttagtttcctatatattcatgccatcttgaaaagacagactatggtgtaaccatgattctattatgtattggtacgtctgtagaccaagatataattttttaaaaataagtttatttctttcaaggtttacaaataacaaaggtgcaccttgtatttaaaattgccattatagatgagagcgtgcatgcacagtcatttttgtttaagagtaatatttttaatgtaatagattgtaagacgtggtgagggagggatctgacagagatgaatgtgccaagcaaaaccacaactgtgtatattttaaagcacatcatggctttaagtaccatgttgttaaggattctcatgaagtgccatagactgtacatcaaattagagtattatttcttcagtgttattgttttcagagccacattttgttgcatatttgctagtactaatcagtcaaagggcaccattctttttttttttttttgaaaccaaagctgtctcagaaatggccaatttaactttacagtaacaatagacagcacaacacaaactctctcaatacagataaactcacacatactggagatatatatataatagatatatataaaattattttaatgcattgtagtgtaatatttatgcatactatactgtataacatgttattcaaaagggattgccatttctgagacacagtaacaaaaaaatgaggaaattattttgcttctatttatagcctctgtcaaaagtcaaaagactataaatgctttgcaaaaatggtttcacgtttgcttaaatgcttcatcacagtcacattcaaaatagtgactctaaacaaagaagaaagcagcactgtcatcagatgcatgataaaccaaaatatgaaaatgggaaatgtttaattaacctagtaattgggtgggttaagtacatgggtgaattttatatgtgatttttgttttgttttgttttgttcagattaactgcttatagccttagaaagccttttacaaaattaaaaaaaaaatagatgtgcattcagtttttaagaatggaatcatccaaaggaattcctttttttgaggtttggatgttgcagctagtaaaggatatttttgctctgttcagcagttctaaaaattgctgaagtaggggccaggtcactggtagttatagtatggaatgggagaagtgaaagttcagttatagaactttccatacttccaagtttactgcaagtttttatgcttgagagagatgctttctaatataagactgatgtgttgattttactgattgtactgtacatctattaaagccttagattattacattacgggttggaacccataccaatgtaatttcaatcgtgttaagaaagtaatggtgacttcacatgttattgtagttagttacattatagaatattacttatttttcttgttaaaatgtagtttttcatttcctacatttattagattttcattttctattaacaattgaataccatttcagtttatagacttgttttattagattttaccaatgaatttttcaaaatacaaaaaaaagtagtttttccttcataacatactcagttttgaattacatgtagtgtcacatgaatattcgtattgttaactaaatgatttatattttactgatttaatattacagtgtaagaatgtcagtcattgttagttcttgtctagttttcattaaaagaacaaagatcttttatatggatatcttataaatatataatcattgctaagtaagaagttaagttgttgctatcgcaacaatcctggcagacaattgagtaatattttgatgatttattttgtttgtaattagttattataagaagatctagatcctagatattagaataaaatttattttctactgtatccatttcaaatgttaaaatattgtttaatatttttgaaatccctgagtatcaggccttgttataaataagctgcataatcaataaatagaacaagggactttttgttgataatccaaatactcaaagtttacgtaatgaaaattatagcgtgtgtgcaaactcttgagggttgattatgctgcaatttagcatgttggaacgtctagggagaaggttgactttttgcacttctgtatatagtcaaaagagagaaacctgtataatagtaagatcttattttgaataaaaacgtctataattacaaggagttttgttaaggctaatacaatgacagactgagcaaaattgcttgcaaaagtggcacagagttagcactccataccccttcaaacatgttgctttgctttcttgtggacagcttgtagtttgccaggattttttcagctggaaagatacgccatcctttcaaaccctcatgactgacaaaaactccatggggccaaatctgcctgaagatcattaccaaaaatagcaggtacttctaccattaaggtgaaatcatggatcagatattccttacatttttcaaaactactgcatgtttaaaacttcaacaaaaaaagagagaaagaactatactaagaacatatattattcagatcagtttctgccaatttcagtggtttattgttcacaaaaaaatcttcaaaacaagtattgactttcacaaaatttaaatcataaacaggcaaaccaaacagcacactgtagctatagttgttatgtgattgttttttaattgctgtaggatcctgttctttcagcaggtgaaaaataaaacgcagttcaaatttcatggttttaattttcaactcagaagcactcaaaaatgcaaaatgtgataatgggcacttgtttaaaagaattagtgtatccagccttcactccagctggttaaaaatgttgcacttatcagcaaccctaccactttcatctgctgaaaggacaaatgtgcttggttttactattatgtaatcacaacttactttctgcttgtagttgcttaaaattatgtattttgtcttgggctgcaatttgttttatgcttattttattattactgcagtagttgactttgctgtatggaaaaataaagtgaaattgccctaataaaacttctctttcttaagtaaaaaaaaaaaaaaaaaaaaa

SEQ ID NO: 3601 - DNA, 5168 bp, Homo sapiens
gttggtactaagaagtgcctttcctgacgtctctgctgcttggaaccgcttctagagcagtctctgcttttgccttgcttgctgccagctagactgtgacgacagcacatccaccctccacctctagcccagacacccccatttctacttataatcaagagaaaagctctaagtatctggcattgccctaggctgctttagtgttaaaagaaaagtttgctgaaaaagtaagatatcttctgccaggaaatcaaggaggaaaaaaaaaatcattttctcgattttgctctaaactgctgcatctgtctatgccaaactaatcaataccgattgcaccaccaaactccattgcaaattcagctgtgaggagattccctttcagacaactttgctgaaagcagcttggaaattcggtgtcgaagggtctgccacgttttcatgcttgcattttgggctccaaattggcactgggaaggggttactgagagcacaaggctgataccaggccctacttttaaacgttcatctacttacaatcctagtatttctctaaaaaccaaaacctctttgaattaacagtttcatgctgtgaatttctagtgggagatcttttccttgatattgacgacacaattttccatgtacttttaaagcagggagtggggaaaagtattttgaggggacattttcatcatcagttcagctttttttttttggttgttgctcttttttgggggggttgggtttgttggtttcactgaaacatttaactacctgtaaaatctaaacatggctgttagtgtcacaccaattcgggacacaaaatggctaacactggaagtatgtagagagttccagagggggacttgctcacggccagacacggaatgtaaatttgcacatccttcgaaaagctgccaagttgaaaatggacgagtaatcgcctgctttgattcattgaaaggccgttgctccagggagaactgcaaatatcttcatccacccccacatttaaaaacgcagttggagataaatggacgcaataacttgattcagcagaagaacatggccatgttggcccagcaaatgcaactagccaatgccatgatgcctggtgccccattacaacccgtggtatgtcgagagtaccaacgtggcaattgcaaccgaggagaaaatgattgtcggtttgctcatcctgctgacagcacaatgattgacaccaatgacaacacagtcactgtgtgtatggattacatcaaagggagatgctctcgggaaaagtgcaaatactttcatccccctgcacatttgcaagccaagatcaaggctgcccaataccaggtcaaccaggctgcagctgcacaggctgcagccaccgcagctgccatgggaattcctcaagctgtacttcccccattaccaaagaggcctgctcttgaaaaaaccaacggtgccaccgcagtctttaacactggtattttccaataccaacaggctctagccaacatgcagttacaacagcatacagcatttctcccaccaggctcaatattgtgcatgacacccgctacaagtgttgttcccatggtgcacggtgctacgccagccactgtgtccgcagcaacaacatctgccacaagtgttcccttcgctgcaacagccacagccaaccagatacccataatatctgccgaacatctgactagccacaagtatgttacccagatgtagaattttcatcactaaacaatcatgctaaagaggaaaggacagtgtgcttggttagagtaaaggacgaggtcattagccatattgtatatatcgtcaagcaacacacacaaaagttcctcagccacaagacatccacatattgcatgttaaccagaagaaaagacaacattttccggaaatccactgcacactgttgcctatacactttgtacatttaattgatatttgtgctgaggtgatattcctgtctaaaagaacaacattgtctttcttttctagcacagagttatgcattcaaagatgcatacctagttagtttcctatatattcatgccatcttgaaaagacagactatggtgtaaccatgattctattatgtattggtacgtctgtagaccaagatataattttttaaaaataagtttatttctttcaaggtttacaaataacaaaggtgcaccttgtatttaaaattgccattatagatgagagcgtgcatgcacagtcatttttgtttaagagtaatatttttaatgtaatagattgtaagacgtggtgagggagggatctgacagagatgaatgtgccaagcaaaaccacaactgtgtatattttaaagcacatcatggctttaagtaccatgttgttaaggattctcatgaagtgccatagactgtacatcaaattagagtattatttcttcagtgttattgttttcagagccacattttgttgcatatttgctagtactaatcagtcaaagggcaccattctttttttttttttttgaaaccaaagctgtctcagaaatggccaatttaactttacagtaacaatagacagcacaacacaaactctctcaatacagataaactcacacatactggagatatatatataatagatatatataaaattattttaatgcattgtagtgtaatatttatgcatactatactgtataacatgttattcaaaagggattgccatttctgagacacagtaacaaaaaaatgaggaaattattttgcttctatttatagcctctgtcaaaagtcaaaagactataaatgctttgcaaaaatggtttcacgtttgcttaaatgcttcatcacagtcacattcaaaatagtgactctaaacaaagaagaaagcagcactgtcatcagatgcatgataaaccaaaatatgaaaatgggaaatgtttaattaacctagtaattgggtgggttaagtacatgggtgaattttatatgtgatttttgttttgttttgttttgttcagattaactgcttatagccttagaaagccttttacaaaattaaaaaaaaaatagatgtgcattcagtttttaagaatggaatcatccaaaggaattcctttttttgaggtttggatgttgcagctagtaaaggatatttttgctctgttcagcagttctaaaaattgctgaagtaggggccaggtcactggtagttatagtatggaatgggagaagtgaaagttcagttatagaactttccatacttccaagtttactgcaagtttttatgcttgagagagatgctttctaatataagactgatgtgttgattttactgattgtactgtacatctattaaagccttagattattacattacgggttggaacccataccaatgtaatttcaatcgtgttaagaaagtaatggtgacttcacatgttattgtagttagttacattatagaatattacttatttttcttgttaaaatgtagtttttcatttcctacatttattagattttcattttctattaacaattgaataccatttcagtttatagacttgttttattagattttaccaatgaatttttcaaaatacaaaaaaaagtagtttttccttcataacatactcagttttgaattacatgtagtgtcacatgaatattcgtattgttaactaaatgatttatattttactgatttaatattacagtgtaagaatgtcagtcattgttagttcttgtctagttttcattaaaagaacaaagatcttttatatggatatcttataaatatataatcattgctaagtaagaagttaagttgttgctatcgcaacaatcctggcagacaattgagtaatattttgatgatttattttgtttgtaattagttattataagaagatctagatcctagatattagaataaaatttattttctactgtatccatttcaaatgttaaaatattgtttaatatttttgaaatccctgagtatcaggccttgttataaataagctgcataatcaataaatagaacaagggactttttgttgataatccaaatactcaaagtttacgtaatgaaaattatagcgtgtgtgcaaactcttgagggttgattatgctgcaatttagcatgttggaacgtctagggagaaggttgactttttgcacttctgtatatagtcaaaagagagaaacctgtataatagtaagatcttattttgaataaaaacgtctataattacaaggagttttgttaaggctaatacaatgacagactgagcaaaattgcttgcaaaagtggcacagagttagcactccataccccttcaaacatgttgctttgctttcttgtggacagcttgtagtttgccaggattttttcagctggaaagatacgccatcctttcaaaccctcatgactgacaaaaactccatggggccaaatctgcctgaagatcattaccaaaaatagcaggtacttctaccattaaggtgaaatcatggatcagatattccttacatttttcaaaactactgcatgtttaaaacttcaacaaaaaaagagagaaagaactatactaagaacatatattattcagatcagtttctgccaatttcagtggtttattgttcacaaaaaaatcttcaaaacaagtattgactttcacaaaatttaaatcataaacaggcaaaccaaacagcacactgtagctatagttgttatgtgattgttttttaattgctgtaggatcctgttctttcagcaggtgaaaaataaaacgcagttcaaatttcatggttttaattttcaactcagaagcactcaaaaatgcaaaatgtgataatgggcacttgtttaaaagaattagtgtatccagccttcactccagctggttaaaaatgttgcacttatcagcaaccctaccactttcatctgctgaaaggacaaatgtgcttggttttactattatgtaatcacaacttactttctgcttgtagttgcttaaaattatgtattttgtcttgggctgcaatttgttttatgcttattttattattactgcagtagttgactttgctgtatggaaaaataaagtgaaattgccctaataaaacttctctttcttaagtaaaaaaaaaaaaaaaaaaaaa

SEQ ID NO: 3602 - DNA, 5246 bp, Homo sapiens
gttggtactaagaagtgcctttcctgacgtctctgctgcttggaaccgcttctagagcagtctctgcttttgccttgcttgctgccagctagactgtgacgacagcacatccaccctccacctctagcccagacacccccatttctacttataatcaagagaaaagctctaagtatctggcattgccctaggctgctttagtgttaaaagaaaagtttgctgaaaaagtaagatatcttctgccaggaaatcaaggaggaaaaaaaaaatcattttctcgattttgctctaaactgctgcatctgtctatgccaaactaatcaataccgattgcaccaccaaactccattgcaaattcagctgtgaggagattccctttcagacaactttgctgaaagcagcttggaaattcggtgtcgaagggtctgccacgttttcatgcttgcattttgggctccaaattggcactgggaaggggttactgagagcacaaggctgataccaggccctacttttaaacgttcatctacttacaatcctagtatttctctaaaaaccaaaacctctttgaattaacagtttcatgctgtgaatttctagtgggagatcttttccttgatattgacgacacaattttccatgtacttttaaagcagggagtggggaaaagtattttgaggggacattttcatcatcagttcagctttttttttttggttgttgctcttttttgggggggttgggtttgttggtttcactgaaacatttaactacctgtaaaatctaaacatggctgttagtgtcacaccaattcgggacacaaaatggctaacactggaagtatgtagagagttccagagggggacttgctcacggccagacacggaatgtaaatttgcacatccttcgaaaagctgccaagttgaaaatggacgagtaatcgcctgctttgattcattgaaaggccgttgctccagggagaactgcaaatatcttcatccacccccacatttaaaaacgcagttggagataaatggacgcaataacttgattcagcagaagaacatggccatgttggcccagcaaatgcaactagccaatgccatgatgcctggtgccccattacaacccgtgccaatgttttcagttgcaccaagcttagccaccaatgcatcagcagccgcctttaatccctatctgggacctgtttctccaagcctggtcccggcagagatcttgccgactgcaccaatgttggttacagggaatccgggtgtccctgtacctgcagctgctgcagctgctgcacagaaattaatgcgaacagacagacttgaggtatgtcgagagtaccaacgtggcaattgcaaccgaggagaaaatgattgtcggtttgctcatcctgctgacagcacaatgattgacaccaatgacaacacagtcactgtgtgtatggattacatcaaagggagatgctctcgggaaaagtgcaaatactttcatccccctgcacatttgcaagccaagatcaaggctgcccaataccaggtcaaccaggctgcagctgcacaggctgcagccaccgcagctgccatgttcccatggtgcacggtgctacgccagccactgtgtccgcagcaacaacatctgccacaagtgttcccttcgctgcaacagccacagccaaccagccccatccttgatgcttctacactgttgggtgcaacatcctgtcctgcagcagcaggaaaaatgatacccataatatctgccgaacatctgactagccacaagtatgttacccagatgtagaattttcatcactaaacaatcatgctaaagaggaaaggacagtgtgcttggttagagtaaaggacgaggtcattagccatattgtatatatcgtcaagcaacacacacaaaagttcctcagccacaagacatccacatattgcatgttaaccagaagaaaagacaacattttccggaaatccactgcacactgttgcctatacactttgtacatttaattgatatttgtgctgaggtgatattcctgtctaaaagaacaacattgtctttcttttctagcacagagttatgcattcaaagatgcatacctagttagtttcctatatattcatgccatcttgaaaagacagactatggtgtaaccatgattctattatgtattggtacgtctgtagaccaagatataattttttaaaaataagtttatttctttcaaggtttacaaataacaaaggtgcaccttgtatttaaaattgccattatagatgagagcgtgcatgcacagtcatttttgtttaagagtaatatttttaatgtaatagattgtaagacgtggtgagggagggatctgacagagatgaatgtgccaagcaaaaccacaactgtgtatattttaaagcacatcatggctttaagtaccatgttgttaaggattctcatgaagtgccatagactgtacatcaaattagagtattatttcttcagtgttattgttttcagagccacattttgttgcatatttgctagtactaatcagtcaaagggcaccattctttttttttttttttgaaaccaaagctgtctcagaaatggccaatttaactttacagtaacaatagacagcacaacacaaactctctcaatacagataaactcacacatactggagatatatatataatagatatatataaaattattttaatgcattgtagtgtaatatttatgcatactatactgtataacatgttattcaaaagggattgccatttctgagacacagtaacaaaaaaatgaggaaattattttgcttctatttatagcctctgtcaaaagtcaaaagactataaatgctttgcaaaaatggtttcacgtttgcttaaatgcttcatcacagtcacattcaaaatagtgactctaaacaaagaagaaagcagcactgtcatcagatgcatgataaaccaaaatatgaaaatgggaaatgtttaattaacctagtaattgggtgggttaagtacatgggtgaattttatatgtgatttttgttttgttttgttttgttcagattaactgcttatagccttagaaagccttttacaaaattaaaaaaaaaatagatgtgcattcagtttttaagaatggaatcatccaaaggaattcctttttttgaggtttggatgttgcagctagtaaaggatatttttgctctgttcagcagttctaaaaattgctgaagtaggggccaggtcactggtagttatagtatggaatgggagaagtgaaagttcagttatagaactttccatacttccaagtttactgcaagtttttatgcttgagagagatgctttctaatataagactgatgtgttgattttactgattgtactgtacatctattaaagccttagattattacattacgggttggaacccataccaatgtaatttcaatcgtgttaagaaagtaatggtgacttcacatgttattgtagttagttacattatagaatattacttatttttcttgttaaaatgtagtttttcatttcctacatttattagattttcattttctattaacaattgaataccatttcagtttatagacttgttttattagattttaccaatgaatttttcaaaatacaaaaaaaagtagtttttccttcataacatactcagttttgaattacatgtagtgtcacatgaatattcgtattgttaactaaatgatttatattttactgatttaatattacagtgtaagaatgtcagtcattgttagttcttgtctagttttcattaaaagaacaaagatcttttatatggatatcttataaatatataatcattgctaagtaagaagttaagttgttgctatcgcaacaatcctggcagacaattgagtaatattttgatgatttattttgtttgtaattagttattataagaagatctagatcctagatattagaataaaatttattttctactgtatccatttcaaatgttaaaatattgtttaatatttttgaaatccctgagtatcaggccttgttataaataagctgcataatcaataaatagaacaagggactttttgttgataatccaaatactcaaagtttacgtaatgaaaattatagcgtgtgtgcaaactcttgagggttgattatgctgcaatttagcatgttggaacgtctagggagaaggttgactttttgcacttctgtatatagtcaaaagagagaaacctgtataatagtaagatcttattttgaataaaaacgtctataattacaaggagttttgttaaggctaatacaatgacagactgagcaaaattgcttgcaaaagtggcacagagttagcactccataccccttcaaacatgttgctttgctttcttgtggacagcttgtagtttgccaggattttttcagctggaaagatacgccatcctttcaaaccctcatgactgacaaaaactccatggggccaaatctgcctgaagatcattaccaaaaatagcaggtacttctaccattaaggtgaaatcatggatcagatattccttacatttttcaaaactactgcatgtttaaaacttcaacaaaaaaagagagaaagaactatactaagaacatatattattcagatcagtttctgccaatttcagtggtttattgttcacaaaaaaatcttcaaaacaagtattgactttcacaaaatttaaatcataaacaggcaaaccaaacagcacactgtagctatagttgttatgtgattgttttttaattgctgtaggatcctgttctttcagcaggtgaaaaataaaacgcagttcaaatttcatggttttaattttcaactcagaagcactcaaaaatgcaaaatgtgataatgggcacttgtttaaaagaattagtgtatccagccttcactccagctggttaaaaatgttgcacttatcagcaaccctaccactttcatctgctgaaaggacaaatgtgcttggttttactattatgtaatcacaacttactttctgcttgtagttgcttaaaattatgtattttgtcttgggctgcaatttgttttatgcttattttattattactgcagtagttgactttgctgtatggaaaaataaagtgaaattgccctaataaaacttctctttcttaagtaaaaaaaaaaaaaaaaaaaaa

SEQ ID NO: 3603 - DNA, 5277 bp, Homo sapiens
gttggtactaagaagtgcctttcctgacgtctctgctgcttggaaccgcttctagagcagtctctgcttttgccttgcttgctgccagctagactgtgacgacagcacatccaccctccacctctagcccagacacccccatttctacttataatcaagagaaaagctctaagtatctggcattgccctaggctgctttagtgttaaaagaaaagtttgctgaaaaagtaagatatcttctgccaggaaatcaaggaggaaaaaaaaaatcattttctcgattttgctctaaactgctgcatctgtctatgccaaactaatcaataccgattgcaccaccaaactccattgcaaattcagctgtgaggagattccctttcagacaactttgctgaaagcagcttggaaattcggtgtcgaagggtctgccacgttttcatgcttgcattttgggctccaaattggcactgggaaggggttactgagagcacaaggctgataccaggccctacttttaaacgttcatctacttacaatcctagtatttctctaaaaaccaaaacctctttgaattaacagtttcatgctgtgaatttctagtgggagatcttttccttgatattgacgacacaattttccatgtacttttaaagcagggagtggggaaaagtattttgaggggacattttcatcatcagttcagctttttttttttggttgttgctcttttttgggggggttgggtttgttggtttcactgaaacatttaactacctgtaaaatctaaacatggctgttagtgtcacaccaattcgggacacaaaatggctaacactggaagtatgtagagagttccagagggggacttgctcacggccagacacggaatgtaaatttgcacatccttcgaaaagctgccaagttgaaaatggacgagtaatcgcctgctttgattcattgaaaggccgttgctccagggagaactgcaaatatcttcatccacccccacatttaaaaacgcagttggagataaatggacgcaataacttgattcagcagaagaacatggccatgttggcccagcaaatgcaactagccaatgccatgatgcctggtgccccattacaacccgtgccaatgttttcagttgcaccaagcttagccaccaatgcatcagcagccgcctttaatccctatctgggacctgtttctccaagcctggtcccggcagagatcttgccgactgcaccaatgttggttacagggaatccgggtgtccctgtacctgcagctgctgcagctgctgcacagaaattaatgcgaacagacagacttgaggtatgtcgagagtaccaacgtggcaattgcaaccgaggagaaaatgattgtcggtttgctcatcctgctgacagcacaatgattgacaccaatgacaacacagtcactgtgtgtatggattacatcaaagggagatgctctcgggaaaagtgcaaatactttcatccccctgcacatttgcaagccaagatcaaggctgcccaataccaggtcaaccaggctgcagctgcacaggctgcagccaccgcagctgccatgggaattcctcaagctgtacttcccccattaccaaagaggcctgctcttgaaaaaaccaacggtgccaccgcagtctttaacactggtattttccaataccaacaggctctagccaacatgcagttacaacagcatacagcatttctcccaccaggctcaatattgtgcatgacacccgctacaagtgttgatacccataatatctgccgaacatctgactagccacaagtatgttacccagatgtagaattttcatcactaaacaatcatgctaaagaggaaaggacagtgtgcttggttagagtaaaggacgaggtcattagccatattgtatatatcgtcaagcaacacacacaaaagttcctcagccacaagacatccacatattgcatgttaaccagaagaaaagacaacattttccggaaatccactgcacactgttgcctatacactttgtacatttaattgatatttgtgctgaggtgatattcctgtctaaaagaacaacattgtctttcttttctagcacagagttatgcattcaaagatgcatacctagttagtttcctatatattcatgccatcttgaaaagacagactatggtgtaaccatgattctattatgtattggtacgtctgtagaccaagatataattttttaaaaataagtttatttctttcaaggtttacaaataacaaaggtgcaccttgtatttaaaattgccattatagatgagagcgtgcatgcacagtcatttttgtttaagagtaatatttttaatgtaatagattgtaagacgtggtgagggagggatctgacagagatgaatgtgccaagcaaaaccacaactgtgtatattttaaagcacatcatggctttaagtaccatgttgttaaggattctcatgaagtgccatagactgtacatcaaattagagtattatttcttcagtgttattgttttcagagccacattttgttgcatatttgctagtactaatcagtcaaagggcaccattctttttttttttttttgaaaccaaagctgtctcagaaatggccaatttaactttacagtaacaatagacagcacaacacaaactctctcaatacagataaactcacacatactggagatatatatataatagatatatataaaattattttaatgcattgtagtgtaatatttatgcatactatactgtataacatgttattcaaaagggattgccatttctgagacacagtaacaaaaaaatgaggaaattattttgcttctatttatagcctctgtcaaaagtcaaaagactataaatgctttgcaaaaatggtttcacgtttgcttaaatgcttcatcacagtcacattcaaaatagtgactctaaacaaagaagaaagcagcactgtcatcagatgcatgataaaccaaaatatgaaaatgggaaatgtttaattaacctagtaattgggtgggttaagtacatgggtgaattttatatgtgatttttgttttgttttgttttgttcagattaactgcttatagccttagaaagccttttacaaaattaaaaaaaaaatagatgtgcattcagtttttaagaatggaatcatccaaaggaattcctttttttgaggtttggatgttgcagctagtaaaggatatttttgctctgttcagcagttctaaaaattgctgaagtaggggccaggtcactggtagttatagtatggaatgggagaagtgaaagttcagttatagaactttccatacttccaagtttactgcaagtttttatgcttgagagagatgctttctaatataagactgatgtgttgattttactgattgtactgtacatctattaaagccttagattattacattacgggttggaacccataccaatgtaatttcaatcgtgttaagaaagtaatggtgacttcacatgttattgtagttagttacattatagaatattacttatttttcttgttaaaatgtagtttttcatttcctacatttattagattttcattttctattaacaattgaataccatttcagtttatagacttgttttattagattttaccaatgaatttttcaaaatacaaaaaaaagtagtttttccttcataacatactcagttttgaattacatgtagtgtcacatgaatattcgtattgttaactaaatgatttatattttactgatttaatattacagtgtaagaatgtcagtcattgttagttcttgtctagttttcattaaaagaacaaagatcttttatatggatatcttataaatatataatcattgctaagtaagaagttaagttgttgctatcgcaacaatcctggcagacaattgagtaatattttgatgatttattttgtttgtaattagttattataagaagatctagatcctagatattagaataaaatttattttctactgtatccatttcaaatgttaaaatattgtttaatatttttgaaatccctgagtatcaggccttgttataaataagctgcataatcaataaatagaacaagggactttttgttgataatccaaatactcaaagtttacgtaatgaaaattatagcgtgtgtgcaaactcttgagggttgattatgctgcaatttagcatgttggaacgtctagggagaaggttgactttttgcacttctgtatatagtcaaaagagagaaacctgtataatagtaagatcttattttgaataaaaacgtctataattacaaggagttttgttaaggctaatacaatgacagactgagcaaaattgcttgcaaaagtggcacagagttagcactccataccccttcaaacatgttgctttgctttcttgtggacagcttgtagtttgccaggattttttcagctggaaagatacgccatcctttcaaaccctcatgactgacaaaaactccatggggccaaatctgcctgaagatcattaccaaaaatagcaggtacttctaccattaaggtgaaatcatggatcagatattccttacatttttcaaaactactgcatgtttaaaacttcaacaaaaaaagagagaaagaactatactaagaacatatattattcagatcagtttctgccaatttcagtggtttattgttcacaaaaaaatcttcaaaacaagtattgactttcacaaaatttaaatcataaacaggcaaaccaaacagcacactgtagctatagttgttatgtgattgttttttaattgctgtaggatcctgttctttcagcaggtgaaaaataaaacgcagttcaaatttcatggttttaattttcaactcagaagcactcaaaaatgcaaaatgtgataatgggcacttgtttaaaagaattagtgtatccagccttcactccagctggttaaaaatgttgcacttatcagcaaccctaccactttcatctgctgaaaggacaaatgtgcttggttttactattatgtaatcacaacttactttctgcttgtagttgcttaaaattatgtattttgtcttgggctgcaatttgttttatgcttattttattattactgcagtagttgactttgctgtatggaaaaataaagtgaaattgccctaataaaacttctctttcttaagtaaaaaaaaaaaaaaaaaaaaa

SEQ ID NO: 3604 - DNA, 672 bp, Homo sapiens
actgctgggtgctgctgcgcttgtcaccatcatcaccgtgcccgtggttctgctgaacaaaggcacagatgatgctacagctgacagtcgcaaaacttacactctaactgattacttaaaaaatacttatagactgaagttatactccttaagatggatttcagatcatgaatatctctacaaacaagaaaataatatcttggtattcaatgctgaatatggaaacagctcagttttcttggagaacagtacatttgtatgtttaatcacgtaattaattcatgcatagaattctggggatttttttcattacctttggaatcacgagtactgtcatttctcaacctgttggactctttctgcagcatatggcaaagtggatctttctctccttcttgaaatgctccctgccttggctactttttagtctcctttgacgattcctcttcctctgcccatatttttaaatgatgagtttggacattctatcaatgattattcaatatctcctgatgggcagtttattctcttagaatacaactacgtgaaggcagctgattacagaagagaggattccaaacaacacacagtgggtcacatggtcaccagtgggtcataaattggcatatgtttggaacaatgacatttatgttaaaattgaaccaaatttac

SEQ ID NO: 3605 - DNA, 668 bp, Homo sapiens
ccgtggaagattcttctgggactgctgggtgctgctgcgcttgtcaccatcatcaccgtgcccgtggttctgctgaacaaaggcacagatgatgctacagctgacagtcgcaaaacttacactctaactgattacttaaaaaatacttatagactgaagttatactccttaagatggatttcagatcatgaatatctctacaaacaagaaaataatatcttggtattcaatgctgaatatggaaacagctcagttttcttggagaacagtacatttcatatggcaaagtggatctttctctccttcttgaaatgctccctgccttggctactttttagtctcctttgacgattcctcttcctctgcccatatttttaaatgatgagtttggacattctatcaatgattattcaatatctcctgatgggcagtttattctcttagaatacaactacgtgaagcaatggaggcattcctacacagcttcatatgacatttatgatttaaataaaaggcagctgattacagaagagaggattccaaacaacacacagtgggtcacatggtcaccagtgggtcataaattggcatatgtttggaacaatgacatttatgttaaaattgaaccaaatttaccaagttacagaatcacatggacggggaaagaa

SEQ ID NO: 3606 - DNA, 2140 bp, Homo sapiens
attggatcaaacatgtcacaagagtcggacaagtaagtggatcacacgcgccggctgctgctactactaccactttgggctgatggcaactgtaataaaagactagtggccttagtgcccatgcccagtgaccctccattcaatacccgaagagcctacaccagtgaggatgaagcctggaagtcatacttggagaatcccctgacagcagccaccaaggccatgatgagcattaatggtgatgaggacagtgctgctgccctcggcctgctctatgactactacaaggttcctcgagacaagaggctgctgtctgtaagcaaagcaagtgacagccaagaagaccaggagaaaagaaactgccttggcaccagtgaagcccagagtaatttgagtggaggagaaaaccgagtgcaagtcctaaagactgttccagtgaacctttccctaaatcaagatcacctggagaattccaagcgggaacagtacagcatcagcttccccgagagctctgccatcatcccggtgtcgggaatcacggtggtgaaagctgaagatttcacaccagttttcatggccccacctgtgcactatccccggggagatggggaagagcaacgagtggttatctttgaacagactcagtatgacgtgccctcgctggccacccacagcgcctatctcaaagacgaccagcgcagcactccggacagcacatacagcgagagcttcaaggacgcagccacagagaaatttcggagtgcttcagttggggctgaggagtacatgtatgatcagacatcaagtggcacatttcagtacaccctggaagccaccaaatctctccgtcagaagcagggggagggccccatgacctacctcaacaaaggacagttctatgccataacactcagcgagaccggagacaacaaatgcttccgacaccccatcagcaaagtcaggagtgtggtgatggtggtcttcagtgaagacaaaaacagagatgaacagctcaaatactggaaatactggcactctcggcagcatacggcgaagcagagggtccttgacattgccgattacaaggagagctttaatacgattggaaacattgaagagattgcatataatgctgtttcctttacctgggacgtgaatgaagaggcgaagattttcatcaccgtgaattgcttgagcacagatttctcctcccaaaaaggggtgaaaggacttcctttgatgattcagattgacacatacagttataacaatcgtagcaataaacccattcatagagcttattgccagatcaaggtcttctgtgacaaaggagcagaaagaaaaatccgagatgaagagcggaagcagaacaggaagaaagggaaaggccaggcctcccaaactcaatgcaacagctcctctgatgggaagttggctgccatacctttacagaagaagagtgacatcacctacttcaaaaccatgcctgatctccactcacagccagttctcttcatacctgatgttcactttgcaaacctgcagaggaccggacaggtgtattacaacacggatgatgaacgagaaggtggcagtgtccttgttaaacggatgttccggcccatggaagaggagtttggtccagtgccttcaaagcagatgaaagaagaagggacaaagcgagtgctcttgtacgtgaggaaggagactgacgatgtgttcgatgcattgatgttgaagtctcccacagtgaagggcctgatggaagcgatatctgagaaatatgggctgcccgtggagaagatagcaaagctttacaagaaaagcaaaaaaggcatcttggtgaacatggatgacaacatcatcgagcactactcgaacgaggacaccttcatcctcaacatggagagcatggtggagggcttcaaggtcacgctcatggaaatctagccctgggtttggcatccgctttggctggagctctcagtgcattcctccctgagagagacagaagccccagccccagaacctggagacccatctcccccatctcacaactgctgttacaagaccgtgctggggagtggggcaagggacaggccccactgtcggtgtgcttggcccatccactggcacctac

SEQ ID NO: 3607 - DNA, 2117 bp, Homo sapiens
gtctgtgtgcagaggggattcaacttcaatttttctgcagtggctctgagtccagccccttacttaaagatctggaaagcatgaagactgggctttttttcctatgtctcttgggaactgcagctgcaatcccgacaaatgcaagattattatctgatcattccaaaccaactgctgaaacggtagcacccgacaacactgcaatccccagtttaagggctgaagatgaagaaaatgaaaaagaaacagcagtatccacagaagacgattcccaccataaggctgaaaaatcatcagtactaaagtcaaaagaggaaagccatgaacagtcagcagaacagggcaagagttctagccaagagctgggattgaaggatcaagaggacagtgatggtgacttaagtgtgaatttggagtatgcaccaactgaaggtacattggacataaaagaagatatgagtgagcctcaggagaaaaaactctcagagaacactgattttttggctcctggtgttagttccttcacagattctaaccaacaagaaagtatcacaaagagagaggaaaaccaagaacaacctagaaattattcacatcatcagttgaacaggagcagtaaacatagccaaggcctaagggatcaaggaaaccaagagcaggatccaaatatttccaatggagaagaggaagaagaaaaagagccaggtgaagttggtacccacaatgataaccaagaaagaaagacagaattgcccagggagcatgctaacagcaagcaggaggaagacaatacccaatctgatgatattttggaagagtctgatcaaccaactcaagtaagcaagatgcaggaggatgaatttgatcagggtaaccaagaacaagaagataactccaatgcagaaatggaagaggaaaatgcatcgaacgtcaataagcacattcaagaaactgaatggcagagtcaagagggtaaaactggcctagaagctatcagcaaccacaaagagacagaagaaaagactgtttctgaggctctgctcatggaacctactgatgatggtaataccacgcccagaaatcatggagttgatgatgatggcgatgatgatggcgatgatggcggcactgatggccccaggcacagtgcaagtgatgactacttcatcccaagccaggcctttctggaggccgagagagctcaatccattgcctatcacctcaaaattgaggagcaaagagaaaaagtacatgaaaatgaaaatataggtaccactgagcctggagagcaccaagaggccaagaaagcagagaactcatcaaatgaggaggaaacgtcaagtgaaggcaacatgagggtgcatgctgtggattcttgcatgagcttccagtgtaaaagaggccacatctgtaaggcagaccaacagggaaaacctcactgtgtctgccaggatccagtgacttgtcctccaacaaaaccccttgatcaagtttgtggcactgacaatcagacctatgctagttcctgtcatctattcgctactaaatgcagactggaggggaccaaaaaggggcatcaactccagctggattattttggagcctgcaaatctattcctacttgtacggactttgaagtgattcagtttcctctacggatgagagactggctcaagaatatcctcatgcagctttatgaagccaactctgaacacgctggttatctaaatgagaagcagagaaataaagtcaagaaaatttacctggatgaaaagaggcttttggctggggaccatcccattgaccttctcttaagggactttaagaaaaactaccacatgtatgtgtatcctgtgcactggcagtttagtgaacttgaccaacaccctatggatagagtcttgacacattctgaacttgctcctctgcgagcatctctggtgcccatggaacactgcataacccgtttctttgaggagtgtgaccccaacaaggataagcacatcaccctgaaggagtggggccactgctttggaattaaagaagaggacatagatgaaaatctcttgttttgaacgaagattttaaagaactcaactttccagcatcctcctctg

SEQ ID NO: 3608 - DNA, 3191 bp, Homo sapiens
ggggccttggagccagagagacgcagctaggcctccacggctgtggagagatcctgccacgggccttgttcaccatgtcggtgctggatgcgctttgggaggatcgggatgtccgtttcgacctgtccgcgcagcaaatgaaaacaagacctggagaagtccttattgattgtttagattccattgaagacaccaaaggaaataatggagatagaggtagactcttggtaacaaatttaagaattctctggcactctttggcattatcaagagtcaatgtttctgtcggttacaattgcatattgaatattacaacaaggactgctaactctaaattacgaggccaaactgaagctctctatatactaacaaaatgtaacagtactcgttttgaatttatatttacaaatttggttcctggaagccctagactttttacttctgtgatggcagtacacagagcttatgaaacttctaaaatgtatcgtgattttaaattaagaagtgcactaattcagaacaagcaactaagactgttgccacaagaacatgtatatgataaaataaatggagtttggaatttatccagtgatcagggcaatttaggaaccttttttattaccaatgtgagaattgtgtggcatgcaaatatgaatgatagttttaatgtcagtataccatatctgcaaattcgttcaataaagattagagattcaaaatttggtttagctcttgtcatagaaagctctcagcagagtggtggatatgttcttggctttaaaatagatcctgtggaaaaactacaagaatcagttaaggaaatcaattcacttcacaaagtctattctgccagtcccatatttggagttgattatgagatggaagaaaagccccagccgctcgaagctctgacagtcgaacaaattcaagatgatgtagaaatagactctgatggtcacacggatgcttttgtggcttattttgctgatggcaataagcaacaagatcgtgaacctgtattttcagaagaactggggcttgcaatagagaaattgaaggatggattcaccctacagggactttgggaagtaatgagttgattgaccttgagttgagatggatttctattaaagatatctctagtttaaagatactagtcacctgccataagtcatggaatagtttttatatttacagcttttatatttaaaacttgtaagagtttttttaatgattgaggaaaaagtcatttagaaaacttcagttttcggccagcgcgtcgagggaggggccagcgacacatggcctagtaaccgtccggccgcggcgctggcttaagccatggctgagggtagctggattcctcaggcccgggcgctcctacagcagtgcctgcacgcccggctgcaaattcgcccagccgatggggacgtcgcggcccagtgggtggaggtccaaagaggactggtgatctacgtgtgctttttcaagggagctgataaagaacttcttcccaaaatggccgaagctggactgtactgctgccatctctggctcactgcaacctccctgcctgattctcctgcctcagcctgccgagtgcctgcgattacaggcgcgcgccgccacacctgactggttttcgtatttttttggtggagacggggtttcgctgtgttggccgggctggtctccagctcctaaccgcgagtgatccgccagcctcggcctcccgaggtgccgggattgcagacggagtctggttcacttagtgctcaatggtgcccaggctggagtgcagtggcgtgatctccgctcgctacaacctccacctcccagctgcctgccttggcctcccgaagtgccaagagtgcagcctctgcccggccgccaccccgtctgggaagtgaggagcgtctctgcctggctgcccattgtctgggacgtgagcagcccctctgcctggctgcccagtctggaaagtgaggagcgtctctgcccggccgccatcccatctaggaagtgaggagcgcctcttcccacccgccatcccatctaggaagtgaggagcttctctgcccggccgcccatcgtctgagatgtggggagcacctctgcccggccgcgaccccatttgggaggtgaggagcaactctgcccagccgccccgtctgagaagtgaggagaccctccgcctggcaaccgccccgtctgataagtaaggagcccctctgcccagcagccgccccgtctgagaagtgaggagcccctctgcccagcagccaccctgtctgggaagtgaggagcgtctccgcccggcagccacccagtccgggagggaggtggggggggtcagtcccccgtccggccagccgccccgtccgggaggtgaggggcgcctctgcccagctgcccctactgggaagtgaggagcccctctgccccgccagccaccccgtccgggagggaggtgggggggtcagccccccgcccggccagccgccccgtccgggagggaggtggggggtcagccccccgcccggctagccgccccgtccgggaggcgaggggcgcctctgcccggctgcccctactgggaagtgaggagcccctctgcccggccagccgccccgtccaggagggaggtgggggggtcagccccccgcccggccagccgcccggtccgggagggaggtgggggggtcagccccccgcccggccagccgccccgtccgggaggttaggggcgcctctgcccggccgcccctactgggaagtgaggagcccctctgcccggccaccaccccgtctgggaggtgtacccaacagctcattgagagcgggcgatgatgacagtggcggctttgtggagtggaggtggggggaaggtggggaaaagattgagaaatcggatggttgccgtgtctgtgtagaaagaagtagacatgggagacttttcattttgttctgtactaagaaaaattcttaccctaaaacttaaagtataataaaaaaaaaaaacttcagttttctaaaaattatatttaaaattgtaatcaaaatgtacctagtttataaatgtttattttgtacttaatacctgtaaagtcttagttttcagacattaagtgactgtatcatgttcggtttaataaagaatttatgcagcaccaaaaaaaaaaaaaaaaaaa

SEQ ID NO: 3609 - DNA, 2468 bp, Homo sapiens; identical to SEQ ID NO: 578

SEQ ID NO: 3610 - DNA, 2089 bp, Homo sapiens; identical to SEQ ID NO: 1792

SEQ ID NO: 3611 - DNA, 3913 bp, Homo sapiens; identical to SEQ ID NO: 2282

SEQ ID NO: 3612 - DNA, 1509 bp, Homo sapiens; identical to SEQ ID NO: 782

SEQ ID NO: 3613 - DNA, 4978 bp, Homo sapiens; identical to SEQ ID NO: 1747

SEQ ID NO: 3614 - DNA, 4953 bp, Homo sapiens
ggtttccggagctgcggcggcgcagactgggagggggagccgggggttccgacgtcgcagccgagggaacaagccccaaccggatcctggacaggcaccccggcttggcgctgtctctccccctcggctcggagaggcccttcggcctgagggagcctcgccgcccgtccccggcacacgcgcagccccggcctctcggcctctgccggagaaacaggatggcccaatggaatcagctacagcagcttgacacacggtacctggagcagctccatcagctctacagtgacagcttcccaatggagctgcggcagtttctggccccttggattgagagtcaagattgggcatatgcggccagcaaagaatcacatgccactttggtgtttcataatctcctgggagagattgaccagcagtatagccgcttcctgcaagagtcgaatgttctctatcagcacaatctacgaagaatcaagcagtttcttcagagcaggtatcttgagaagccaatggagattgcccggattgtggcccggtgcctgtgggaagaatcacgccttctacagactgcagccactgcggcccagcaagggggccaggccaaccaccccacagcagccgtggtgacggagaagcagcagatgctggagcagcaccttcaggatgtccggaagagagtgcaggatctagaacagaaaatgaaagtggtagagaatctccaggatgactttgatttcaactataaaaccctcaagagtcaaggagacatgcaagatctgaatggaaacaaccagtcagtgaccaggcagaagatgcagcagctggaacagatgctcactgcgctggaccagatgcggagaagcatcgtgagtgagctggcggggcttttgtcagcgatggagtacgtgcagaaaactctcacggacgaggagctggctgactggaagaggcggcaacagattgcctgcattggaggcccgcccaacatctgcctagatcggctagaaaactggataacgtcattagcagaatctcaacttcagacccgtcaacaaattaagaaactggaggagttgcagcaaaaagtttcctacaaaggggaccccattgtacagcaccggccgatgctggaggagagaatcgtggagctgtttagaaacttaatgaaaagtgcctttgtggtggagcggcagccctgcatgcccatgcatcctgaccggcccctcgtcatcaagaccggcgtccagttcactactaaagtcaggttgctggtcaaattccctgagttgaattatcagcttaaaattaaagtgtgcattgacaaagactctggggacgttgcagctctcagaggatcccggaaatttaacattctgggcacaaacacaaaagtgatgaacatggaagaatccaacaacggcagcctctctgcagaattcaaacacttgaccctgagggagcagagatgtgggaatgggggccgagccaattgtgatgcttccctgattgtgactgaggagctgcacctgatcacctttgagaccgaggtgtatcaccaaggcctcaagattgacctagagacccactccttgccagttgtggtgatctccaacatctgtcagatgccaaatgcctgggcgtccatcctgtggtacaacatgctgaccaacaatcccaagaatgtaaacttttttaccaagcccccaattggaacctgggatcaagtggccgaggtcctgagctggcagttctcctccaccaccaagcgaggactgagcatcgagcagctgactacactggcagagaaactcttgggacctggtgtgaattattcagggtgtcagatcacatgggctaaattttgcaaagaaaacatggctggcaagggcttctccttctgggtctggctggacaatatcattgaccttgtgaaaaagtacatcctggccctttggaacgaagggtacatcatgggctttatcagtaaggagcgggagcgggccatcttgagcactaagcctccaggcaccttcctgctaagattcagtgaaagcagcaaagaaggaggcgtcactttcacttgggtggagaaggacatcagcggtaagacccagatccagtccgtggaaccatacacaaagcagcagctgaacaacatgtcatttgctgaaatcatcatgggctataagatcatggatgctaccaatatcctggtgtctccactggtctatctctatcctgacattcccaaggaggaggcattcggaaagtattgtcggccagagagccaggagcatcctgaagctgacccaggcgctgccccatacctgaagaccaagtttatctgtgtgacaccaacgacctgcagcaataccattgacctgccgatgtccccccgcactttagattcattgatgcagtttggaaataatggtgaaggtgctgaaccctcagcaggagggcagtttgagtccctcacctttgacatggagttgacctcggagtgcgctacctcccccatgtgaggagctgagaacggaagctgcagaaagatacgactgaggcgcctacctgcattctgccacccctcacacagccaaaccccagatcatctgaaactactaactttgtggttccagattttttttaatctcctacttctgctatctttgagcaatctgggcacttttaaaaatagagaaatgagtgaatgtgggtgatctgcttttatctaaatgcaaataaggatgtgttctctgagacccatgatcaggggatgtggcggggggtggctagagggagaaaaaggaaatgtcttgtgttgttttgttcccctgccctcctttctcagcagctttttgttattgttgttgttgttcttagacaagtgcctcctggtgcctgcggcatccttctgcctgtttctgtaagcaaatgccacaggccacctatagctacatactcctggcattgcactttttaaccttgctgacatccaaatagaagataggactatctaagccctaggtttctttttaaattaagaaataataacaattaaagggcaaaaaacactgtatcagcatagcctttctgtatttaagaaacttaagcagccgggcatggtggctcacgcctgtaatcccagcactttgggaggccgaggcggatcataaggtcaggagatcaagaccatcctggctaacacggtgaaaccccgtctctactaaaagtacaaaaaattagctgggtgtggtggtgggcgcctgtagtcccagctactcgggaggctgaggcaggagaatcgcttgaacctgagaggcggaggttgcagtgagccaaaattgcaccactgcacactgcactccatcctgggcgacagtctgagactctgtctcaaaaaaaaaaaaaaaaaaaagaaacttcagttaacagcctccttggtgctttaagcattcagcttccttcaggctggtaatttatataatccctgaaacgggcttcaggtcaaacccttaagacatctgaagctgcaacctggcctttggtgttgaaataggaaggtttaaggagaatctaagcattttagacttttttttataaatagacttattttcctttgtaatgtattggccttttagtgagtaaggctgggcagagggtgcttacaaccttgactccctttctccctggacttgatctgctgtttcagaggctaggttgtttctgtgggtgccttatcagggctgggatacttctgattctggcttccttcctgccccaccctcccgaccccagtccccctgatcctgctagaggcatgtctccttgcgtgtctaaaggtccctcatcctgtttgttttaggaatcctggtctcaggacctcatggaagaagagggggagagagttacaggttggacatgatgcacactatggggccccagcgacgtgtctggttgagctcagggaatatggttcttagccagtttcttggtgatatccagtggcacttgtaatggcgtcttcattcagttcatgcagggcaaaggcttactgataaacttgagtctgccctcgtatgagggtgtatacctggcctccctctgaggctggtgactcctccctgctggggccccacaggtgaggcagaacagctagagggcctccccgcctgcccgccttggctggctagctcgcctctcctgtgcgtatgggaacacctagcacgtgctggatgggctgcctctgactcagaggcatggccggatttggcaactcaaaaccaccttgcctcagctgatcagagtttctgtggaattctgtttgttaaatcaaattagctggtctctgaattaagggggagacgaccttctctaagatgaacagggttcgccccagtcctcctgcctggagacagttgatgtgtcatgcagagctcttacttctccagcaacactcttcagtacataataagcttaactgataaacagaatatttagaaaggtgagacttgggcttaccattgggtttaaatcatagggacctagggcgagggttcagggcttctctggagcagatattgtcaagttcatggccttaggtagcatgtatctggtcttaactctgattgtagcaaaagttctgagaggagctgagccctgttgtggcccattaaagaacagggtcctcaggccctgcccgcttcctgtccactgccccctccccatccccagcccagccgagggaatcccgtgggttgcttacctacctataaggtggtttataagctgctgtcctggccactgcattcaaattccaatgtgtacttcatagtgtaaaaatttatattattgtgaggttttttgtcttttttttttttttttttttttggtatattgctgtatctactttaacttccagaaataaacgttatataggaaccgtaaaaa

SEQ ID NO: 3615 - DNA, 1402 bp, Homo sapiens
tgatgcacagaagctcctagaaaaaatgggtggctcagcaccaccagatagcagctggagaggaagtctcaaagtgtcctacaatgttggacctggctttactggaaacttttctacacaaaaagtcaagatgcacatccactctaccaatgaagtgacgagaatttacaatgtgataggtactctcagaggagcagtggaaccagacagatatgtcattctgggaggtcaccgggactcatgggtgtttggtggtattgaccctcagagtggagcagctgttgttcatgaaactgtgaggagctttggaacactgaaaaaggaagggtggagacctagaagaacaattttgtttgcaagctgggatgcagaagaatttggtcttcttggttctactgagtgggcagaggataattcaagactccttcaagagcgtggcgtggcttatattaatgctgactcatctatagaaggaaactacactctgagagttgattgtacaccactgatgtacagcttggtatacaacctaacaaaagagctgaaaagccctgatgaaggctttgaaggcaaatctctttatgaaagttggactaaaaaaagtccttccccagagttcagtggcatgcccaggataagcaaattgggatctggaaatgattttgaggtgttcttccaacgacttggaattgcttcaggcagagcacggtatactaaaaattgggaaacaaacaaattcagcggctatccactgtatcacagtgtctatgaaacatatgagttggtggaaaagttttatgatccaatgtttaaatatcacctcactgtggcccaggttcgaggagggatggtgtttgagctagccaattccatagtgctcccttttgattgtcgagattatgctgtagttttaagaaagtatgctgacaaaatctacaatatttctatgaaacatccacaggaaatgaagacatacagtttatcatttgattcacttttttctgcagtaaaaaattttacagaaattgcttccaagttcagcgagagactccaggactttgacaaaagcaacccaatattgttaagaatgatgaatgatcaactcatgtttctggaaagagcatttattgatccattagggttaccagacagacctttttataggcatgtcatctatgctccaagcagccacaacaagtatgcaggggagtcattcccaggaatttatgatgctctgtttgatattgaaagcaaagtggacccttccaaggcctggggagatgtgaagagacagatttctgttgcagccttcacagtgcaggcagctgcagagactttgagtgaagtagcctaagaggattctttagagactctgtattgaatttgtgtggtatgtcactca

SEQ ID NO: 3616 - DNA, 523 bp, Homo sapiens
ggtgcaacacaccaaacaatcgagcctgcgtgctgccgaagcagggcgccgagtccatgcgaactgccatctgatccgctcttatcaatgaagcagccgatcatggcggatggcccccggtgcaagaggcgcaaacaagccaatcccaggaggaaaaacgcaaagacaaaccacctaaatagagagattaattccacatcagtgcaacattaaaagggagagaggatgccaagaatcccattaatttgggatataagtgtctgaaatttcctcaaaacatttacgccaaggaataccaacaagacaatatcaagcagctctccctaaggatagagaggcatgttaaaactgtataaccaacagaaccatttaaaaggaagaaaaacatcacccaagttccgtgtctgaatgaaggctgtcttctcaaatgctcctcattactccagagcagttatatttggattataattaaaacgaggcttcttttttttcataaaaaaaaaaaaaaaaaaaaaaaaaaaaa

SEQ ID NO: 3617 - DNA, 1139 bp, Homo sapiens
ggctcttccagaggcaagaccaaccaagatgagtgccctgggagctgtcattgccctcctgctctggggacagctttttgcagtggactcaggcaatgatgtcacggatatcgcagatgacggctgcccgaagccccccgagattgcacatggctatgtggagcactcggttcgctaccagtgtgagaactaatgcagtgcagcggatcctgggtggacacctggatgccaaaggcagctttccctggcaggctaagatggtttcccaccataatctcaccacaggtgccacgctgatcaatgagcaatggctgctgaccacggctaaaaatctcttcctgaaccattcagaaaatgcaacagcgaaagacattgcccctactttaacactctatgtggggaaaaagcagcttgtagagattgagaaggttgttctacaccctaactactcccaggtagatattgggctcatcaaactcaaacagaaggtgtctgttaatgagagagtgatgcccatctgcctaccttcaaaggattatgcagaagtagggcgtgtgggttatgtttctggctgggggcgaaatgccaattttaaatttactgaccatctgaagtatgtcatgctgcctgtggctgaccaagaccaatgcataaggcattatgaaggcagcacagtccccgaaaagaagacaccgaagagccctgtaggggtgcagcccatactgaatgaacacaccttctgtgctggcatgtctaagtaccaagaagacacctgctatggcgatgcgggcagtgcctttgccgttcacgacctggaggaggacacctggtatgcgactgggatcttaagctttgataagagctgtgctgtggctgagtatggtgtgtatgtgaaggtgacttccatccaggactgggttcagaagaccatagctgagaactaatgcaaggctggccggaagcccttgcctgaaagcaagatttcagcctggaagagggcaaagtggacgggagtggacaggagtggatgcgataagatgtggtttgaagctgatgggtgccagccctgcattgctgagtcaatcaataaagagctttcttttgactcaaaaaaaaaaaaaaaaaaaaaaaaaaaaaaa

SEQ ID NO: 3618 - DNA, 3649 bp, Homo sapiens
gcatgtacacgcgcacccgcacccgcgcgcctgtatcccgtgctgtttccctggcagacacacaggcgctcacgagtctctccttgccagcctgcagggcggcgacccccaaaacccagctccgggtcccaacctaggcaagaagctgcttctctgccaacagctcctcttcggcctccgtcacagccacctggaccctaccctttcgcgactgctgctgctgctgcccggacgtggaagcagcaagaggcgcttggtcaagacacactgacggtacctacagaatactggacatacggattcagaatccataaggctttatcaccttgaatcaaggatttatttgatatcatcctcggtctttacttcctatcaagtaacattgttttgaaaaatagagttaacacatttgccataagggagtttttttttttttttaaatacttcgcatactctccaatgcccaaaaatagcaaggtggtaaaaagagaattagatgatgatgttactgagtctgtcaaagaccttctttccaatgaagacgcagctgatgatgcttttaagacaagtgaactaattgttgatggccaggaagagaaagatacagatgttgaagaaggatctgaagtcgaagatgaaagaccagcttggaacagtaaactacaatacatcctggcccaagttggattttctgtaggtttaggaaatgtgtggcgatttccatacctatgtcagaagaatgggggcggtgcatatcttttaccatatttaatactacttatggtaataggtattcccctttttttcttggaactctctgtgggtcaaagaattcggcgaggcagcattggtgtatggaattacataagccctaaactgggcgggattggatttgcaagttgtgtagtgtgctattttgtagctctctactacaacgtcatcattggctggagtttgttttatttttctcagtcttttcagcaacccctgccttgggatcagtgtcctttggtgaaaaatgcttcacacacttttgtagaaccagaatgtgaacaaagttctgccaccacctattactggtacagggaagcactgaatatttcaagttccatttctgaaagtgggggcttaaactggaagatgaccatctgcttgttggctgcctgggtcatggtttgcttggctatgatcaaaggcattcagtcttctggaaaaatcatatattttagttctctgtttccatatgtggtacttatttgcttcctcatcagagcattccttttaaatggttcaattgatggcattcgccacatgtttacccctaagcttgaaataatgctggagcccaaggtctggagagaagctgctactcaagtgttctttgccttaggtctgggatttggtggtgtcattgccttttcaagctacaacaagagagacaacaactgccactttgatgctgtcctggtgtccttcatcaattttttcacttctgtcctggcaacattggtggtgtttgcagttctgggcttcaaagcaaatgtcataaatgagaaatgcattacacaaaattcagagacgatcatgaaatttttgaaaatggggaacattagtcaggatattattccccatcatatcaacctttcaactgttactgcagaagattatcatttagtttatgacatcattcaaaaagtgaaagaagaagagtttcctgctcttcatctcaattcctgtaaaattgaagaagagctaaataaagctgttcaggggaccggcttagcttttattgcctttacagaagcgatgacacattttcctgcatctcccttctggtcagtgatgtttttcctcatgctggtcaatctaggccttggcagtatgtttggaaccattgaagggattgtcacgcctattgtggacactttcaaagtgaggaaagaaattcttactgttatctgttgtcttctggcattttgtattggcctgatatttgtgcaacgctctggaaattactttgttacaatgtttgatgattattctgctacactgcctctgctaattgtagtcattttggagaatattgctgtatgctttgtttatggcatagataagtttatggaagacctaaaagatatgctgggctttgctcccagcagatattactactatatgtggaaatatatttctcctctaatgctattatcattgctaatagctagtgttgtgaatatgggattaagtcctcctggctataacgcatggattgaagataaggcatctgaagaatttctgagctatccaacatggggactggttgtttgtgtctctctggttgtctttgcaatactcccagtccctgtagttttcattgttcgtcgcttcaaccttatagatgatagttctggtaatttagcatctgtgacctataagagaggaagggtcctgaaagagcctgtgaacttagagggcgatgatacaagcctcattcacggaaaaataccgagcgagatgccatctccaaattttggtaaaaatatttatcgaaaacagagtggatccccaactctggatactgctcccaatggacggtatggaatagggtacttgatggcagatattatgccagatatgccagaatctgatttgtagctgggggaaaagtcagtgggttttatttggttcatttttaccaatgaacattggccctagtaggagaagcattaggcttcacttatcagagggcaatctcaggtgttccgtggctgtgatctttaatcctaacagtatatgtcagttcaacttgagcattcttttggattctttggtttacatttgtgcagaaaggattgcagacaaatcttaggagggctgaggtacatgtttgccaggatttttttttaagtacctttggtgtattttcaaatatttctatctcttaaaaaaatggtattacctcagtttctaataatttctgggtttagtagtgttgacaattaaaaatggtatacattaaaatttataagtttgccttcagggtaacttccagtgtcacaatgagcagttctgtaagtgggtgcctctcagcacatttctatgaatatattatgtagataggctgtattgattttggtagcattgacaccttcttaggcaattagttgaagaaaactgcaaaatattttcttatgtaatagctgtatagagcaatagcaatcaaagcatgagaaggcactaacgctgggatgaaagatgagattcagaggtgactgagaatcatgtgagtgatggctgtatattttgtgtaaaatatatgtgtgaaaatgaactaagagtgagttactcagcactctcaagaattatgcagattctgcatttttcttatgccgtgtgcctaaaaacctacttgatatttattgtggtttcaagattattcatagtatatttatacaatatacttgcaatgcatttaagtacttaaagtactaatttgaaaacttgaagcaagatggcattttaattaatatatttctgttttgcttctgttttatgcaaatataaatcatttttaagtgattgttaaaattgtaatgcattacattttaacctacaaataaacaaagtttaaaaatgaaaaaaaaaaaaaaaa

SEQ ID NO: 3619 - DNA, 2011 bp, Homo sapiens
ggggagcctgcaaaagttggagaaggtgtggcagtcctcatttctgtggaatctgaagaagcccacgcagattttaattcccactctagattctggcttcatcgttatgaagcatatgatgatcccgtggatagtatctagatcaccatggcgactggacagaagttgatgagagctgttagagtttttgaatttggtggaccagaagtcctgaaattgcgatcagatattgcagtaccgattccaaaagaccatcaggttctaatcaaggtccatgcatgtggtgtcaaccccgtggagacatacattcgctctggtacttatagtagaaaaccactcttatcctatactcctggctcagatgtggctggggtgatagaagctgttggagataatgcatctgctttcaagaaaggtgacagagttttcactagcagcacgatctctgggggttatgcagagtatgctcttgcagcagaccacactgtttacaaactacctgaaaaactggactttaaacaaggagctgccatcggcattccatattttactgcttatcgagctctgatccacagtgcctgtgtgaaagctggagagagtgttctggttcatggggcaagtggaggagttggattagcagcatgccaaattgctagagcttatggcttaaagattttgggcactgctggtactgaggaaggacaaaagattgttttgcaaaatggagcccatgaagtgttcaatcacagagaagtgaattacattgataaaattaagaagtatgttggtgagaaaggaattgatataattattgaaatgttagctaatgtaaatcttagtaaagacttgagtcttctgtcacatggaggacgagtgatagttgttggcagcagaggtactattgaaataaacccacgagacaccatggcaaaggagtcgagtataattggagttactctcttttcctcaaccaaggaggaatttcagcaatatgcagcagcccttcaagctggaatggaaattggctggttgaaacctgtgataggttctcaatatccattggagaaggtggccgaggctcatgaaaatatcattcatggtagtggggctactggtaaaatgattcttctcttatgatgattaattctttcatggatttcctatgtaattagaggtactgtctttcccccagttgtacttaccctatcttttctttaattaacattcgattccatgagcttcttatgtgaaaaaataagatttttctttagagagcagaagcagaagagtaaaatttattgtatagctagcaatatttttttatgccatctgtctcaaatcaaagagtcatcatagtaggaaatagcatgttagttgtcatttggcatgagtgtgcattccagtaattcttaattgatatttgattaattccatacctttgattaaaacatgctagttcaaaataagactgctcagtttccaagggttttcaagcctacttacctttataaaggttctctagtctctgattagccatgactgtattggactttgaacattttctgaactaaaaacctctattctaaactaatctcatttggatgtgtaagtcttttgtaaaggcaagaataaataatatccaggacaatttattagttttctcagtattttcccaaatattagaatatttacttcattattggttggctgccaatgaccccatatgttctgtgagaatagtagctttatctttgatataatacatagtctccaaataggtaatacttcgcaattgattagattttcagagtagatttagagttatctgtttttctggtgagggtcaaatatttttgttaattaagctcacaaatttgataaattaagaattatctgcatttgtcttgtaacataataatgtgtaataaagtctatagaaaattaaaaaaaaaaaaaaaaaaaaaaaaaaaaaaaaaaaaaaaaaaaaaaaaaaaaaaaaaaaaaaaaaaaa

SEQ ID NO: 3620 - DNA, 2402 bp, Homo sapiens; identical to SEQ ID NO: 651

SEQ ID NO: 3621 - DNA, 7912 bp, Homo sapiens
gcccgcgccggctgtgctgcacagggggaggagagggaaccccaggcgcgagcgggaagaggggacctgcagccacaacttctctggtcctctgcatcccttctgtccctccacccgtccccttccccaccctctggcccccaccttcttggaggcgacaacccccgggaggcattagaagggatttttcccgcaggttgcgaagggaagcaaacttggtggcaacttgcctcccggtgcgggcgtctctcccccaccgtctcaacatgcttaggggtccggggcccgggctgctgctgctggccgtccagtgcctggggacagcggtgccctccacgggagcctcgaagagcaagaggcaggctcagcaaatggttcagccccagtccccggtggctgtcagtcaaagcaagcccggttgttatgacaatggaaaacactatcagataaatcaacagtgggagcggacctacctaggcaatgcgttggtttgtacttgttatggaggaagccgaggttttaactgcgagagtaaacctgaagctgaagagacttgctttgacaagtacactgggaacacttaccgagtgggtgacacttatgagcgtcctaaagactccatgatctgggactgtacctgcatcggggctgggcgagggagaataagctgtaccatcgcaaaccgctgccatgaagggggtcagtcctacaagattggtgacacctggaggagaccacatgagactggtggttacatgttagagtgtgtgtgtcttggtaatggaaaaggagaatggacctgcaagcccatagctgagaagtgttttgatcatgctgctgggacttcctatgtggtcggagaaacgtgggagaagccctaccaaggctggatgatggtagattgtacttgcctgggagaaggcagcggacgcatcacttgcacttctagaaatagatgcaacgatcaggacacaaggacatcctatagaattggagacacctggagcaagaaggataatcgaggaaacctgctccagtgcatctgcacaggcaacggccgaggagagtggaagtgtgagaggcacacctctgtgcagaccacatcgagcggatctggccccttcaccgatgttcgtgcagctgtttaccaaccgcagcctcacccccagcctcctccctatggccactgtgtcacagacagtggtgtggtctactctgtggggatgcagtggctgaagacacaaggaaataagcaaatgctttgcacgtgcctgggcaacggagtcagctgccaagagacagctgtaacccagacttacggtggcaactcaaatggagagccatgtgtcttaccattcacctacaatggcaggacgttctactcctgcaccacagaagggcgacaggacggacatctttggtgcagcacaacttcgaattatgagcaggaccagaaatactctttctgcacagaccacactgttttggttcagactcgaggaggaaattccaatggtgccttgtgccacttccccttcctatacaacaaccacaattacactgattgcacttctgagggcagaagagacaacatgaagtggtgtgggaccacacagaactatgatgccgaccagaagtttgggttctgccccatggctgcccacgaggaaatctgcacaaccaatgaaggggtcatgtaccgcattggagatcagtgggataagcagcatgacatgggtcacatgatgaggtgcacgtgtgttgggaatggtcgtggggaatggacatgcattgcctactcgcagcttcgagatcagtgcattgttgatgacatcacttacaatgtgaacgacacattccacaagcgtcatgaagaggggcacatgctgaactgtacatgcttcggtcagggtcggggcaggtggaagtgtgatcccgtcgaccaatgccaggattcagagactgggacgttttatcaaattggagattcatgggagaagtatgtgcatggtgtcagataccagtgctactgctatggccgtggcattggggagtggcattgccaacctttacagacctatccaagctcaagtggtcctgtcgaagtatttatcactgagactccgagtcagcccaactcccaccccatccagtggaatgcaccacagccatctcacatttccaagtacattctcaggtggagacctaaaaattctgtaggccgttggaaggaagctaccataccaggccacttaaactcctacaccatcaaaggcctgaagcctggtgtggtatacgagggccagctcatcagcatccagcagtacggccaccaagaagtgactcgctttgacttcaccaccaccagcaccagcacacctgtgaccagcaacaccgtgacaggagagacgactcccttttctcctcttgtggccacttctgaatctgtgaccgaaatcacagccagtagctttgtggtctcctgggtctcagcttccgacaccgtgtcgggattccgggtggaatatgagctgagtgaggagggagatgagccacagtacctggatcttccaagcacagccacttctgtgaacatccctgacctgcttcctggccgaaaatacattgtaaatgtctatcagatatctgaggatggggagcagagtttgatcctgtctacttcacaaacaacagcgcctgatgcccctcctgacccgactgtggaccaagttgatgacacctcaattgttgttcgctggagcagaccccaggctcccatcacagggtacagaatagtctattcgccatcagtagaaggtagcagcacagaactcaaccttcctgaaactgcaaactccgtcaccctcagtgacttgcaacctggtgttcagtataacatcactatctatgctgtggaagaaaatcaagaaagtacacctgttgtcattcaacaagaaaccactggcaccccacgctcagatacagtgccctctcccagggacctgcagtttgtggaagtgacagacgtgaaggtcaccatcatgtggacaccgcctgagagtgcagtgaccggctaccgtgtggatgtgatccccgtcaacctgcctggcgagcacgggcagaggctgcccatcagcaggaacacctttgcagaagtcaccgggctgtcccctggggtcacctattacttcaaagtctttgcagtgagccatgggagggagagcaagcctctgactgctcaacagacaaccaaactggatgctcccactaacctccagtttgtcaatgaaactgattctactgtcctggtgagatggactccacctcgggcccagataacaggataccgactgaccgtgggccttacccgaagaggacagcccaggcagtacaatgtgggtccctctgtctccaagtacccactgaggaatctgcagcctgcatctgagtacaccgtatccctcgtggccataaagggcaaccaagagagccccaaagccactggagtctttaccacactgcagcctgggagctctattccaccttacaacaccgaggtgactgagaccaccattgtgatcacatggacgcctgctccaagaattggttttaagctgggtgtacgaccaagccagggaggagaggcaccacgagaagtgacttcagactcaggaagcatcgttgtgtccggcttgactccaggagtagaatacgtctacaccatccaagtcctgagagatggacaggaaagagatgcgccaattgtaaacaaagtggtgacaccattgtctccaccaacaaacttgcatctggaggcaaaccctgacactggagtgctcacagtctcctgggagaggagcaccaccccagacattactggttatagaattaccacaacccctacaaacggccagcagggaaattctttggaagaagtggtccatgctgatcagagctcctgcacttttgataacctgagtcccggcctggagtacaatgtcagtgtttacactgtcaaggatgacaaggaaagtgtccctatctctgataccatcatcccagctgttcctcctcccactgacctgcgattcaccaacattggtccagacaccatgcgtgtcacctgggctccacccccatccattgatttaaccaacttcctggtgcgttactcacctgtgaaaaatgaggaagatgttgcagagttgtcaatttctccttcagacaatgcagtggtcttaacaaatctcctgcctggtacagaatatgtagtgagtgtctccagtgtctacgaacaacatgagagcacacctcttagaggaagacagaaaacaggtcttgattccccaactggcattgacttttctgatattactgccaactcttttactgtgcactggattgctcctcgagccaccatcactggctacaggatccgccatcatcccgagcacttcagtgggagacctcgagaagatcgggtgccccactctcggaattccatcaccctcaccaacctcactccaggcacagagtatgtggtcagcatcgttgctcttaatggcagagaggaaagtcccttattgattggccaacaatcaacagtttctgatgttccgagggacctggaagttgttgctgcgacccccaccagcctactgatcagctgggatgctcctgctgtcacagtgagatattacaggatcacttacggagagacaggaggaaatagccctgtccaggagttcactgtgcctgggagcaagtctacagctaccatcagcggccttaaacctggagttgattataccatcactgtgtatgctgtcactggccgtggagacagccccgcaagcagcaagccaatttccattaattaccgaacagaaattgacaaaccatcccagatgcaagtgaccgatgttcaggacaacagcattagtgtcaagtggctgccttcaagttcccctgttactggttacagagtaaccaccactcccaaaaatggaccaggaccaacaaaaactaaaactgcaggtccagatcaaacagaaatgactattgaaggcttgcagcccacagtggagtatgtggttagtgtctatgctcagaatccaagcggagagagtcagcctctggttcagactgcagtaaccactattcctgcaccaactgacctgaagttcactcaggtcacacccacaagcctgagcgcccagtggacaccacccaatgttcagctcactggatatcgagtgcgggtgacccccaaggagaagaccggaccaatgaaagaaatcaaccttgctcctgacagctcatccgtggttgtatcaggacttatggtggccaccaaatatgaagtgagtgtctatgctcttaaggacactttgacaagcagaccagctcagggagttgtcaccactctggagaatgtcagcccaccaagaagggctcgtgtgacagatgctactgagaccaccatcaccattagctggagaaccaagactgagacgatcactggcttccaagttgatgccgttccagccaatggccagactccaatccagagaaccatcaagccagatgtcagaagctacaccatcacaggtttacaaccaggcactgactacaagatctacctgtacaccttgaatgacaatgctcggagctcccctgtggtcatcgacgcctccactgccattgatgcaccatccaacctgcgtttcctggccaccacacccaattccttgctggtatcatggcagccgccacgtgccaggattaccggctacatcatcaagtatgagaagcctgggtctcctcccagagaagtggtccctcggccccgccctggtgtcacagaggctactattactggcctggaaccgggaaccgaatatacaatttatgtcattgccctgaagaataatcagaagagcgagcccctgattggaaggaaaaagacaggacaagaagctctctctcagacaaccatctcatgggccccattccaggacacttctgagtacatcatttcatgtcatcctgttggcactgatgaagaacccttacagttcagggttcctggaacttctaccagtgccactctgacaggcctcaccagaggtgccacctacaacatcatagtggaggcactgaaagaccagcagaggcataaggttcgggaagaggttgttaccgtgggcaactctgtcaacgaaggcttgaaccaacctacggatgactcgtgctttgacccctacacagtttcccattatgccgttggagatgagtgggaacgaatgtctgaatcaggctttaaactgttgtgccagtgcttaggctttggaagtggtcatttcagatgtgattcatctagatggtgccatgacaatggtgtgaactacaagattggagagaagtgggaccgtcagggagaaaatggccagatgatgagctgcacatgtcttgggaacggaaaaggagaattcaagtgtgaccctcatgaggcaacgtgttatgatgatgggaagacataccacgtaggagaacagtggcagaaggaatatctcggtgccatttgctcctgcacatgctttggaggccagcggggctggcgctgtgacaactgccgcagacctgggggtgaacccagtcccgaaggcactactggccagtcctacaaccagtattctcagagataccatcagagaacaaacactaatgttaattgcccaattgagtgcttcatgcctttagatgtacaggctgacagagaagattcccgagagtaaatcatctttccaatccagaggaacaagcatgtctctctgccaagatccatctaaactggagtgatgttagcagacccagcttagagttcttctttctttcttaagccctttgctctggaggaagttctccagcttcagctcaactcacagcttctccaagcatcaccctgggagtttcctgagggttttctcataaatgagggctgcacattgcctgttctgcttcgaagtattcaataccgctcagtattttaaatgaagtgattctaagatttggtttgggatcaataggaaagcatatgcagccaaccaagatgcaaatgttttgaaatgatatgaccaaaattttaagtaggaaagtcacccaaacacttctgctttcacttaagtgtctggcccgcaatactgtaggaacaagcatgatcttgttactgtgatattttaaatatccacagtactcactttttccaaatgatcctagtaattgcctagaaatatctttctcttacctgttatttatcaatttttcccagtatttttatacggaaaaaattgtattgaaaacacttagtatgcagttgataagaggaatttggtataattatggtgggtgattattttttatactgtatgtgccaaagctttactactgtggaaagacaactgttttaataaaagatttacattccacaacttgaagttcatctatttgatataagacaccttcgggggaaataattcctgtgaatattctttttcaattcagcaaacatttgaaaatctatgatgtgcaagtctaattgttgatttcagtacaagattttctaaatcagttgctacaaaaactgattggtttttgtcacttcatctcttcactaatggagatagctttacactttctgctttaatagatttaagtggaccccaatatttattaaaattgctagtttaccgttcagaagtataatagaaataatctttagttgctcttttctaaccattgtaattcttcccttcttccctccacctttccttcattgaataaacctctgttcaaagagattgcctgcaagggaaataaaaatgactaagatattaaaaaaaaaaaaaaaaaa

SEQ ID NO: 3622 - DNA, 8272 bp, Homo sapiens
gcccgcgccggctgtgctgcacagggggaggagagggaaccccaggcgcgagcgggaagaggggacctgcagccacaacttctctggtcctctgcatcccttctgtccctccacccgtccccttccccaccctctggcccccaccttcttggaggcgacaacccccgggaggcattagaagggatttttcccgcaggttgcgaagggaagcaaacttggtggcaacttgcctcccggtgcgggcgtctctcccccaccgtctcaacatgcttaggggtccggggcccgggctgctgctgctggccgtccagtgcctggggacagcggtgccctccacgggagcctcgaagagcaagaggcaggctcagcaaatggttcagccccagtccccggtggctgtcagtcaaagcaagcccggttgttatgacaatggaaaacactatcagataaatcaacagtgggagcggacctacctaggcaatgcgttggtttgtacttgttatggaggaagccgaggttttaactgcgagagtaaacctgaagctgaagagacttgctttgacaagtacactgggaacacttaccgagtgggtgacacttatgagcgtcctaaagactccatgatctgggactgtacctgcatcggggctgggcgagggagaataagctgtaccatcgcaaaccgctgccatgaagggggtcagtcctacaagattggtgacacctggaggagaccacatgagactggtggttacatgttagagtgtgtgtgtcttggtaatggaaaaggagaatggacctgcaagcccatagctgagaagtgttttgatcatgctgctgggacttcctatgtggtcggagaaacgtgggagaagccctaccaaggctggatgatggtagattgtacttgcctgggagaaggcagcggacgcatcacttgcacttctagaaatagatgcaacgatcaggacacaaggacatcctatagaattggagacacctggagcaagaaggataatcgaggaaacctgctccagtgcatctgcacaggcaacggccgaggagagtggaagtgtgagaggcacacctctgtgcagaccacatcgagcggatctggccccttcaccgatgttcgtgcagctgtttaccaaccgcagcctcacccccagcctcctccctatggccactgtgtcacagacagtggtgtggtctactctgtggggatgcagtggctgaagacacaaggaaataagcaaatgctttgcacgtgcctgggcaacggagtcagctgccaagagacagctgtaacccagacttacggtggcaactcaaatggagagccatgtgtcttaccattcacctacaatggcaggacgttctactcctgcaccacagaagggcgacaggacggacatctttggtgcagcacaacttcgaattatgagcaggaccagaaatactctttctgcacagaccacactgttttggttcagactcgaggaggaaattccaatggtgccttgtgccacttccccttcctatacaacaaccacaattacactgattgcacttctgagggcagaagagacaacatgaagtggtgtgggaccacacagaactatgatgccgaccagaagtttgggttctgccccatggctgcccacgaggaaatctgcacaaccaatgaaggggtcatgtaccgcattggagatcagtgggataagcagcatgacatgggtcacatgatgaggtgcacgtgtgttgggaatggtcgtggggaatggacatgcattgcctactcgcagcttcgagatcagtgcattgttgatgacatcacttacaatgtgaacgacacattccacaagcgtcatgaagaggggcacatgctgaactgtacatgcttcggtcagggtcggggcaggtggaagtgtgatcccgtcgaccaatgccaggattcagagactgggacgttttatcaaattggagattcatgggagaagtatgtgcatggtgtcagataccagtgctactgctatggccgtggcattggggagtggcattgccaacctttacagacctatccaagctcaagtggtcctgtcgaagtatttatcactgagactccgagtcagcccaactcccaccccatccagtggaatgcaccacagccatctcacatttccaagtacattctcaggtggagacctaaaaattctgtaggccgttggaaggaagctaccataccaggccacttaaactcctacaccatcaaaggcctgaagcctggtgtggtatacgagggccagctcatcagcatccagcagtacggccaccaagaagtgactcgctttgacttcaccaccaccagcaccagcacacctgtgaccagcaacaccgtgacaggagagacgactcccttttctcctcttgtggccacttctgaatctgtgaccgaaatcacagccagtagctttgtggtctcctgggtctcagcttccgacaccgtgtcgggattccgggtggaatatgagctgagtgaggagggagatgagccacagtacctggatcttccaagcacagccacttctgtgaacatccctgacctgcttcctggccgaaaatacattgtaaatgtctatcagatatctgaggatggggagcagagtttgatcctgtctacttcacaaacaacagcgcctgatgcccctcctgacccgactgtggaccaagttgatgacacctcaattgttgttcgctggagcagaccccaggctcccatcacagggtacagaatagtctattcgccatcagtagaaggtagcagcacagaactcaaccttcctgaaactgcaaactccgtcaccctcagtgacttgcaacctggtgttcagtataacatcactatctatgctgtggaagaaaatcaagaaagtacacctgttgtcattcaacaagaaaccactggcaccccacgctcagatacagtgccctctcccagggacctgcagtttgtggaagtgacagacgtgaaggtcaccatcatgtggacaccgcctgagagtgcagtgaccggctaccgtgtggatgtgatccccgtcaacctgcctggcgagcacgggcagaggctgcccatcagcaggaacacctttgcagaagtcaccgggctgtcccctggggtcacctattacttcaaagtctttgcagtgagccatgggagggagagcaagcctctgactgctcaacagacaaccaaactggatgctcccactaacctccagtttgtcaatgaaactgattctactgtcctggtgagatggactccacctcgggcccagataacaggataccgactgaccgtgggccttacccgaagaggacagcccaggcagtacaatgtgggtccctctgtctccaagtacccactgaggaatctgcagcctgcatctgagtacaccgtatccctcgtggccataaagggcaaccaagagagccccaaagccactggagtctttaccacactgcagcctgggagctctattccaccttacaacaccgaggtgactgagaccaccattgtgatcacatggacgcctgctccaagaattggttttaagctgggtgtacgaccaagccagggaggagaggcaccacgagaagtgacttcagactcaggaagcatcgttgtgtccggcttgactccaggagtagaatacgtctacaccatccaagtcctgagagatggacaggaaagagatgcgccaattgtaaacaaagtggtgacaccattgtctccaccaacaaacttgcatctggaggcaaaccctgacactggagtgctcacagtctcctgggagaggagcaccaccccagacattactggttatagaattaccacaacccctacaaacggccagcagggaaattctttggaagaagtggtccatgctgatcagagctcctgcacttttgataacctgagtcccggcctggagtacaatgtcagtgtttacactgtcaaggatgacaaggaaagtgtccctatctctgataccatcatcccagctgttcctcctcccactgacctgcgattcaccaacattggtccagacaccatgcgtgtcacctgggctccacccccatccattgatttaaccaacttcctggtgcgttactcacctgtgaaaaatgaggaagatgttgcagagttgtcaatttctccttcagacaatgcagtggtcttaacaaatctcctgcctggtacagaatatgtagtgagtgtctccagtgtctacgaacaacatgagagcacacctcttagaggaagacagaaaacaggtcttgattccccaactggcattgacttttctgatattactgccaactcttttactgtgcactggattgctcctcgagccaccatcactggctacaggatccgccatcatcccgagcacttcagtgggagacctcgagaagatcgggtgccccactctcggaattccatcaccctcaccaacctcactccaggcacagagtatgtggtcagcatcgttgctcttaatggcagagaggaaagtcccttattgattggccaacaatcaacagtttctgatgttccgagggacctggaagttgttgctgcgacccccaccagcctactgatcagctgggatgctcctgctgtcacagtgagatattacaggatcacttacggagagacaggaggaaatagccctgtccaggagttcactgtgcctgggagcaagtctacagctaccatcagcggccttaaacctggagttgattataccatcactgtgtatgctgtcactggccgtggagacagccccgcaagcagcaagccaatttccattaattaccgaacagaaattgacaaaccatcccagatgcaagtgaccgatgttcaggacaacagcattagtgtcaagtggctgccttcaagttcccctgttactggttacagagtaaccaccactcccaaaaatggaccaggaccaacaaaaactaaaactgcaggtccagatcaaacagaaatgactattgaaggcttgcagcccacagtggagtatgtggttagtgtctatgctcagaatccaagcggagagagtcagcctctggttcagactgcagtaaccactattcctgcaccaactgacctgaagttcactcaggtcacacccacaagcctgagcgcccagtggacaccacccaatgttcagctcactggatatcgagtgcgggtgacccccaaggagaagaccggaccaatgaaagaaatcaaccttgctcctgacagctcatccgtggttgtatcaggacttatggtggccaccaaatatgaagtgagtgtctatgctcttaaggacactttgacaagcagaccagctcagggagttgtcaccactctggagaatgtcagcccaccaagaagggctcgtgtgacagatgctactgagaccaccatcaccattagctggagaaccaagactgagacgatcactggcttccaagttgatgccgttccagccaatggccagactccaatccagagaaccatcaagccagatgtcagaagctacaccatcacaggtttacaaccaggcactgactacaagatctacctgtacaccttgaatgacaatgctcggagctcccctgtggtcatcgacgcctccactgccattgatgcaccatccaacctgcgtttcctggccaccacacccaattccttgctggtatcatggcagccgccacgtgccaggattaccggctacatcatcaagtatgagaagcctgggtctcctcccagagaagtggtccctcggccccgccctggtgtcacagaggctactattactggcctggaaccgggaaccgaatatacaatttatgtcattgccctgaagaataatcagaagagcgagcccctgattggaaggaaaaagacagacgagcttccccaactggtaacccttccacaccccaatcttcatggaccagagatcttggatgttccttccacagttcaaaagacccctttcgtcacccaccctgggtatgacactggaaatggtattcagcttcctggcacttctggtcagcaacccagtgttgggcaacaaatgatctttgaggaacatggttttaggcggaccacaccgcccacaacggccacccccataaggcataggccaagaccatacccgccgaatgtaggtgaggaaatccaaattggtcacatccccagggaagatgtagactatcacctgtacccacacggtccgggactcaatccaaatgcctctacaggacaagaagctctctctcagacaaccatctcatgggccccattccaggacacttctgagtacatcatttcatgtcatcctgttggcactgatgaagaacccttacagttcagggttcctggaacttctaccagtgccactctgacaggcctcaccagaggtgccacctacaacatcatagtggaggcactgaaagaccagcagaggcataaggttcgggaagaggttgttaccgtgggcaactctgtcaacgaaggcttgaaccaacctacggatgactcgtgctttgacccctacacagtttcccattatgccgttggagatgagtgggaacgaatgtctgaatcaggctttaaactgttgtgccagtgcttaggctttggaagtggtcatttcagatgtgattcatctagatggtgccatgacaatggtgtgaactacaagattggagagaagtgggaccgtcagggagaaaatggccagatgatgagctgcacatgtcttgggaacggaaaaggagaattcaagtgtgaccctcatgaggcaacgtgttatgatgatgggaagacataccacgtaggagaacagtggcagaaggaatatctcggtgccatttgctcctgcacatgctttggaggccagcggggctggcgctgtgacaactgccgcagacctgggggtgaacccagtcccgaaggcactactggccagtcctacaaccagtattctcagagataccatcagagaacaaacactaatgttaattgcccaattgagtgcttcatgcctttagatgtacaggctgacagagaagattcccgagagtaaatcatctttccaatccagaggaacaagcatgtctctctgccaagatccatctaaactggagtgatgttagcagacccagcttagagttcttctttctttcttaagccctttgctctggaggaagttctccagcttcagctcaactcacagcttctccaagcatcaccctgggagtttcctgagggttttctcataaatgagggctgcacattgcctgttctgcttcgaagtattcaataccgctcagtattttaaatgaagtgattctaagatttggtttgggatcaataggaaagcatatgcagccaaccaagatgcaaatgttttgaaatgatatgaccaaaattttaagtaggaaagtcacccaaacacttctgctttcacttaagtgtctggcccgcaatactgtaggaacaagcatgatcttgttactgtgatattttaaatatccacagtactcactttttccaaatgatcctagtaattgcctagaaatatctttctcttacctgttatttatcaatttttcccagtatttttatacggaaaaaattgtattgaaaacacttagtatgcagttgataagaggaatttggtataattatggtgggtgattattttttatactgtatgtgccaaagctttactactgtggaaagacaactgttttaataaaagatttacattccacaacttgaagttcatctatttgatataagacaccttcgggggaaataattcctgtgaatattctttttcaattcagcaaacatttgaaaatctatgatgtgcaagtctaattgttgatttcagtacaagattttctaaatcagttgctacaaaaactgattggtttttgtcacttcatctcttcactaatggagatagctttacactttctgctttaatagatttaagtggaccccaatatttattaaaattgctagtttaccgttcagaagtataatagaaataatctttagttgctcttttctaaccattgtaattcttcccttcttccctccacctttccttcattgaataaacctctgttcaaagagattgcctgcaagggaaataaaaatgactaagatattaaaaaaaaaaaaaaaaaa

SEQ ID NO: 3623 - DNA, 8374 bp, Homo sapiens
gcccgcgccggctgtgctgcacagggggaggagagggaaccccaggcgcgagcgggaagaggggacctgcagccacaacttctctggtcctctgcatcccttctgtccctccacccgtccccttccccaccctctggcccccaccttcttggaggcgacaacccccgggaggcattagaagggatttttcccgcaggttgcgaagggaagcaaacttggtggcaacttgcctcccggtgcgggcgtctctcccccaccgtctcaacatgcttaggggtccggggcccgggctgctgctgctggccgtccagtgcctggggacagcggtgccctccacgggagcctcgaagagcaagaggcaggctcagcaaatggttcagccccagtccccggtggctgtcagtcaaagcaagcccggttgttatgacaatggaaaacactatcagataaatcaacagtgggagcggacctacctaggcaatgcgttggtttgtacttgttatggaggaagccgaggttttaactgcgagagtaaacctgaagctgaagagacttgctttgacaagtacactgggaacacttaccgagtgggtgacacttatgagcgtcctaaagactccatgatctgggactgtacctgcatcggggctgggcgagggagaataagctgtaccatcgcaaaccgctgccatgaagggggtcagtcctacaagattggtgacacctggaggagaccacatgagactggtggttacatgttagagtgtgtgtgtcttggtaatggaaaaggagaatggacctgcaagcccatagctgagaagtgttttgatcatgctgctgggacttcctatgtggtcggagaaacgtgggagaagccctaccaaggctggatgatggtagattgtacttgcctgggagaaggcagcggacgcatcacttgcacttctagaaatagatgcaacgatcaggacacaaggacatcctatagaattggagacacctggagcaagaaggataatcgaggaaacctgctccagtgcatctgcacaggcaacggccgaggagagtggaagtgtgagaggcacacctctgtgcagaccacatcgagcggatctggccccttcaccgatgttcgtgcagctgtttaccaaccgcagcctcacccccagcctcctccctatggccactgtgtcacagacagtggtgtggtctactctgtggggatgcagtggctgaagacacaaggaaataagcaaatgctttgcacgtgcctgggcaacggagtcagctgccaagagacagctgtaacccagacttacggtggcaactcaaatggagagccatgtgtcttaccattcacctacaatggcaggacgttctactcctgcaccacagaagggcgacaggacggacatctttggtgcagcacaacttcgaattatgagcaggaccagaaatactctttctgcacagaccacactgttttggttcagactcgaggaggaaattccaatggtgccttgtgccacttccccttcctatacaacaaccacaattacactgattgcacttctgagggcagaagagacaacatgaagtggtgtgggaccacacagaactatgatgccgaccagaagtttgggttctgccccatggctgcccacgaggaaatctgcacaaccaatgaaggggtcatgtaccgcattggagatcagtgggataagcagcatgacatgggtcacatgatgaggtgcacgtgtgttgggaatggtcgtggggaatggacatgcattgcctactcgcagcttcgagatcagtgcattgttgatgacatcacttacaatgtgaacgacacattccacaagcgtcatgaagaggggcacatgctgaactgtacatgcttcggtcagggtcggggcaggtggaagtgtgatcccgtcgaccaatgccaggattcagagactgggacgttttatcaaattggagattcatgggagaagtatgtgcatggtgtcagataccagtgctactgctatggccgtggcattggggagtggcattgccaacctttacagacctatccaagctcaagtggtcctgtcgaagtatttatcactgagactccgagtcagcccaactcccaccccatccagtggaatgcaccacagccatctcacatttccaagtacattctcaggtggagacctaaaaattctgtaggccgttggaaggaagctaccataccaggccacttaaactcctacaccatcaaaggcctgaagcctggtgtggtatacgagggccagctcatcagcatccagcagtacggccaccaagaagtgactcgctttgacttcaccaccaccagcaccagcacacctgtgaccagcaacaccgtgacaggagagacgactcccttttctcctcttgtggccacttctgaatctgtgaccgaaatcacagccagtagctttgtggtctcctgggtctcagcttccgacaccgtgtcgggattccgggtggaatatgagctgagtgaggagggagatgagccacagtacctggatcttccaagcacagccacttctgtgaacatccctgacctgcttcctggccgaaaatacattgtaaatgtctatcagatatctgaggatggggagcagagtttgatcctgtctacttcacaaacaacagcgcctgatgcccctcctgacccgactgtggaccaagttgatgacacctcaattgttgttcgctggagcagaccccaggctcccatcacagggtacagaatagtctattcgccatcagtagaaggtagcagcacagaactcaaccttcctgaaactgcaaactccgtcaccctcagtgacttgcaacctggtgttcagtataacatcactatctatgctgtggaagaaaatcaagaaagtacacctgttgtcattcaacaagaaaccactggcaccccacgctcagatacagtgccctctcccagggacctgcagtttgtggaagtgacagacgtgaaggtcaccatcatgtggacaccgcctgagagtgcagtgaccggctaccgtgtggatgtgatccccgtcaacctgcctggcgagcacgggcagaggctgcccatcagcaggaacacctttgcagaagtcaccgggctgtcccctggggtcacctattacttcaaagtctttgcagtgagccatgggagggagagcaagcctctgactgctcaacagacaaccaaactggatgctcccactaacctccagtttgtcaatgaaactgattctactgtcctggtgagatggactccacctcgggcccagataacaggataccgactgaccgtgggccttacccgaagaggacagcccaggcagtacaatgtgggtccctctgtctccaagtacccactgaggaatctgcagcctgcatctgagtacaccgtatccctcgtggccataaagggcaaccaagagagccccaaagccactggagtctttaccacactgcagcctgggagctctattccaccttacaacaccgaggtgactgagaccaccattgtgatcacatggacgcctgctccaagaattggttttaagctgggtgtacgaccaagccagggaggagaggcaccacgagaagtgacttcagactcaggaagcatcgttgtgtccggcttgactccaggagtagaatacgtctacaccatccaagtcctgagagatggacaggaaagagatgcgccaattgtaaacaaagtggtgacaccattgtctccaccaacaaacttgcatctggaggcaaaccctgacactggagtgctcacagtctcctgggagaggagcaccaccccagacattactggttatagaattaccacaacccctacaaacggccagcagggaaattctttggaagaagtggtccatgctgatcagagctcctgcacttttgataacctgagtcccggcctggagtacaatgtcagtgtttacactgtcaaggatgacaaggaaagtgtccctatctctgataccatcatcccagctgttcctcctcccactgacctgcgattcaccaacattggtccagacaccatgcgtgtcacctgggctccacccccatccattgatttaaccaacttcctggtgcgttactcacctgtgaaaaatgaggaagatgttgcagagttgtcaatttctccttcagacaatgcagtggtcttaacaaatctcctgcctggtacagaatatgtagtgagtgtctccagtgtctacgaacaacatgagagcacacctcttagaggaagacagaaaacaggtcttgattccccaactggcattgacttttctgatattactgccaactcttttactgtgcactggattgctcctcgagccaccatcactggctacaggatccgccatcatcccgagcacttcagtgggagacctcgagaagatcgggtgccccactctcggaattccatcaccctcaccaacctcactccaggcacagagtatgtggtcagcatcgttgctcttaatggcagagaggaaagtcccttattgattggccaacaatcaacagtttctgatgttccgagggacctggaagttgttgctgcgacccccaccagcctactgatcagctgggatgctcctgctgtcacagtgagatattacaggatcacttacggagagacaggaggaaatagccctgtccaggagttcactgtgcctgggagcaagtctacagctaccatcagcggccttaaacctggagttgattataccatcactgtgtatgctgtcactggccgtggagacagccccgcaagcagcaagccaatttccattaattaccgaacagaaattgacaaaccatcccagatgcaagtgaccgatgttcaggacaacagcattagtgtcaagtggctgccttcaagttcccctgttactggttacagagtaaccaccactcccaaaaatggaccaggaccaacaaaaactaaaactgcaggtccagatcaaacagaaatgactattgaaggcttgcagcccacagtggagtatgtggttagtgtctatgctcagaatccaagcggagagagtcagcctctggttcagactgcagtaaccaacattgatcgccctaaaggactggcattcactgatgtggatgtcgattccatcaaaattgcttgggaaagcccacaggggcaagtttccaggtacagggtgacctactcgagccctgaggatggaatccatgagctattccctgcacctgatggtgaagaagacactgcagagctgcaaggcctcagaccgggttctgagtacacagtcagtgtggttgccttgcacgatgatatggagagccagcccctgattggaacccagtccacagctattcctgcaccaactgacctgaagttcactcaggtcacacccacaagcctgagcgcccagtggacaccacccaatgttcagctcactggatatcgagtgcgggtgacccccaaggagaagaccggaccaatgaaagaaatcaaccttgctcctgacagctcatccgtggttgtatcaggacttatggtggccaccaaatatgaagtgagtgtctatgctcttaaggacactttgacaagcagaccagctcagggagttgtcaccactctggagaatgtcagcccaccaagaagggctcgtgtgacagatgctactgagaccaccatcaccattagctggagaaccaagactgagacgatcactggcttccaagttgatgccgttccagccaatggccagactccaatccagagaaccatcaagccagatgtcagaagctacaccatcacaggtttacaaccaggcactgactacaagatctacctgtacaccttgaatgacaatgctcggagctcccctgtggtcatcgacgcctccactgccattgatgcaccatccaacctgcgtttcctggccaccacacccaattccttgctggtatcatggcagccgccacgtgccaggattaccggctacatcatcaagtatgagaagcctgggtctcctcccagagaagtggtccctcggccccgccctggtgtcacagaggctactattactggcctggaaccgggaaccgaatatacaatttatgtcattgccctgaagaataatcagaagagcgagcccctgattggaaggaaaaagacagttcaaaagacccctttcgtcacccaccctgggtatgacactggaaatggtattcagcttcctggcacttctggtcagcaacccagtgttgggcaacaaatgatctttgaggaacatggttttaggcggaccacaccgcccacaacggccacccccataaggcataggccaagaccatacccgccgaatgtaggacaagaagctctctctcagacaaccatctcatgggccccattccaggacacttctgagtacatcatttcatgtcatcctgttggcactgatgaagaacccttacagttcagggttcctggaacttctaccagtgccactctgacaggcctcaccagaggtgccacctacaacatcatagtggaggcactgaaagaccagcagaggcataaggttcgggaagaggttgttaccgtgggcaactctgtcaacgaaggcttgaaccaacctacggatgactcgtgctttgacccctacacagtttcccattatgccgttggagatgagtgggaacgaatgtctgaatcaggctttaaactgttgtgccagtgcttaggctttggaagtggtcatttcagatgtgattcatctagatggtgccatgacaatggtgtgaactacaagattggagagaagtgggaccgtcagggagaaaatggccagatgatgagctgcacatgtcttgggaacggaaaaggagaattcaagtgtgaccctcatgaggcaacgtgttatgatgatgggaagacataccacgtaggagaacagtggcagaaggaatatctcggtgccatttgctcctgcacatgctttggaggccagcggggctggcgctgtgacaactgccgcagacctgggggtgaacccagtcccgaaggcactactggccagtcctacaaccagtattctcagagataccatcagagaacaaacactaatgttaattgcccaattgagtgcttcatgcctttagatgtacaggctgacagagaagattcccgagagtaaatcatctttccaatccagaggaacaagcatgtctctctgccaagatccatctaaactggagtgatgttagcagacccagcttagagttcttctttctttcttaagccctttgctctggaggaagttctccagcttcagctcaactcacagcttctccaagcatcaccctgggagtttcctgagggttttctcataaatgagggctgcacattgcctgttctgcttcgaagtattcaataccgctcagtattttaaatgaagtgattctaagatttggtttgggatcaataggaaagcatatgcagccaaccaagatgcaaatgttttgaaatgatatgaccaaaattttaagtaggaaagtcacccaaacacttctgctttcacttaagtgtctggcccgcaatactgtaggaacaagcatgatcttgttactgtgatattttaaatatccacagtactcactttttccaaatgatcctagtaattgcctagaaatatctttctcttacctgttatttatcaatttttcccagtatttttatacggaaaaaattgtattgaaaacacttagtatgcagttgataagaggaatttggtataattatggtgggtgattattttttatactgtatgtgccaaagctttactactgtggaaagacaactgttttaataaaagatttacattccacaacttgaagttcatctatttgatataagacaccttcgggggaaataattcctgtgaatattctttttcaattcagcaaacatttgaaaatctatgatgtgcaagtctaattgttgatttcagtacaagattttctaaatcagttgctacaaaaactgattggtttttgtcacttcatctcttcactaatggagatagctttacactttctgctttaatagatttaagtggaccccaatatttattaaaattgctagtttaccgttcagaagtataatagaaataatctttagttgctcttttctaaccattgtaattcttcccttcttccctccacctttccttcattgaataaacctctgttcaaagagattgcctgcaagggaaataaaaatgactaagatattaaaaaaaaaaaaaaaaaa

SEQ ID NO: 3624 - DNA, 8815 bp, Homo sapiens; identical to SEQ ID NO: 2279

SEQ ID NO: 3625 - DNA, 8449 bp, Homo sapiens
gcccgcgccggctgtgctgcacagggggaggagagggaaccccaggcgcgagcgggaagaggggacctgcagccacaacttctctggtcctctgcatcccttctgtccctccacccgtccccttccccaccctctggcccccaccttcttggaggcgacaacccccgggaggcattagaagggatttttcccgcaggttgcgaagggaagcaaacttggtggcaacttgcctcccggtgcgggcgtctctcccccaccgtctcaacatgcttaggggtccggggcccgggctgctgctgctggccgtccagtgcctggggacagcggtgccctccacgggagcctcgaagagcaagaggcaggctcagcaaatggttcagccccagtccccggtggctgtcagtcaaagcaagcccggttgttatgacaatggaaaacactatcagataaatcaacagtgggagcggacctacctaggcaatgcgttggtttgtacttgttatggaggaagccgaggttttaactgcgagagtaaacctgaagctgaagagacttgctttgacaagtacactgggaacacttaccgagtgggtgacacttatgagcgtcctaaagactccatgatctgggactgtacctgcatcggggctgggcgagggagaataagctgtaccatcgcaaaccgctgccatgaagggggtcagtcctacaagattggtgacacctggaggagaccacatgagactggtggttacatgttagagtgtgtgtgtcttggtaatggaaaaggagaatggacctgcaagcccatagctgagaagtgttttgatcatgctgctgggacttcctatgtggtcggagaaacgtgggagaagccctaccaaggctggatgatggtagattgtacttgcctgggagaaggcagcggacgcatcacttgcacttctagaaatagatgcaacgatcaggacacaaggacatcctatagaattggagacacctggagcaagaaggataatcgaggaaacctgctccagtgcatctgcacaggcaacggccgaggagagtggaagtgtgagaggcacacctctgtgcagaccacatcgagcggatctggccccttcaccgatgttcgtgcagctgtttaccaaccgcagcctcacccccagcctcctccctatggccactgtgtcacagacagtggtgtggtctactctgtggggatgcagtggctgaagacacaaggaaataagcaaatgctttgcacgtgcctgggcaacggagtcagctgccaagagacagctgtaacccagacttacggtggcaactcaaatggagagccatgtgtcttaccattcacctacaatggcaggacgttctactcctgcaccacagaagggcgacaggacggacatctttggtgcagcacaacttcgaattatgagcaggaccagaaatactctttctgcacagaccacactgttttggttcagactcgaggaggaaattccaatggtgccttgtgccacttccccttcctatacaacaaccacaattacactgattgcacttctgagggcagaagagacaacatgaagtggtgtgggaccacacagaactatgatgccgaccagaagtttgggttctgccccatggctgcccacgaggaaatctgcacaaccaatgaaggggtcatgtaccgcattggagatcagtgggataagcagcatgacatgggtcacatgatgaggtgcacgtgtgttgggaatggtcgtggggaatggacatgcattgcctactcgcagcttcgagatcagtgcattgttgatgacatcacttacaatgtgaacgacacattccacaagcgtcatgaagaggggcacatgctgaactgtacatgcttcggtcagggtcggggcaggtggaagtgtgatcccgtcgaccaatgccaggattcagagactgggacgttttatcaaattggagattcatgggagaagtatgtgcatggtgtcagataccagtgctactgctatggccgtggcattggggagtggcattgccaacctttacagacctatccaagctcaagtggtcctgtcgaagtatttatcactgagactccgagtcagcccaactcccaccccatccagtggaatgcaccacagccatctcacatttccaagtacattctcaggtggagacctaaaaattctgtaggccgttggaaggaagctaccataccaggccacttaaactcctacaccatcaaaggcctgaagcctggtgtggtatacgagggccagctcatcagcatccagcagtacggccaccaagaagtgactcgctttgacttcaccaccaccagcaccagcacacctgtgaccagcaacaccgtgacaggagagacgactcccttttctcctcttgtggccacttctgaatctgtgaccgaaatcacagccagtagctttgtggtctcctgggtctcagcttccgacaccgtgtcgggattccgggtggaatatgagctgagtgaggagggagatgagccacagtacctggatcttccaagcacagccacttctgtgaacatccctgacctgcttcctggccgaaaatacattgtaaatgtctatcagatatctgaggatggggagcagagtttgatcctgtctacttcacaaacaacagcgcctgatgcccctcctgacccgactgtggaccaagttgatgacacctcaattgttgttcgctggagcagaccccaggctcccatcacagggtacagaatagtctattcgccatcagtagaaggtagcagcacagaactcaaccttcctgaaactgcaaactccgtcaccctcagtgacttgcaacctggtgttcagtataacatcactatctatgctgtggaagaaaatcaagaaagtacacctgttgtcattcaacaagaaaccactggcaccccacgctcagatacagtgccctctcccagggacctgcagtttgtggaagtgacagacgtgaaggtcaccatcatgtggacaccgcctgagagtgcagtgaccggctaccgtgtggatgtgatccccgtcaacctgcctggcgagcacgggcagaggctgcccatcagcaggaacacctttgcagaagtcaccgggctgtcccctggggtcacctattacttcaaagtctttgcagtgagccatgggagggagagcaagcctctgactgctcaacagacaaccaaactggatgctcccactaacctccagtttgtcaatgaaactgattctactgtcctggtgagatggactccacctcgggcccagataacaggataccgactgaccgtgggccttacccgaagaggacagcccaggcagtacaatgtgggtccctctgtctccaagtacccactgaggaatctgcagcctgcatctgagtacaccgtatccctcgtggccataaagggcaaccaagagagccccaaagccactggagtctttaccacactgcagcctgggagctctattccaccttacaacaccgaggtgactgagaccaccattgtgatcacatggacgcctgctccaagaattggttttaagctgggtgtacgaccaagccagggaggagaggcaccacgagaagtgacttcagactcaggaagcatcgttgtgtccggcttgactccaggagtagaatacgtctacaccatccaagtcctgagagatggacaggaaagagatgcgccaattgtaaacaaagtggtgacaccattgtctccaccaacaaacttgcatctggaggcaaaccctgacactggagtgctcacagtctcctgggagaggagcaccaccccagacattactggttatagaattaccacaacccctacaaacggccagcagggaaattctttggaagaagtggtccatgctgatcagagctcctgcacttttgataacctgagtcccggcctggagtacaatgtcagtgtttacactgtcaaggatgacaaggaaagtgtccctatctctgataccatcatcccagctgttcctcctcccactgacctgcgattcaccaacattggtccagacaccatgcgtgtcacctgggctccacccccatccattgatttaaccaacttcctggtgcgttactcacctgtgaaaaatgaggaagatgttgcagagttgtcaatttctccttcagacaatgcagtggtcttaacaaatctcctgcctggtacagaatatgtagtgagtgtctccagtgtctacgaacaacatgagagcacacctcttagaggaagacagaaaacaggtcttgattccccaactggcattgacttttctgatattactgccaactcttttactgtgcactggattgctcctcgagccaccatcactggctacaggatccgccatcatcccgagcacttcagtgggagacctcgagaagatcgggtgccccactctcggaattccatcaccctcaccaacctcactccaggcacagagtatgtggtcagcatcgttgctcttaatggcagagaggaaagtcccttattgattggccaacaatcaacagtttctgatgttccgagggacctggaagttgttgctgcgacccccaccagcctactgatcagctgggatgctcctgctgtcacagtgagatattacaggatcacttacggagagacaggaggaaatagccctgtccaggagttcactgtgcctgggagcaagtctacagctaccatcagcggccttaaacctggagttgattataccatcactgtgtatgctgtcactggccgtggagacagccccgcaagcagcaagccaatttccattaattaccgaacagaaattgacaaaccatcccagatgcaagtgaccgatgttcaggacaacagcattagtgtcaagtggctgccttcaagttcccctgttactggttacagagtaaccaccactcccaaaaatggaccaggaccaacaaaaactaaaactgcaggtccagatcaaacagaaatgactattgaaggcttgcagcccacagtggagtatgtggttagtgtctatgctcagaatccaagcggagagagtcagcctctggttcagactgcagtaaccaacattgatcgccctaaaggactggcattcactgatgtggatgtcgattccatcaaaattgcttgggaaagcccacaggggcaagtttccaggtacagggtgacctactcgagccctgaggatggaatccatgagctattccctgcacctgatggtgaagaagacactgcagagctgcaaggcctcagaccgggttctgagtacacagtcagtgtggttgccttgcacgatgatatggagagccagcccctgattggaacccagtccacagctattcctgcaccaactgacctgaagttcactcaggtcacacccacaagcctgagcgcccagtggacaccacccaatgttcagctcactggatatcgagtgcgggtgacccccaaggagaagaccggaccaatgaaagaaatcaaccttgctcctgacagctcatccgtggttgtatcaggacttatggtggccaccaaatatgaagtgagtgtctatgctcttaaggacactttgacaagcagaccagctcagggagttgtcaccactctggagaatgtcagcccaccaagaagggctcgtgtgacagatgctactgagaccaccatcaccattagctggagaaccaagactgagacgatcactggcttccaagttgatgccgttccagccaatggccagactccaatccagagaaccatcaagccagatgtcagaagctacaccatcacaggtttacaaccaggcactgactacaagatctacctgtacaccttgaatgacaatgctcggagctcccctgtggtcatcgacgcctccactgccattgatgcaccatccaacctgcgtttcctggccaccacacccaattccttgctggtatcatggcagccgccacgtgccaggattaccggctacatcatcaagtatgagaagcctgggtctcctcccagagaagtggtccctcggccccgccctggtgtcacagaggctactattactggcctggaaccgggaaccgaatatacaatttatgtcattgccctgaagaataatcagaagagcgagcccctgattggaaggaaaaagacagacgagcttccccaactggtaacccttccacaccccaatcttcatggaccagagatcttggatgttccttccacagttcaaaagacccctttcgtcacccaccctgggtatgacactggaaatggtattcagcttcctggcacttctggtcagcaacccagtgttgggcaacaaatgatctttgaggaacatggttttaggcggaccacaccgcccacaacggccacccccataaggcataggccaagaccatacccgccgaatgtaggacaagaagctctctctcagacaaccatctcatgggccccattccaggacacttctgagtacatcatttcatgtcatcctgttggcactgatgaagaacccttacagttcagggttcctggaacttctaccagtgccactctgacaggcctcaccagaggtgccacctacaacatcatagtggaggcactgaaagaccagcagaggcataaggttcgggaagaggttgttaccgtgggcaactctgtcaacgaaggcttgaaccaacctacggatgactcgtgctttgacccctacacagtttcccattatgccgttggagatgagtgggaacgaatgtctgaatcaggctttaaactgttgtgccagtgcttaggctttggaagtggtcatttcagatgtgattcatctagatggtgccatgacaatggtgtgaactacaagattggagagaagtgggaccgtcagggagaaaatggccagatgatgagctgcacatgtcttgggaacggaaaaggagaattcaagtgtgaccctcatgaggcaacgtgttatgatgatgggaagacataccacgtaggagaacagtggcagaaggaatatctcggtgccatttgctcctgcacatgctttggaggccagcggggctggcgctgtgacaactgccgcagacctgggggtgaacccagtcccgaaggcactactggccagtcctacaaccagtattctcagagataccatcagagaacaaacactaatgttaattgcccaattgagtgcttcatgcctttagatgtacaggctgacagagaagattcccgagagtaaatcatctttccaatccagaggaacaagcatgtctctctgccaagatccatctaaactggagtgatgttagcagacccagcttagagttcttctttctttcttaagccctttgctctggaggaagttctccagcttcagctcaactcacagcttctccaagcatcaccctgggagtttcctgagggttttctcataaatgagggctgcacattgcctgttctgcttcgaagtattcaataccgctcagtattttaaatgaagtgattctaagatttggtttgggatcaataggaaagcatatgcagccaaccaagatgcaaatgttttgaaatgatatgaccaaaattttaagtaggaaagtcacccaaacacttctgctttcacttaagtgtctggcccgcaatactgtaggaacaagcatgatcttgttactgtgatattttaaatatccacagtactcactttttccaaatgatcctagtaattgcctagaaatatctttctcttacctgttatttatcaatttttcccagtatttttatacggaaaaaattgtattgaaaacacttagtatgcagttgataagaggaatttggtataattatggtgggtgattattttttatactgtatgtgccaaagctttactactgtggaaagacaactgttttaataaaagatttacattccacaacttgaagttcatctatttgatataagacaccttcgggggaaataattcctgtgaatattctttttcaattcagcaaacatttgaaaatctatgatgtgcaagtctaattgttgatttcagtacaagattttctaaatcagttgctacaaaaactgattggtttttgtcacttcatctcttcactaatggagatagctttacactttctgctttaatagatttaagtggaccccaatatttattaaaattgctagtttaccgttcagaagtataatagaaataatctttagttgctcttttctaaccattgtaattcttcccttcttccctccacctttccttcattgaataaacctctgttcaaagagattgcctgcaagggaaataaaaatgactaagatattaaaaaaaaaaaaaaaaaa

SEQ ID NO: 3626 - DNA, 4754 bp, Homo sapiens
gaattctagaggcggcggagggtggcgaggagctctcgctttctctcgctccctccctctccgactccgtctctctctctctctctctctctcccctccctctctttccctctgttccattttttccccctctaaatcctccctgccctgcgcgcctggacacagatttaggaagcgaattcgctcacgttttaggacaaggaagagagagaggcacgggagaagagcccagcaagatttggattgaaaccgagacaccctccggaggctcggagcagaggaaggaggaggagggcggcgaacggaagccagtttgcaattcaagttttgatagcgctggtagaagggggtttaaatcagatttttttttttttaaaggagagagactttttccgctctctcgctccctgttaaagccgggtctagcacagctgcagacgccaccagcgagaaagagggagaggaagacagatagggggcgggggaagaagaaaaagaaaggtaaaaagtcttctaggagaacctttcacatttgcaacaaaagacctaggggctggagagagattcctgggacgcagggctggagtgtctatttcgagctcagcggcagggctcgggcgcgagtcgagaccctgctcgctcctctcgcttctgaaaccgacgttcaggagcggctttttaaaaacgcaaggcacaaggacggtcacccgcgcgactatgtttgctgatttttcgccttgccctctttaaaagcggcctcccattctccaaaagacacttcccctcctccctttgaagtgcattagttgtgatttctgcctccttttcttttttctttcttttttgttttgctttttccccccttttgaattatgtgctgctgttaaacaacaacaaaaaaacaacaaaacacagcagctgcggacttgtccccggctggagcccagcgccccgcctggagtggatgagcctctccatgagagatccggtcattcctgggacaagcatggcctaccatccgttcctacctcaccgggcgccggacttcgccatgagcgcggtgctgggtcaccagccgccgttcttccccgcgctgacgctgcctcccaacggcgcggcggcgctctcgctgccgggcgccctggccaagccgatcatggatcaattggtgggggcggccgagaccggcatcccgttctcctccctggggccccaggcgcatctgaggcctttgaagaccatggagcccgaagaagaggtggaggacgaccccaaggtgcacctggaggctaaagaactttgggatcagtttcacaagcggggcaccgagatggtcattaccaagtcgggaaggcgaatgtttcctccatttaaagtgagatgttctgggctggataaaaaagccaaatacattttattgatggacattatagctgctgatgactgtcgttataaatttcacaattctcggtggatggtggctggtaaggccgaccccgaaatgccaaagaggatgtacattcacccggacagccccgctactggggaacagtggatgtccaaagtcgtcactttccacaaactgaaactcaccaacaacatttcagacaaacatggatttactatattgaactccatgcacaaataccagccccggttccacattgtaagagccaatgacatcttgaaactcccttatagtacatttcggacatacttgttccccgaaactgaattcatcgctgtgactgcataccagaatgataagataacccagttaaaaatagacaacaacccttttgcaaaaggtttccgggacactggaaatggccgaagagaaaaaagaaaacagctcaccctgcagtccatgagggtgtttgatgaaagacacaaaaaggagaatgggacctctgatgagtcctccagtgaacaagcagctttcaactgcttcgcccaggcttcttctccagccgcctccactgtagggacatcgaacctcaaagatttatgtcccagcgagggtgagagcgacgccgaggccgagagcaaagaggagcatggccccgaggcctgcgacgcggccaagatctccaccaccacgtcggaggagccctgccgtgacaagggcagccccgcggtcaaggctcaccttttcgctgctgagcggccccgggacagcgggcggctggacaaagcgtcgcccgactcacgccatagccccgccaccatctcgtccagcactcgcggcctgggcgcggaggagcgcaggagcccggttcgcgagggcacagcgccggccaaggtggaagaggcgcgcgcgctcccgggcaaggaggccttcgcgccgctcacggtgcagacggacgcggccgccgcgcacctggcccagggccccctgcctggcctcggcttcgccccgggcctggcgggccaacagttcttcaacgggcacccgctcttcctgcaccccagccagtttgccatggggggcgccttctccagcatggcggccgctggcatgggtcccctcctggccacggtttctggggcctccaccggtgtctcgggcctggattccacggccatggcctctgccgctgcggcgcagggactgtccggggcgtccgcggccaccctgcccttccacctccagcagcacgtcctggcctctcagggcctggccatgtcccctttcggaagcctgttcccttacccctacacgtacatggccgcagcggcggccgcctcctctgcggcagcctccagctcggtgcaccgccaccccttcctcaatctgaacaccatgcgcccgcggctgcgctacagcccctactccatcccggtgccggtcccggacggcagcagtctgctcaccaccgccctgccctccatggcggcggccgcggggcccctggacggcaaagtcgccgccctggccgccagcccggcctcggtggcagtggactcgggctctgaactcaacagccgctcctccacgctctcctccagctccatgtccttgtcgcccaaactctgcgcggagaaagaggcggccaccagcgaactgcagagcatccagcggttggttagcggcttggaagccaagccggacaggtcccgcagcgcgtccccgtagacccgtcccagacacgtcttttcattccagtccagttcaggctgccgtgcactttgtcggatataaaataaaccacgggcccgccatggcgttagcccttccttttgcagttgcgtctgggaaggggccccggactccctcgagagaatgtgctagagacagcccctgtcttcttggcgtggtttatatgtccgggatctggatcagattctgggggctcagaaacgtcggttgcattgagctactgggggtaggagttccaacatttatgtccagagcaacttccagcaaggctggtctgggtctctgcccaccaggcggggaggtgttcaaagacatctccctcagtgcggatttatatatatatttttccttcactgtgtcaagtggaaacaaaaacaaaatctttcaaaaaaaaaatcgggacaagtgaacacattaacatgattctgtttgtgcagattaaaaactttatagggacttgcattatcggttctcaataaattactgagcagctttgtttggggagggaagtccctaccatccttgtttagtctatattaagaaaatctgtgtctttttaatattcttgtgatgttttcagagccgctgtaggtctcttcttgcatgtccacagtaatgtatttgtggtttttattttgaacgcttgcttttagagagaaaacaatatagccccctacccttttcccaatcctttgccctcaaatcagtgacccaagggagggggggatttaaagggaaggagtgggcaaaacacataaaatgaatttattatatctaagctctgtagcaggattcatgtcgttctttgacagttctttctctttcctgtatatgcaataacaaggttttaaaaaaataataaagaagtgagactattagacaaagtatttatgtaattatttgataactcttgtaaataggtggaatatgaatgcttggaaaattaaactttaatttattgacattgtacatagctctgtgtaaatagaattgcaactgtcaggttttgtgttcttgttttcctttagttgggtttatttccaggtcacagaattgctgttaacactagaaaacacacttcctgcaccaacaccaataccctttcaaaagagttgtctgcaacatttttgttttcttttttaatgtccaaaagtgggggaaagtgctatttcctattttcaccaaaattggggaaggagtgccactttccagctccacttcaaattccttaaaatataactgagattgctgtggggagggaggagggcagaggctgcggtttgactttttaatttttcttttgttatttgtatttgctagtctctgatttcctcaaaacgaagtggaatttactactgttgtcagtatcggtgttttgaattggtgcctgcctatagagatatattcacagttcaaaagtcaggtgctgagagatggtttaaagacaaattcatgaaggtatattttgtgttatagttgttgatgagttctttggttttctgtatttttccccctctctttaaaacatcactgaaatttcaataaatttttattgaaatgtctaaaaaaaaaaaaaaaaaaaaaaaaaaaaaaa

SEQ ID NO: 3627 - DNA, 4814 bp, Homo sapiens; identical to SEQ ID NO: 652

SEQ ID NO: 3628 - DNA, 1223 bp, Homo sapiens
atgaaggccactatcatcctccttctgcttgcacaagtttcctgggctggaccgtttcaacagagaggcttatttgactttatgctagaagatgaggcttctgggataggcccagaagttcctgatgaccgcgacttcgagccctccctaggcccagtgtgccccttccgctgtcaatgccatcttcgagtggtccagtgttctgatttgggttgtctaccttcataacaacaatatctctgtagttggatcaagtgacttctgcccacctggacacaacaccaaaaaggcttcttattcgggtgtgagtcttttcagcaacccggtccagtactgggagatacagccatccaccttcagatgtgtctacgtgcgctctgccattcaactcggaaactataagtaattctcaagaaagccctcatttttataacctggcaaaatcttgttaatgtcattgctaaaaaataaataaaagctagatactggaaacctaactgcaatgtggatgttttacccacatgacttattatgcataaagccaaatttccagtttaagtaattgcctacaataaaaagaaattttgcctgccattttcagaatcatcttttgaagctttctgttgatgttaactgagctactagagatattcttatttcactaaatgtaaaatttggagtaaatatatatgtcaatatttagtaaagcttttcttttttaatttccaggaaaaaataaaaagagtatgagtcttctgtaattcattgagcagttagctcatttgagataaagtcaaatgccaaacactagctctgtattaatccccatcattactggtaaagcctcatttgaatgtgtgaattcaatacaggctatgtaaaatttttactaatgtcattattttgaaaaaataaatttaaaaatacattcaaaattactattgtatacaagcttaattgttaatattccctaaacacaattttatgaagggagaagacattggtttgttgacaataacagtacatcttttcaagttctcagctatttcttctacctctccctatcttacatttgagtatggtaacttatgtcatctatgttgaatgtaagcttataaagcacaaagcatacatttcctgactggtctagagaactgatgtttcaatttacccctctgctaaataaatattaaaactatcatgtgaaaaaaaaaaaaaaaaaa

SEQ ID NO: 3629 - DNA, 1336 bp, Homo sapiens
atgaaggccactatcatcctccttctgcttgcacaagtttcctgggctggaccgtttcaacagagaggcttatttgactttatgctagaagatgaggcttctgggataggcccagaagttcctgatgaccgcgacttcgagccctccctaggcccagtgtgccccttccgctgtcaatgccatcttcgagtggtccagtgttctgatttgggtctggacaaagtgccaaaggatcttccccctgacacaactctgctagacctgcaaaacaacaaaataaccgaaatcaaagatggagactttaagaacctgaagaaccttcacgttgtctaccttcataacaacaatatctctgtagttggatcaagtgacttctgcccacctggacacaacaccaaaaaggcttcttattcgggtgtgagtcttttcagcaacccggtccagtactgggagatacagccatccaccttcagatgtgtctacgtgcgctctgccattcaactcggaaactataagtaattctcaagaaagccctcatttttataacctggcaaaatcttgttaatgtcattgctaaaaaataaataaaagctagatactggaaacctaactgcaatgtggatgttttacccacatgacttattatgcataaagccaaatttccagtttaagtaattgcctacaataaaaagaaattttgcctgccattttcagaatcatcttttgaagctttctgttgatgttaactgagctactagagatattcttatttcactaaatgtaaaatttggagtaaatatatatgtcaatatttagtaaagcttttcttttttaatttccaggaaaaaataaaaagagtatgagtcttctgtaattcattgagcagttagctcatttgagataaagtcaaatgccaaacactagctctgtattaatccccatcattactggtaaagcctcatttgaatgtgtgaattcaatacaggctatgtaaaatttttactaatgtcattattttgaaaaaataaatttaaaaatacattcaaaattactattgtatacaagcttaattgttaatattccctaaacacaattttatgaagggagaagacattggtttgttgacaataacagtacatcttttcaagttctcagctatttcttctacctctccctatcttacatttgagtatggtaacttatgtcatctatgttgaatgtaagcttataaagcacaaagcatacatttcctgactggtctagagaactgatgtttcaatttacccctctgctaaataaatattaaaactatcatgtgaaaaaaaaaaaaaaaaaa

SEQ ID NO: 3630 - DNA, 1456 bp, Homo sapiens
atgaaggccactatcatcctccttctgcttgcacaagtttcctgggctggaccgtttcaacagagaggcttatttgactttatgctagaagatgaggcttctgggataggcccagaagttcctgatgaccgcgacttcgagccctccctaggcccagtgtgccccttccgctgtcaatgccatcttcgagtggtccagtgttctgatttgggtcttcctccttcccttacggaattacatcttgatggcaacaaaatcagcagagttgatgcagctagcctgaaaggactgaataatttggctaagttgggattgagtttcaacagcatctctgctgttgacaatggctctctggccaacacgcctcatctgagggagcttcacttggacaacaacaagcttaccagagtacctggtgggctggcagagcataagtacatccaggttgtctaccttcataacaacaatatctctgtagttggatcaagtgacttctgcccacctggacacaacaccaaaaaggcttcttattcgggtgtgagtcttttcagcaacccggtccagtactgggagatacagccatccaccttcagatgtgtctacgtgcgctctgccattcaactcggaaactataagtaattctcaagaaagccctcatttttataacctggcaaaatcttgttaatgtcattgctaaaaaataaataaaagctagatactggaaacctaactgcaatgtggatgttttacccacatgacttattatgcataaagccaaatttccagtttaagtaattgcctacaataaaaagaaattttgcctgccattttcagaatcatcttttgaagctttctgttgatgttaactgagctactagagatattcttatttcactaaatgtaaaatttggagtaaatatatatgtcaatatttagtaaagcttttcttttttaatttccaggaaaaaataaaaagagtatgagtcttctgtaattcattgagcagttagctcatttgagataaagtcaaatgccaaacactagctctgtattaatccccatcattactggtaaagcctcatttgaatgtgtgaattcaatacaggctatgtaaaatttttactaatgtcattattttgaaaaaataaatttaaaaatacattcaaaattactattgtatacaagcttaattgttaatattccctaaacacaattttatgaagggagaagacattggtttgttgacaataacagtacatcttttcaagttctcagctatttcttctacctctccctatcttacatttgagtatggtaacttatgtcatctatgttgaatgtaagcttataaagcacaaagcatacatttcctgactggtctagagaactgatgtttcaatttacccctctgctaaataaatattaaaactatcatgtgaaaaaaaaaaaaaaaaaa

SEQ ID NO: 3631 - DNA, 1570 bp, Homo sapiens
atgaaggccactatcatcctccttctgcttgcacaagtttcctgggctggaccgtttcaacagagaggcttatttgactttatgctagaagatgaggcttctgggataggcccagaagttcctgatgaccgcgacttcgagccctccctaggcccagtgtgccccttccgctgtcaatgccatcttcgagtggtccagtgttctgatttggaactgggcaccaatccgctgaagagctcaggaattgaaaatggggctttccagggaatgaagaagctctcctacatccgcattgctgataccaatatcaccagcattcctcaaggtcttcctccttcccttacggaattacatcttgatggcaacaaaatcagcagagttgatgcagctagcctgaaaggactgaataatttggctaagttgggattgagtttcaacagcatctctgctgttgacaatggctctctggccaacacgcctcatctgagggagcttcacttggacaacaacaagcttaccagagtacctggtgggctggcagagcataagtacatccaggttgtctaccttcataacaacaatatctctgtagttggatcaagtgacttctgcccacctggacacaacaccaaaaaggcttcttattcgggtgtgagtcttttcagcaacccggtccagtactgggagatacagccatccaccttcagatgtgtctacgtgcgctctgccattcaactcggaaactataagtaattctcaagaaagccctcatttttataacctggcaaaatcttgttaatgtcattgctaaaaaataaataaaagctagatactggaaacctaactgcaatgtggatgttttacccacatgacttattatgcataaagccaaatttccagtttaagtaattgcctacaataaaaagaaattttgcctgccattttcagaatcatcttttgaagctttctgttgatgttaactgagctactagagatattcttatttcactaaatgtaaaatttggagtaaatatatatgtcaatatttagtaaagcttttcttttttaatttccaggaaaaaataaaaagagtatgagtcttctgtaattcattgagcagttagctcatttgagataaagtcaaatgccaaacactagctctgtattaatccccatcattactggtaaagcctcatttgaatgtgtgaattcaatacaggctatgtaaaatttttactaatgtcattattttgaaaaaataaatttaaaaatacattcaaaattactattgtatacaagcttaattgttaatattccctaaacacaattttatgaagggagaagacattggtttgttgacaataacagtacatcttttcaagttctcagctatttcttctacctctccctatcttacatttgagtatggtaacttatgtcatctatgttgaatgtaagcttataaagcacaaagcatacatttcctgactggtctagagaactgatgtttcaatttacccctctgctaaataaatattaaaactatcatgtgaaaaaaaaaaaaaaaaaa

SEQ ID NO: 3632 - DNA, 2305 bp, Homo sapiens; identical to SEQ ID NO: 2527

SEQ ID NO: 3633 - DNA, 2151 bp, Homo sapiens
ggaataataagacacgccctgaaggagtacatcgtctagtgagggacagaccaagcacgcaaaacaaattgcaatataatgtgataagttctttaaaagaggtaagagcaacgtgctttgggagcagagaagagggagaaagcagcatcttgcctggatgagccaggggacacagaagagaagcccactatctcatttaatctttacaactctcttgcaaggttccctggttgtgaaaatacatgagataaatcatgaaggccactatcatcctccttctgcttgcacaagtttcctgggctggaccgtttcaacagagaggcttatttgactttatgctagaagatgaggcttctgggataggcccagaagttcctgatgaccgcgacttcgagccctccctaggcccagtgtgccccttccgctgtcaatgccatcttcgagtggtccagtgttctgatttgggtctggacaaagtgccaaaggatcttccccctgacacaactctgctagacctgcaaaacaacaaaataaccgaaatcaaagatggagactttaagaacctgaagaaccttcacgcattgattcttgtcaacaataaaattagcaaagttagtcctggagcatttacacctttggtgaagttggaacgactttatctgtccaagaatcagctgaaggaattgccagaaaaaatgcccaaaactcttcaggagctgcgtgcccatgagaatgagatcaccaaagtgcgaaaagttactttcaatggactgaaccagatgattgtcatagaactgggcaccaatccgctgaagagctcaggaattgaaaatggggctttccagggaatgaagaagctctcctacatccgcattgctgataccaatatcaccagcattcctcaaggtcttcctccttcccttacggaattacatcttgatggcaacaaaatcagcagagttgatgcagctagcctgaaaggactgaataatttggctaagttgggattgagtttcaacagcatctctgctgttgacaatggctctctggccaacacgcctcatctgagggagcttcacttggacaacaacaagcttaccagagtacctggtgggctggcagagcataagtacatccaggttgtctaccttcataacaacaatatctctgtagttggatcaagtgacttctgcccacctggacacaacaccaaaaaggcttcttattcgggtgtgagtcttttcagcaacccggtccagtactgggagatacagccatccaccttcagatgtgtctacgtgcgctctgccattcaactcggaaactataagtaattctcaagaaagccctcatttttataacctggcaaaatcttgttaatgtcattgctaaaaaataaataaaagctagatactggaaacctaactgcaatgtggatgttttacccacatgacttattatgcataaagccaaatttccagtttaagtaattgcctacaataaaaagaaattttgcctgccattttcagaatcatcttttgaagctttctgttgatgttaactgagctactagagatattcttatttcactaaatgtaaaatttggagtaaatatatatgtcaatatttagtaaagcttttcttttttaatttccaggaaaaaataaaaagagtatgagtcttctgtaattcattgagcagttagctcatttgagataaagtcaaatgccaaacactagctctgtattaatccccatcattactggtaaagcctcatttgaatgtgtgaattcaatacaggctatgtaaaatttttactaatgtcattattttgaaaaaataaatttaaaaatacattcaaaattactattgtatacaagcttaattgttaatattccctaaacacaattttatgaagggagaagacattggtttgttgacaataacagtacatcttttcaagttctcagctatttcttctacctctccctatcttacatttgagtatggtaacttatgtcatctatgttgaatgtaagcttataaagcacaaagcatacatttcctgactggtctagagaactgatgtttcaatttacccctctgctaaataaatattaaaactatcatgtgaaaaaaaaaaaaaaaaaa

SEQ ID NO: 3634 - DNA, 2158 bp, Homo sapiens; identical to SEQ ID NO: 1466

SEQ ID NO: 3635 - DNA, 1587 bp, Homo sapiens
cggattgtcagactgctcctccctcttctttagactgccacgaggaaaaagcagatgtgagaactcaaggttcagggctgctcttctaagaaacaagtctgccataatctccatctgtgttggaatctgttaactaatgaactggtctctgtgcaaatcctgagtgctaaagcttccaacaagactgatgctagctcgtgtcaccaggaagatgctacgtcatgccaagtgttttcagcgcctagcaatttttggttctgtgagggcactgcataaagataatagaacagcaacccctcagaatttctccaactatgaatccatgaaacaggacttcaaactggggattccagagtatttcaactttgctaaagatgtcctggaccaatggactgataaggaaaaggctggaaagaaaccttcaaatccagccttctggtggatcaacagaaatggagaagagatgcgatggagttttgaggaactgggatctctgtccagaaaatttgccaatatactttcagaagcctgttccctacaaagaggagatcgggtaattctgattctgcccagggtcccagagtggtggcttgcaaatgtggcctgtctgcgaacagggacagttttaattccaggaaccactcagctgacccagaaagacattctctacagactacaatcttcaaaagcaaactgcattatcaccaatgatgttttagccccagcagtagacgctgttgcatccaaatgtgaaaatctgcactccaagctgattgtatcagagaactccagagaggggtgggggaacctcaaggagttgatgaaacatgccagtgacagccacacctgtgtgaagacaaaacacaatgagatcatggccatattctttaccagtggaacaagtggatatccgaaaatgactgcacacacccacagcagttttggtttaggattatctgtaaatggaaggttctggctagatttgacaccctcagatgtgatgtggaatacctcagatacgggctgggcaaagtctgcatggagtagtgttttttctccgtggatccagggagcatgtgtattcacacaccatttaccccgttttgagccgacttctatcttgcaaacactctccaagtaccccatcacagtcttctgttcagcaccaactgtataccgaatgcttgtacagaatgatataaccagctataagtttaaaagcttaaagcactgtgtgagtgctggggaaccaattacccctgacgtgactgaaaaatggagaaacaagacgggcctggatatctacgaaggatatggacagactgaaacggtgctaatctgtggaaattttaagggaatgaaaattaaacctggctcaatgggaaaaccttctcctgctttcgatgttaaggtttgcacatccccttccaggagaatgtttaacaacccaatctgtacactacctacctaccgcttacccccatataaactttctttgttatgatggtgattccattttacttccatgatactttaatttttataaatatgtgaaaatgattagaaatgaaaaaaaaaaaaaaaaaa

SEQ ID NO: 3636 - DNA, 4819 bp, Homo sapiens
cgctgtctctccccctcggctcggagaggcccttcggcctgagggagcctcgccgcccgtccccggcacacgcgcagccccggcctctcggcctctgccggagaaacagttgggacccctgattttagcaggatggcccaatggaatcagctacagcagcttgacacacggtacctggagcagctccatcagctctacagtgacagcttcccaatggagctgcggcagtttctggccccttggattgagagtcaagattgggcatatgcggccagcaaagaatcacatgccactttggtgtttcataatctcctgggagagattgaccagcagtatagccgcttcctgcaagagtcgaatgttctctatcagcacaatctacgaagaatcaagcagtttcttcagagcaggtatcttgagaagccaatggagattgcccggattgtggcccggtgcctgtgggaagaatcacgccttctacagactgcagccactgcggcccagcaagggggccaggccaaccaccccacagcagccgtggtgacggagaagcagcagatgctggagcagcaccttcaggatgtccggaagagagtgcaggatctagaacagaaaatgaaagtggtagagaatctccaggatgactttgatttcaactataaaaccctcaagagtcaaggagacatgcaagatctgaatggaaacaaccagtcagtgaccaggcagaagatgcagcagctggaacagatgctcactgcgctggaccagatgcggagaagcatcgtgagtgagctggcggggcttttgtcagcgatggagtacgtgcagaaaactctcacggacgaggagctggctgactggaagaggcggcaacagattgcctgcattggaggcccgcccaacatctgcctagatcggctagaaaactggataacgtcattagcagaatctcaacttcagacccgtcaacaaattaagaaactggaggagttgcagcaaaaagtttcctacaaaggggaccccattgtacagcaccggccgatgctggaggagagaatcgtggagctgtttagaaacttaatgaaaagtgcctttgtggtggagcggcagccctgcatgcccatgcatcctgaccggcccctcgtcatcaagaccggcgtccagttcactactaaagtcaggttgctggtcaaattccctgagttgaattatcagcttaaaattaaagtgtgcattgacaaagactctggggacgttgcagctctcagaggatcccggaaatttaacattctgggcacaaacacaaaagtgatgaacatggaagaatccaacaacggcagcctctctgcagaattcaaacacttgaccctgagggagcagagatgtgggaatgggggccgagccaattgtgatgcttccctgattgtgactgaggagctgcacctgatcacctttgagaccgaggtgtatcaccaaggcctcaagattgacctagagacccactccttgccagttgtggtgatctccaacatctgtcagatgccaaatgcctgggcgtccatcctgtggtacaacatgctgaccaacaatcccaagaatgtaaacttttttaccaagcccccaattggaacctgggatcaagtggccgaggtcctgagctggcagttctcctccaccaccaagcgaggactgagcatcgagcagctgactacactggcagagaaactcttgggacctggtgtgaattattcagggtgtcagatcacatgggctaaattttgcaaagaaaacatggctggcaagggcttctccttctgggtctggctggacaatatcattgaccttgtgaaaaagtacatcctggccctttggaacgaagggtacatcatgggctttatcagtaaggagcgggagcgggccatcttgagcactaagcctccaggcaccttcctgctaagattcagtgaaagcagcaaagaaggaggcgtcactttcacttgggtggagaaggacatcagcggtaagacccagatccagtccgtggaaccatacacaaagcagcagctgaacaacatgtcatttgctgaaatcatcatgggctataagatcatggatgctaccaatatcctggtgtctccactggtctatctctatcctgacattcccaaggaggaggcattcggaaagtattgtcggccagagagccaggagcatcctgaagctgacccaggtagcgctgccccatacctgaagaccaagtttatctgtgtgacaccattcattgatgcagtttggaaataatggtgaaggtgctgaaccctcagcaggagggcagtttgagtccctcacctttgacatggagttgacctcggagtgcgctacctcccccatgtgaggagctgagaacggaagctgcagaaagatacgactgaggcgcctacctgcattctgccacccctcacacagccaaaccccagatcatctgaaactactaactttgtggttccagattttttttaatctcctacttctgctatctttgagcaatctgggcacttttaaaaatagagaaatgagtgaatgtgggtgatctgcttttatctaaatgcaaataaggatgtgttctctgagacccatgatcaggggatgtggcggggggtggctagagggagaaaaaggaaatgtcttgtgttgttttgttcccctgccctcctttctcagcagctttttgttattgttgttgttgttcttagacaagtgcctcctggtgcctgcggcatccttctgcctgtttctgtaagcaaatgccacaggccacctatagctacatactcctggcattgcactttttaaccttgctgacatccaaatagaagataggactatctaagccctaggtttctttttaaattaagaaataataacaattaaagggcaaaaaacactgtatcagcatagcctttctgtatttaagaaacttaagcagccgggcatggtggctcacgcctgtaatcccagcactttgggaggccgaggcggatcataaggtcaggagatcaagaccatcctggctaacacggtgaaaccccgtctctactaaaagtacaaaaaattagctgggtgtggtggtgggcgcctgtagtcccagctactcgggaggctgaggcaggagaatcgcttgaacctgagaggcggaggttgcagtgagccaaaattgcaccactgcacactgcactccatcctgggcgacagtctgagactctgtctcaaaaaaaaaaaaaaaaaaaagaaacttcagttaacagcctccttggtgctttaagcattcagcttccttcaggctggtaatttatataatccctgaaacgggcttcaggtcaaacccttaagacatctgaagctgcaacctggcctttggtgttgaaataggaaggtttaaggagaatctaagcattttagacttttttttataaatagacttattttcctttgtaatgtattggccttttagtgagtaaggctgggcagagggtgcttacaaccttgactccctttctccctggacttgatctgctgtttcagaggctaggttgtttctgtgggtgccttatcagggctgggatacttctgattctggcttccttcctgccccaccctcccgaccccagtccccctgatcctgctagaggcatgtctccttgcgtgtctaaaggtccctcatcctgtttgttttaggaatcctggtctcaggacctcatggaagaagagggggagagagttacaggttggacatgatgcacactatggggccccagcgacgtgtctggttgagctcagggaatatggttcttagccagtttcttggtgatatccagtggcacttgtaatggcgtcttcattcagttcatgcagggcaaaggcttactgataaacttgagtctgccctcgtatgagggtgtatacctggcctccctctgaggctggtgactcctccctgctggggccccacaggtgaggcagaacagctagagggcctccccgcctgcccgccttggctggctagctcgcctctcctgtgcgtatgggaacacctagcacgtgctggatgggctgcctctgactcagaggcatggccggatttggcaactcaaaaccaccttgcctcagctgatcagagtttctgtggaattctgtttgttaaatcaaattagctggtctctgaattaagggggagacgaccttctctaagatgaacagggttcgccccagtcctcctgcctggagacagttgatgtgtcatgcagagctcttacttctccagcaacactcttcagtacataataagcttaactgataaacagaatatttagaaaggtgagacttgggcttaccattgggtttaaatcatagggacctagggcgagggttcagggcttctctggagcagatattgtcaagttcatggccttaggtagcatgtatctggtcttaactctgattgtagcaaaagttctgagaggagctgagccctgttgtggcccattaaagaacagggtcctcaggccctgcccgcttcctgtccactgccccctccccatccccagcccagccgagggaatcccgtgggttgcttacctacctataaggtggtttataagctgctgtcctggccactgcattcaaattccaatgtgtacttcatagtgtaaaaatttatattattgtgaggttttttgtcttttttttttttttttttttttggtatattgctgtatctactttaacttccagaaataaacgttatataggaaccgtaaaa

SEQ ID NO: 3637 - DNA, 2080 bp, Homo sapiens
attggatcaaacatgtcacaagagtcggacaataataaaagactagtggccttagtgcccatgcccagtgaccctccattcaatacccgaagagcctacaccagtgaggatgaagcctggaagtcatacttggagaatcccctgacagcagccaccaaggccatgatgagcattaatggtgatgaggacagtgctgctgccctcggcctgctctatgactactacaaggttcctcgagacaagaggctgctgtctgtaagcaaagcaagtgacagccaagaagaccaggagaaaagaaactgccttggcaccagtgaagcccagagtaatttgagtggaggagaaaaccgagtgcaagtcctaaagactgttccagtgaacctttccctaaatcaagatcacctggagaattccaagcgggaacagtacagcatcagcttccccgagagctctgccatcatcccggtgtcgggaatcacggtggtgaaagctgaagatttcacaccagttttcatggccccacctgtgcactatccccggggagatggggaagagcaacgagtggttatctttgaacagactcagtatgacgtgccctcgctggccacccacagcgcctatctcaaagacgaccagcgcagcactccggacagcacatacagcgagagcttcaaggacgcagccacagagaaatttcggagtgcttcagttggggctgaggagtacatgtatgatcagacatcaagtggcacatttcagtacaccctggaagccaccaaatctctccgtcagaagcagggggagggccccatgacctacctcaacaaaggacagttctatgccataacactcagcgagaccggagacaacaaatgcttccgacaccccatcagcaaagtcaggagtgtggtgatggtggtcttcagtgaagacaaaaacagagatgaacagctcaaatactggaaatactggcactctcggcagcatacggcgaagcagagggtccttgacattgccgattacaaggagagctttaatacgattggaaacattgaagagattgcatataatgctgtttcctttacctgggacgtgaatgaagaggcgaagattttcatcaccgtgaattgcttgagcacagatttctcctcccaaaaaggggtgaaaggacttcctttgatgattcagattgacacatacagttataacaatcgtagcaataaacccattcatagagcttattgccagatcaaggtcttctgtgacaaaggagcagaaagaaaaatccgagatgaagagcggaagcagaacaggaagaaagggaaaggccaggcctcccaaactcaatgcaacagctcctctgatgggaagttggctgccatacctttacagaagaagagtgacatcacctacttcaaaaccatgcctgatctccactcacagccagttctcttcatacctgatgttcactttgcaaacctgcagaggaccggacaggtgtattacaacacggatgatgaacgagaaggtggcagtgtccttgttaaacggatgttccggcccatggaagaggagtttggtccagtgccttcaaagcagatgaaagaagaagggacaaagcgagtgctcttgtacgtgaggaaggagactgacgatgtgttcgatgcattgatgttgaagtctcccacagtgaagggcctgatggaagcgatatctgagaaatatgggctgcccgtggagaagatagcaaagctttacaagaaaagcaaaaaaggcatcttggtgaacatggatgacaacatcatcgagcactactcgaacgaggacaccttcatcctcaacatggagagcatggtggagggcttcaaggtcacgctcatggaaatctagccctgggtttggcatccgctttggctggagctctcagtgcattcctccctgagagagacagaagccccagccccagaacctggagacccatctcccccatctcacaactgctgttacaagaccgtgctggggagtggggcaagggacaggccccactgtcggtgtgcttggcccatccactggcacctac

SEQ ID NO: 3638 - DNA, 2080 bp, Homo sapiens
attggatcaaacatgtcacaagagtcggacaataataaaagactagtggccttagtgcccatgcccagtgaccctccattcaatacccgaagagcctacaccagtgaggatgaagcctggaagtcatacttggagaatcccctgacagcagccaccaaggccatgatgagcattaatggtgatgaggacagtgctgctgccctcggcctgctctatgactactacaaggttcctcgagacaagaggctgctgtctgtaagcaaagcaagtgacagccaagaagaccaggagaaaagaaactgccttggcaccagtgaagcccagagtaatttgagtggaggagaaaaccgagtgcaagtcctaaagactgttccagtgaacctttccctaaatcaagatcacctggagaattccaagcgggaacagtacagcatcagcttccccgagagctctgccatcatcccggtgtcgggaatcacggtggtgaaagctgaagatttcacaccagttttcatggccccacctgtgcactatccccggggagatggggaagagcaacgagtggttatctttgaacagactcagtatgacgtgccctcgctggccacccacagcgcctatctcaaagacgaccagcgcagcactccggacagcacatacagcgagagcttcaaggacgcagccacagagaaatttcggagtgcttcagttggggctgaggagtacatgtatgatcagacatcaagtggcacatttcagtacaccctggaagccaccaaatctctccgtcagaagcagggggagggccccatgacctacctcaacaaaggacagttctatgccataacactcagcgagaccggagacaacaaatgcttccgacaccccatcagcaaagtcaggagtgtggtgatggtggtcttcagtgaagacaaaaacagagatgaacagctcaaatactggaaatactggcactctcggcagcatacggcgaagcagagggtccttgacattgccgattacaaggagagctttaatacgattggaaacattgaagagattgcatataatgctgtttcctttacctgggacgtgaatgaagaggcgaagattttcatcaccgtgaattgcttgagcacagatttctcctcccaaaaaggggtgaaaggacttcctttgatgattcagattgacacatacagttataacaatcgtagcaataaacccattcatagagcttattgccagatcaaggtcttctgtgacaaaggagcagaaagaaaaatccgagatgaagagcggaagcagaacaggaagaaagggaaaggccaggcctcccaaactcaatgcaacagctcctctgatgggaagttggctgccatacctttacagaagaagagtgacatcacctacttcaaaaccatgcctgatctccactcacagccagttctcttcatacctgatgttcactttgcaaacctgcagaggaccggacaggtgtattacaacacggatgatgaacgagaaggtggcagtgtccttgttaaacggatgttccggcccatggaagaggagtttggtccagtgccttcaaagcagatgaaagaagaagggacaaagcgagtgctcttgtacgtgaggaaggagactgacgatgtgttcgatgcattgatgttgaagtctcccacagtgaagggcctgatggaagcgatatctgagaaatatgggctgcccgtggagaagatagcaaagctttacaagaaaagcaaaaaaggcatcttggtgaacatggatgacaacatcatcgagcactactcgaacgaggacaccttcatcctcaacatggagagcatggtggagggcttcaaggtcacgctcatggaaatctagccctgggtttggcatccgctttggctggagctctcagtgcgttcctccctgagagagacagaagccccagccccagaacctggagacccatctcccccatctcacaactgctgttacaagaccgtgctggggagtggggcaagggacaggccccactgtcggtgtgcttggcccatccactggcacctac

SEQ ID NO: 3639 - DNA, 555 bp, Homo sapiens
atggcccgcggggctgcgctggcgctgctgctcttcggcctgctgggtgttctggtcgccgccccggatggtggtttcgatttatccgatgcccttcctgacaatgaaaacaagaaacccactgcaatccccaagaaacccagtgctggggatgactttgacttaggagatgctgttgttgatggagaaaatgacgacccacgaccaccgaacccacccaaaccgatgccaaatccaaaccccaaccaccctagttcctccggtagcttttcagatgctgaccttgcggatggcgtttcaggtggagaaggaaaaggaggcagtgatggtggaggcagccacaggaaagaaggggaagaggccgacgccccaggcgtgatccccgggattgtgggggctgtcgtggtcgccgtggctggagccatctctagcttcattgcttaccagaaaaagaagctatgcttcaaagaaaatgcagaacaaggggaggtggacatggagagccaccggaatgccaacgcagagccagctgttcagcgtactcttttagagaaa

SEQ ID NO: 3640 - DNA, 5380 bp, Homo sapiens
gccagagcagcggggccgggcgcgcagggcctggccggagcccccactcccaggagtttcctctgcagagccccgcgccccccgcgccgggatttcagcccgatcccctcctctccctgcgcccagcctctccccagcatgtaaagtcttctgtctctcctcggagttggcggaggcggcaactttccattctcgccgccgggggccgggcagcagcgggcgcgcgggtcagcgctcagcacggcgggcagcgccgcgctgcgcaccgccgccgaccatgagcgaggacagccgcggagacagccgcgccgagagcgccaaggacctggagaagcagcttcgcctgcgcgtgtgcgtgctcagcgagctccagaagaccgagcgggactatgtgggcacgctggagttcctggtgtcggcattcttacacagaatgaaccagtgtgcagcatcaaaagttgacaaaaatgtgacagaagaaacagtgaagatgttgttctcaaacattgaagacatccttgcagtacataaagaattcttaaaagtcgtggaagaatgcttacaccccgaacctaatgctcaacaagaagtgggaacctgctttcttcactttaaagacaagtttcgtatctatgatgaatattgtagtaaccatgagaaggcacaaaaattacttcttgaactcaacaaaataagaacaatccggacatttcttttgaactgcatgctgcttggaggacggaagaacacagatgttcccttggaaggatatttagtaacaccaatacaaagaatatgcaagtaccctcttattttgaaggagttgctgaagcggactccacggaaacacagtgactatgcagcagtgatggaagccctccaagccatgaaagctgtctgttccaacataaacgaggccaagagacagatggagaagttagaagttttagaggaatggcagtctcacattgaaggctgggaggggtccaacatcactgacacctgcactgaaatgctaatgtgtggagtcttactgaaaatttcttctggaaatattcaagaacgggtgttttttcttttcgataatcttttggtgtactgcaaaagaaaacacagacggttgaagaacagcaaggcatctacagatggacatcggtacctttttcgtggccggatcaacacggaggtgatggaagtggagaatgtggatgatggcaccgctgatttccatagcagtggacacattgttgttaatggatggaagatacataacacagcaaaaaataaatggtttgtttgtatggcaaaaacacctgaagagaagcatgaatggtttgaagctattttgaaagaaagagaacggcggaaaggtttaaaattaggaatggagcaagatacctgggtcatgatctctgaacagggtgagaaactttataaaatgatgtgcagacaaggaaatctgatcaaagaccgaaagagaaaactgactacgttccctaaatgctttcttggaagcgaatttgtgtcatggctgttggaaattggagagattcacaggcctgaggaaggcgtgcacttgggacaagcattattagaaaatggaatcattcaccatgttactgataaacatcaattcaaaccagaacagatgttatatagatttcgctatgatgatggaacattttatccaagaaatgagatgcaggacgtgatttcaaagggtgtaagattatattgtcgtcttcatagcctttttactccagtgataagagataaagattaccatttaaggacctacaaatctgtggtcatggccaacaaactgatagactggttaattgcacagggagattgccgcaccagagaagaggcaatgatatttggcgttggactctgtgacaatggatttatgcaccatgtccttgaaaaaagcgaattcaaagatgaacccctacttttccgttttttttcggatgaggaaatggagggatcaaatatgaaacatcgacttatgaaacatgacttaaaagttgtggaaaatgttatagctaagtcattattgattaaatccaatgaaggcagctatggctttggattagaagacaaaaataaagttccaataataaagttggtagaaaagggatctaatgctgagatggctggcatggaagtcgggaaaaagatttttgctattaatggtgacctagtttttatgagacctttcaatgaagtggattgcttcctgaaatcgtgtttaaacagcagaaaacctctaagagttcttgtgagcacaaagccaagagagacagtgaaaattccagattcagctgatggacttggcttccagatccggggatttggcccttctgttgtgcatgctgtaggaagaggaactgtggctgcagcagctggtcttcaccctggacagtgcattatcaaggtgaatggaatcaatgtcagcaaagagacacatgccagtgtcattgcacacgttacagcctgcaggaagtacaggcggccaacgaagcaagattccatacaatgggtttataatagcattgagagtgctcaagaagaccttcaaaaatctcactccaagccccctggagatgaagcaggggatgcttttgactgtaaagtagaagaggttattgacaaattcaacactatggccatcattgatgggaagaaggagcatgtgagtctgacagtggacaatgtccacctggaatatggtgtcgtgtatgagtacgacagcacagctggcatcaagtgcaatgtggtggaaaagatgattgagcccaaaggtttcttcagcttaactgccaagattcttgaagccctggctaaaagtgatgagcattttgtacaaaactgtaccagcctaaattctctaaatgaagtgattcctactgaccttcagagtaaattcagtgccctttgcagtgaaagaattgaacacctatgtcagagaatatccagttataaaaagttttctcgtgtactgaagaatagggcctggcctacttttaaacaggccaaatctaaaatctccccactgcacagcagtgatttctgccctaccaactgccatgtcaatgtgatggaagtttcttatcccaaaacatcaacctctttgggaagtgcatttggtgttcagttggatagcaggaagcataattctcatgataaagaaaacaaatcttcggagcaagggaaactgagccctatggtgtacattcagcacaccatcacaaccatggcggccccttcaggtctgtctctgggacagcaggatggccatggtctcaggtatctgctaaaagaagaagacttagaaacccaagacatctatcagaaactgctgggcaaacttcagactgcactgaaagaggtggagatgtgtgtttgtcaaatagatgaccttctgtcttcaataacatattctcctaaattagaacgtaagacatcagagggcataataccaacagacagtgacaatgagaagggagaaagaaacagcaaacgggtatgttttaatgtagcaggagatgaacaggaagattctggtcatgacaccatcagcaacagagactcttacagtgactgcaacagcaataggaattccatcgcctccttcaccagcatctgcagcagccagtgcagctcgtatttccacagtgatgaaatggactcaggtgatgaacttcccttaagtgttcgcatatctcatgataaacaggacaagatacatagttgccttgagcatcttttcagccaggtggattcaattaccaatctcctaaaagggcaggctgttgtgagggcctttgaccaaaccaagtatctcactccaggccgaggattgcaagaatttcaacaggaaatggaaccaaagctgagttgtccaaaaaggctacggcttcatatcaagcaagatccttggaatcttcccagcagcgtccggactcttgctcagaacatcaggaaatttgttgaagaggtaaagtgtaggctactcctggctcttcttgaatattcagatagtgagacacagctccgtagagacatggttttctgccagactcttgtggccactgtctgtgccttctctgagcagctcatggcggccttgaaccagatgtttgacaacagcaaggaaaatgagatggaaacttgggaagccagcaggaggtggctggaccagatagcgaatgcaggtgttctttttcactttcagtcacttctgtcaccaaacttgacagatgaacaagccatgttagaagatacactggttgcactatttgatttggaaaaggtttccttttactttaaaccatcagaagaggaacctctggttgcaaatgttcctcttacatatcaagcagaaggaagtcggcaagctctgaaagtttacttctacattgatagttatcattttgaacaacttcctcaacggctgaaaaatggaggagggtttaaaattcatcctgttctttttgcacaagcactagagagcatggaaggatattattacagagacaatgtttctgtggaagaatttcaagctcagataaatgcagcctcactggaaaaggtcaaacagtacaaccagaagctcagggcattctacttggacaagtcaaattcaccaccaaactccacatccaaagctgcctatgtagataagctaatgaggcctctcaacgctttggatgaactttaccgactggtagcctcgtttatcagatccaagcgcacagctgcctgtgcaaacacagcttgcagtgcttctggggttggactgctgtcagtttcctcggagctgtgcaacaggctgggcgcctgccacatcatcatgtgcagcagcggtgtgcatcggtgcaccctgagcgtgacgctggagcaagccatcattctggccagaagccacggactgccacctcgttacatcatgcaggctacagatgtgatgcggaagcagggagcaagagttcagaacacagcgaagaatttgggagtcagagaccggactccacagtctgcaccaaggctgtacaagctgtgcgagccacctcccccagctggagaagaatgaaaagaactcccaagaaaccaggcaggcagaagctcctgaatgctggactagacaaactacatgctggctaaacattctccactgaagatacatcaatgcttttttttttttttttctgtaaatctttcttcccattgcaaacaagtagtgatcagtttatactttgatatttatgctggaaatggatagaagttcaatcagacagttcagcttcacgaactgatgtctctctgtattgacattaagtattcacttttagagtaaaatccatccctgggacat

SEQ ID NO: 3641 - DNA, 1874 bp, Homo sapiens
cggttctttccggaaattatgactgcagctgttttcactccgctgtgactcagagcgctccgggctgcaggagaggaagaaatcttgcatcaccatggtgcacttctgtggcctactcaccctccaccgggagccagtgccgctgaagagtatctctgtgagcgtgaacatttacgagtttgtggctggtgtgtctgcaactttgaactacgagaatgaggagaaagttcctttggaggccttctttgtgttccccatggatgaagactctgctgtttacagctttgaggccttggtggatgggaagaaaattgtagcagaattacaagacaagatgaaggcccgcaccaactatgagaaagccatctcccagggccaccaggccttcttattggagggggacagcagctccagggatgtcttctcttgcaatgtgggtaacctccaacctgggtcgaaggcggcagtcaccctgaagtatgtgcaggagctgcctctggaagcagatggggctctgcgctttgtgctcccagctgtcctgaatcctagataccagttctctgggtcgtctaaggacagttgccttaatgtgaagactcctatagtccctgtggaggacctgccctacacactcagcatggtcgccaccatagattcccagcatggcattgagaaggtccaatccaactgccccttgagtcctaccgagtacctaggagaggacaagacttctgctcaggtttccctggctgctggacacaagtttgatcgggacgtggaactcctgatttactacaatgaggtgcatacccccagcgtggttttggagatggggatgcctaacatgaagccaggtcatttgatgggagatccatctgcaatggtgagtttctatccaaatatcccagaagatcaaccatcaaatacctgtggagagtttatctttctcatggaccgctcgggaagtatgcagagccccatgagtagccaggatacatctcagctgcgaatacaggcagccaaggaaacactgattttgctgctgaagagtttacctataggctgttatttcaacatctatggatttggctcttcctatgaggcatgctttccggagagtgtgaagtacactcagcaaacaatggaggaggctctggggagagtgaagcttatgcaggccgacctagggggcactgaaatcttggcaccactccagaacatttacaggggaccctccatcccaggccaccccctacagctttttgtctttacagatggagaagttacagacacgtttagtgtaattaaagaagttaggatcaacagacagaaacacaggtaggaagaaaatgtgatttccgggtgattggtgctgagtagtgacacacagactctagtgctacatgatgccggtgttgaccttccttcaagaggaccaaatgatttcagaatttagttttagcagctgaaaatttatttctccctgtaaacgttaaaaacagttttccaaataacatcaacaacacagcaaaaccattgtttcttattctttctaaactacaacgaacacaagaattgaatagtaagatgttaattttttttactataaacatttttagagaagtaaaacatgctgaaaactacacaaattataagcatacaactggactcattatcacagtgaatgcactgtgtgatcgccacataggtaaaaactggaatggtcgtaggcctctccatctgtacccttttccatcatgtcctattccctgtcactacacactaaaactttcctgacttacaataccatgggttatttatgcttgtttttgaatgaaaataaataagttatacagtaaaaaaaaaaaaaaaaa

SEQ ID NO: 3642 - DNA, 3438 bp, Homo sapiens; identical to SEQ ID NO: 1925

SEQ ID NO: 3643 - DNA, 5132 bp, Homo sapiens; identical to SEQ ID NO: 749

SEQ ID NO: 3644 - DNA, 3024 bp, Homo sapiens
gcgccgcgctgcgcaccgccgccgaccatgagcgaggacagccgcggagacagccgcgccgagagcgccaaggacctggagaagcagcttcgcctgcgcgtgtgcgtgctcagcgagctccagaagaccgagcgggactatgtgggcacgctggagttcctggtgtcggcattcttacacagaatgaaccagtgtgcagcatcaaaagttgacaaaaatgtgacagaagaaacagtgaagatgttgttctcaaacattgaagacatccttgcagtacataaagaattcttaaaagtcgtggaagaatgcttacaccccgaacctaatgctcaacaagaagtgggaacctgctttcttcactttaaagacaagtttcgtatctatgatgaatattgtagtaaccatgagaaggcacaaaaattacttcttgaactcaacaaaataagaacaatccggacatttcttttgaactgcatgctgcttggaggacggaagaacacagatgttcccttggaaggatatttagtaacaccaatacaaagaatatgcaagtaccctcttattttgaaggagttgctgaagcggactccacggaaacacagtgactatgcagcagtgatggaagccctccaagccatgaaagctgtctgttccaacataaacgaggccaagagacagatggagaagttagaagttttagaggaatggcagtctcacattgaaggctgggaggggtccaacatcactgacacctgcactgaaatgctaatgtgtggagtcttactgaaaatttcttctggaaatattcaagaacgggtgttttttcttttcgataatcttttggtgtactgcaaaagaaaacacagacggttgaagaacagcaaggcatctacagatggacatcggtacctttttcgtggccggatcaacacggaggtgatggaagtggagaatgtggatgatggcaccgctgatttccatagcagtggacacattgttgttaatggatggaagatacataacacagcaaaaaataaatggtttgtttgtatggcaaaaacacctgaagagaagcatgaatggtttgaagctattttgaaagaaagagaacggcggaaaggtttaaaattaggaatggagcaagatacctgggtcatgatctctgaacagggtgagaaactttataaaatgatgtgcagacaaggaaatctgatcaaagaccgaaagagaaaactgactacgttccctaaatgctttcttggaagcgaatttgtgtcatggctgttggaaattggagagattcacaggcctgaggaaggcgtgcacttgggacaagcattattagaaaatggaatcattcaccatgttactgataaacatcaattcaaaccagaacagatgttatatagatttcgctatgatgatggaacattttatccaagaaatgagatgcaggacgtgatttcaaagggtgtaagattatattgtcgtcttcatagcctttttactccagtgataagagataaagattaccatttaaggacctacaaatctgtggtcatggccaacaaactgatagactggttaattgcacagggagattgccgcaccagagaagaggcaatgatatttggcgttggactctgtgacaatggatttatgcaccatgtccttgaaaaaagcgaattcaaagatgaacccctacttttccgttttttttcggatgaggaaatggagggatcaaatatgaaacatcgacttatgaaacatgacttaaaagttgtggaaaatgttatagctaagtcattattgattaaatccaatgaaggcagctatggctttggattagaagacaaaaataaagttccaataataaagttggtagaaaagggatctaatgctgagatggctggcatggaagtcgggaaaaagatttttgctattaatggtgacctagtttttatgagacctttcaatgaagtggattgcttcctgaaatcgtgtttaaacagcagaaaacctctaagagttcttgtgagcacaaagccaagagagacagtgaaaattccagattcagctgatggacttggcttccagatccggggatttggcccttctgttgtgcatgctgtaggaagaggaactgtggctgcagcagctggtcttcaccctggacagtgcattatcaaggtgaatggaatcaatgtcagcaaagagacacatgccagtgtcattgcacacgttacagcctgcaggaagtacaggcggccaacgaagcaagattccatacaatgggtttataatagcattgagagtgctcaagaagaccttcaaaaatctcactccaagccccctggagatgaagcaggggatgcttttgactgtaaagtagaagaggttattgacaaattcaacactatggccatcattgatgggaagaaggagcatgtgagtctgacagtggacaatgtccacctggaatatggtgtcgtgtatgagtacgacagcacagctggcatcaagtgcaatgtggtggaaaagatgattgagcccaaaggtttcttcagcttaactgccaagattcttgaagccctggctaaaagtgatgagcattttgtacaaaactgtaccagcctaaattctctaaatgaagtgattcctactgaccttcagagtaaattcagtgccctttgcagtgaaagaattgaacacctatgtcagagaatatccagttataaaaaggttcaagcttcagaaaggttttacaatttcacagcacggcatgctgtctgggagcacagttttgatcttcacagtgtaagcagcacatttccagtacctgtgactatggagttcctcctgctgcctcctcctctcttaggaatatcccaggatggaagacagcactgcattcctgaggaccttccttctcaagaaatgctcttagcagagagggcccctgtctgattcttaccctttggaacagttcaggcacccttagacacagtacacagcccttcctag

SEQ ID NO: 3645 - DNA, 521 bp, Homo sapiens
agagcgatgagtgagaacgccgcaccaggtctgatctcagagcttctcctgcaaagaggaaccacgaaggtggccacaggtctggttctgaacagagaccagaggctcgcctgggcagagaacagcattgacttcatcagcagggagctgtgtgcgcattccatcaggaagctgcaggcccatgtcctgttgatcaaagcagtccacggatattttgattcaagacagaattactctgagaaggagtccctgtcgttcatgatagacacgatgaaatccaccctcaaagagcagttccagtttgtggaagtcccaggcaatcactgtgtccacatgagcgaaccccagcacgtggccagtatcatcagctccttcttacagcgcacacacatgctcccagcccagctgtagctctgggcctggaactatgaagacctagtgctcccagactcaacactgggactctgagttcctgagccccacaacaaggccagggatggtggggacaggcctcactagtc

SEQ ID NO: 3646 - DNA, 5179 bp, Homo sapiens
ggctttgccgcgctcgctgcacttgggcgagagctggaacgtggaccagagctcggatcccatcgcagctaccgcgatgagaggcgctcgcggcgcctgggattttctctgcgttctgctcctactgcttcgcgtccagacaggctcttctcaaccatctgtgagtccaggggaaccgtctccaccatccatccatccaggaaaatcagacttaatagtccgcgtgggcgacgagattaggctgttatgcactgatccgggctttgtcaaatggacttttgagatcctggatgaaacgaatgagaataagcagaatgaatggatcacggaaaaggcagaagccaccaacaccggcaaatacacgtgcaccaacaaacacggcttaagcaattccatttatgtgtttgttagagatcctgccaagcttttccttgttgaccgctccttgtatgggaaagaagacaacgacacgctggtccgctgtcctctcacagacccagaagtgaccaattattccctcaaggggtgccaggggaagcctcttcccaaggacttgaggtttattcctgaccccaaggcgggcatcatgatcaaaagtgtgaaacgcgcctaccatcggctctgtctgcattgttctgtggaccaggagggcaagtcagtgctgtcggaaaaattcatcctgaaagtgaggccagccttcaaagctgtgcctgttgtgtctgtgtccaaagcaagctatcttcttagggaaggggaagaattcacagtgacgtgcacaataaaagatgtgtctagttctgtgtactcaacgtggaaaagagaaaacagtcagactaaactacaggagaaatataatagctggcatcacggtgacttcaattatgaacgtcaggcaacgttgactatcagttcagcgagagttaatgattctggagtgttcatgtgttatgccaataatacttttggatcagcaaatgtcacaacaaccttggaagtagtagataaaggattcattaatatcttccccatgataaacactacagtatttgtaaacgatggagaaaatgtagatttgattgttgaatatgaagcattccccaaacctgaacaccagcagtggatctatatgaacagaaccttcactgataaatgggaagattatcccaagtctgagaatgaaagtaatatcagatacgtaagtgaacttcatctaacgagattaaaaggcaccgaaggaggcacttacacattcctagtgtccaattctgacgtcaatgctgccatagcatttaatgtttatgtgaatacaaaaccagaaatcctgacttacgacaggctcgtgaatggcatgctccaatgtgtggcagcaggattcccagagcccacaatagattggtatttttgtccaggaactgagcagagatgctctgcttctgtactgccagtggatgtgcagacactaaactcatctgggccaccgtttggaaagctagtggttcagagttctatagattctagtgcattcaagcacaatggcacggttgaatgtaaggcttacaacgatgtgggcaagacttctgcctattttaactttgcatttaaaggtaacaacaaagagcaaatccatccccacaccctgttcactcctttgctgattggtttcgtaatcgtagctggcatgatgtgcattattgtgatgattctgacctacaaatatttacagaaacccatgtatgaagtacagtggaaggttgttgaggagataaatggaaacaattatgtttacatagacccaacacaacttccttatgatcacaaatgggagtttcccagaaacaggctgagttttgggaaaaccctgggtgctggagctttcgggaaggttgttgaggcaactgcttatggcttaattaagtcagatgcggccatgactgtcgctgtaaagatgctcaagccgagtgcccatttgacagaacgggaagccctcatgtctgaactcaaagtcctgagttaccttggtaatcacatgaatattgtgaatctacttggagcctgcaccattggagggcccaccctggtcattacagaatattgttgctatggtgatcttttgaattttttgagaagaaaacgtgattcatttatttgttcaaagcaggaagatcatgcagaagctgcactttataagaatcttctgcattcaaaggagtcttcctgcagcgatagtactaatgagtacatggacatgaaacctggagtttcttatgttgtcccaaccaaggccgacaaaaggagatctgtgagaataggctcatacatagaaagagatgtgactcccgccatcatggaggatgacgagttggccatagacttagaagacttgctgagcttttcttaccaggtggcaaagggcatggctttcctcgcctccaagaattgtattcacagagacttggcagccagaaatatcctccttactcatggtcggatcacaaagatttgtgattttggtctagccagagacatcaagaatgattctaattatgtggttaaaggaaacgctcgactacctgtgaagtggatggcacatgaaagcattttcaactgtgtatacacgtttgaaagtgacgtctggtcctatgggatttttctttgggagctgttctctttaggaagcagcccctatcctggaatgccggtcgattctaagttctacaagatgatcaaggaaggcttccggatgctcagccctgaacacgcacctgctgaaatgtatgacataatgaagacttgctgggatgcagatcccctaaaaagaccaacattcaagcaaattgttcagctaattgagaagcagatttcagagagcaccaatcatatttactccaacttagcaaactgcagccccaaccgacagaagcccgtggtagaccattctgtgcggatcaattctgtcggcagcaccgcttcctcctcccagcctctgcttgtgcacgacgatgtctgagcagaatcagtgtttgggtcacccctccaggaatgatctcttcttttggcttccatgatggttattttcttttctttcaacttgcatccaactccaggatagtgggcaccccactgcaatcctgtctttctgagcacactttagtggccgatgatttttgtcatcagccaccatcctattgcaaaggttccaactgtatatattcccaatagcaacgtagcttctaccatgaacagaaaacattctgatttggaaaaagagagggaggtatggactgggggccagagtcctttccaaggcttctccaattctgcccaaaaatatggttgatagtttacctgaataaatggtagtaatcacagttggccttcagaaccatccatagtagtatgatgatacaagattagaagctgaaaacctaagtcctttatgtggaaaacagaacatcattagaacaaaggacagagtatgaacacctgggcttaagaaatttagtatttcatgctgggaatgagacataggccatgaaaaaaatgatccccaagtgtgaacaaaagatgctcttctgtggaccactgcatgagcttttatactaccgacctggtttttaaatagagtttgctattagagcattgaattggagagaaggcctccctagccagcacttgtatatacgcatctataaattgtccgtgttcatacatttgaggggaaaacaccataaggtttcgtttctgtatacaaccctggcattatgtccactgtgtatagaagtagattaagagccatataagtttgaaggaaacagttaataccattttttaaggaaacaatataaccacaaagcacagtttgaacaaaatctcctcttttagctgatgaacttattctgtagattctgtggaacaagcctatcagcttcagaatggcattgtactcaatggatttgatgctgtttgacaaagttactgattcactgcatggctcccacaggagtgggaaaacactgccatcttagtttggattcttatgtagcaggaaataaagtataggtttagcctccttcgcaggcatgtcctggacaccgggccagtatctatatatgtgtatgtacgtttgtatgtgtgtagacaaatatttggaggggtatttttgccctgagtccaagagggtcctttagtacctgaaaagtaacttggctttcattattagtactgctcttgtttcttttcacatagctgtctagagtagcttaccagaagcttccatagtggtgcagaggaagtggaaggcatcagtccctatgtatttgcagttcacctgcacttaaggcactctgttatttagactcatcttactgtacctgttccttagaccttccataatgctactgtctcactgaaacatttaaattttaccctttagactgtagcctggatattattcttgtagtttacctctttaaaaacaaaacaaaactaaacaaaaaactccccttcctcactgcccaatataaaaggcaaatgtgtacatggcagagtttgtgtgttgtcttgaaagattcaggtatgttgcctttatggtttcccccttctacatttcttagactacatttagagaactgtggccgttatctggaagtaaccatttgcactggagttctatgctctcgcacctttccaaagttaacagattttggggttgtgttgtcacccaagagattgttgtttgccatactttgtctgaaaaattcctttgtgtttctattgacttcaatgatagtaagaaaagtggttgttagttatagatgtctaggtacttcaggggcacttcattgagagttttgtcttggatattcttgaaagtttatatttttataattttttcttacatcagatgtttctttgcagtggcttaatgtttgaaattattttgtggctttttttgtaaatattgaaatgtagcaataatgtcttttgaatattcccaagcccatgagtccttgaaaatattttttatatatacagtaactttatgtgtaaatacataagcggcgtaagtttaaaggatgttggtgttccacgtgttttattcctgtatgttgtccaattgttgacagttctgaagaattctaataaaatgtacatatataaatcaaaaaaaaaaaaaaaa

SEQ ID NO: 3647 - DNA, 3770 bp, Homo sapiens
gcctctcgcctctggacggcggcggggcggccgccggattcgcggccgcagggagcgccggagacggggagctattccgccccggcggctccattcggcgcccgcagccctcagggggtcggccccgcggcttgggagagggcaccgcggcctcggtgtgcgcagccctcgggcgcgagggtcggcggcgcggacacagccgcgttcccagccggtggggctcagcgctggcgccggcaaggactccccggccacccgcaggtaccgccgggcggagggcgcgctactagcagcgccggagatactcgagcccagggacccccgggccagcggagggcaggagcggagccccgagggagcgcgggccccgacggcgcgctcccccgtcagccacgggcaggcaggccccgcgtggcggcttggggtggggggctgcagcggggccctcgggccgaaagtcccccgggcggccagccatgaccttcgggcgcagcggggcggcctcggtggtgctgaacgtgggcggcgcccggtattcgctgtcccgggagctgctgaaggacttcccgctgcgccgcgtgagccggctgcacggctgccgctccgagcgcgacgtgctcgaggtgtgcgacgactacgaccgcgagcgcaacgagtacttcttcgaccggcactcggaggccttcggcttcatcctgctctacgtgcgcggccacggcaagctgcgcttcgcgccgcggatgtgcgagctctccttctacaacgagatgatctactggggcctggagggcgcgcacctcgagtactgctgccagcgccgcctcgacgaccgcatgtccgacacctacaccttctactcggccgacgagccgggcgtgctgggccgcgacgaggcgcgccccggcggggccgaggcggctccctccaggcgctggctggagcgcatgcggcggaccttcgaggagcccacgtcgtcgctggccgcgcagatcctggctagcgtgtcggtggtgttcgtgatcgtgtccatggtggtgctgtgcgccagcacgttgcccgactggcgcaacgcagccgccgacaaccgcagcctggatgaccggagcaggtactccgccggccctgggagggagccctccgggataattgaagctatctgcataggttggttcactgccgagtgcatcgtgaggttcattgtctccaaaaacaagtgtgagtttgtcaagagacccctgaacatcattgatttactggcaatcacgccgtattacatctctgtgttgatgacagtgtttacaggcgagaactctcaactccagagggctggagtcaccttgagggtacttagaatgatgaggattttttgggtgattaagcttgcccgtcacttcattggtcttcagacactcggtttgactctcaaacgttgctaccgagagatggttatgttacttgtcttcatttgtgttgccatggcaatctttagtgcactttctcagcttcttgaacatgggctggacctggaaacatccaacaaggactttaccagcattcctgctgcctgctggtgggtgattatctctatgactacagttggctatggagatatgtatcctatcacagtgcctggaagaattcttggaggagtttgtgttgtcagtggaattgttctattggcattacctatcacttttatctaccatagctttgtgcagtgttatcatgagctcaagtttagatctgctaggtatagtaggagcctctccactgaattcctgaattaatgcattgcaaatcaattcttgcatacacttcatagaaagactttgatgctgcttcatatttatgtgtttcttgctgggtgagcactgcagtggcattgtcatcatcttggtagggtaaaaattatccttcccagccgaagggataaaacagtttacttgttatggagtaaatagaattgagactgcaaaggaagaataatgactcctagagtaaactttaggacccggttttatttagacttgttttcccgtttccttgaatgattacacatttttaaaaaatacattatttgaacattttaaaacagaaaggtactattttccaaatgtttttccatcttatgaattcagtagaagcttggaacttatagtgttttttgtttgagagtaacattttcatttctaaatgttttataatttctcatatcaatgtcagaagtatcctggaaacatatgtcacatgcgggaactgtttaacaaatactttaaaaatttggccaaaatttaaactgtataatggagctagatacaagcaagaatagtatttgaaagacttttccagcatacttctcaattctttgctttatttttgtgccaattattcaccttatcgtgccgcttcatggaagcttgagtatgttctcccttttccattttggatttatctctttactgtaatgactcaaaaggtatttaagaattgacgagagcttgtgttgtttagcatcttactggataatatttgaattcattgctgttcctaggtgataactgtcctaatatttagatgtccaaacaagaatacttccaacataaaaattataataggaataatttgagatgactcaatattacaacctcttcttctcttaacctcctcccccaaacactagaggtttaataagacttatcagatgaaaggatatttatatagccttttagtagcaaagtcatacttacgtgttgtcactggattatcataaaagggagaaattaaatattactgtactcttagttgctgtgtagctaagtcaattttaagccagtaaaagcgatggatacataatgatttgatctgatctttaactattgtgaatcacagctacaccaaaactcttcttgtaagaatactgactaatatgccatgttaatctggctagattattaggactagataatgtaaaagtgatgattgtttagtaactaaattttagcaacagaaattagaattttgctttttcaaccagttaccataaagaagttagtgtatatataaacacaaataattagtgacagattcataaaaaattgaatgttgtacacagtaattttgtcagaggtagagaagacagggattgggaagtggtgggtgatggaggacctggatatatttatcaaataaagggttaccagaagtgttcattaaaggaattttagccatcatctagttcaagcctcaactattacaggtagaaaatcagggcaggagagaatataattgtgaaggagtcagggctaacacctggatctccagaaacctagcccagcaggttaatcttcacacatctctgggttctgagaaaagcctggaaaaatcacacttctttgtcattgtcatgctgaggtaataatagcaaaactgttttctttcccttaatttcctttcctaagcttatgtaatagtttggccattaaatatcttgccctattttccctattactgctagtatgctacttcttacatacccaaaagaaattcagttatttattgtatatttattgtattctaatataattgaaataaatggcatggatttattttttcttaactatttggattaaagctttgtggttcatgcaaacaatgtgcagatgatagcacctccatattactaataaaaatatgataaccatcaaaaaaaaaaaaaaaaaaaaaaaaaaaaaaaaaaaaaaaaaaaaaaaaaaaaccaaaaaaaaaaaaaa

SEQ ID NO: 3648 - DNA, 2011 bp, Homo sapiens
tcggccaccgctcgcttcaatatggctgcccccagggagagacgaggctaccatgaaggagccgagcgcagaccctgagtccgtcacccatggatcgcagcgcggagttcaggaaatggaaggcgcaatgtttgagcaaagcggacctcagccggaagggcagtgttgacgaggatgtggtagagcttgtgcagtttctgaacatgcgagatcagtttttcaccaccagctcctgcgctggccgcatcctactccttgaccggggtataaatggttttgaggttcagaaacaaaactgttgctggctactggttacacacaaactttgtgtaaaagatgatgtgattgtagctctgaagaaagcaaatggtgatgccactttgaaatttgaaccatttgttcttcatgtgcagtgtcgacaattgcaggatgcacagattctgcattccatggcaatagattctggtttcaggaactctggcataacggtgggaaagagaggaaaaactatgttggttgtccggagtacacatggcttagaagttccattaagccataagggaaaactgatggtgacagaggaatatattgacttcctgttaaatgtggcaaatcaaaaaatggaggaaaacaagaaaagaattgagaggttttacaactgcctacagcatgctttggaaagggaaacgatgactaacttacatcccaagatcaaagagaaaaataactcatcatatattcataagaaaaaaagaaacccagaaaaaacacgtgcccagtgtattactaaagaaagtgatgaagaacttgaaaatgatgatgatgatgatctaggaatcaatgttaccatcttccctgaagattactaagctttggttctgatgtgtcttggccgtaatgtttctagtaggttttataaagctgctcttcataagagtattttagtttgttgagtgtatcagccattcataagccagtaatgacaagtgcagagcttcaaactataactttgttgcccagaggatgtgcagttgtcatctaagctctcagcagtacccggcttatcctacgacttcacctgaaatgctatagttatccctacttttttaccagtttctcccagaagcacctgcttaataaatcaaagatgtttgaatggtgtcttattctgaaataacctgacctaagacaggtatttagattattttggatacattttgaaaagggatagcataaatattttaagtaaaaagacctttattttaaataatagtggatattttaatgctggaaattagcattatagttgatatgccagaaattatatctttggttgtgatttaaacttatgctataaactaaattaatgatgtaaatacatagttttaaacattcttttagggacatgtaacttttaagtatcacttcaataatacgtattattataggaacaaagatttgggaataattgattacaggtgaggaagtactggaattccagttcaaggagataccatttcatttaggactaaaaggacaagatacaagttcacatgatgggaaaaatcagaaaacctctcgcagacaaagggtatataatggatatgaggcatcaaaaagcatggtatagtcagtgatggggaatagtccagaaaggctgaaacacagcatgtgatgcgagtcaaggtagttgatgcccaactgtgaagggccgttctaatctagcatggaggtagacagtgtttccttaatatggctgcatatcagaattacctaggtcaggacgaggcatggagatgctactttaataggccctgccgcagatcttccaaaccagaatcttaatcctggagtctaggaatctttatttttcacacaactcatccaagtggttctgataaaatcagtccagcacttttagaacccactgataacagacttattcctggagacagcatttgaggaggaattgaagatttttctaaaaaaaaaaaaaaaaaaaaaaaaaaaa

SEQ ID NO: 3649 - DNA, 2169 bp, Homo sapiens
gagccgggaggcagagggagtagtgaccgccttccggagccgggattcatgcctgtcctcgggaccagcgaaggggactttacggctgagtatgagccaggctgctaggagccaggtacccccacgcctgcagtccccgcgccgtgcccggaatgcgagctggacgcagggctctcccaagttcccaccgagccgaataaaaagcgtccgcccgcagctctccgccaaagacggacattgactccaggacatccagatcatggagtacacgctggccaacatggccaagtcttgggccgaagcttataaggacctggagaattcagatgagtttaaatcatttatgaagcgcctccccagcaaccacttcctgaccatcggaagcatccatcagcactggggcaatgactgggacctgcagaaccgctacaagctcctgcagagtgccacggaggcacagagacaaaagatccaacgcactgcccgcaagcttttcggcctcagtgtacgctgtcgccacaatcccaaccaccagctgcctagagagaggacaattcagcagtggcttgcaagggtccagtcactcctctactgtaatgagaatgggttttggggaaccttcctggagagccagcggagctgcgtgtgccacggcagcaccacgctgtgccagcgccccatcccctgcgtgataggcgggaacaacagctgcgccatgtgcagcctggccaacatctccctctgcggctcctgcaacaagggctacaagctgtatcgaggccgctgtgaaccacagaacgtggactcggagcggagcgagcagttcatcagctttgagactgacctggacttccaggacctggagctgaagtacctgctgcagaagatggactcacgcctctacgtccacaccaccttcatcagcaacgagatccgcctcgacaccttctttgaccctcggtggcgcaagcgcatgtccctcactctcaagagcaacaagaaccgcatggacttcatccacatggtgatcggcatgtccatgcgcatctgccagatgcgcaacagcagcctggaccccatgttctttgtctatgtcaacccctttagcgggagccattcggagggctggaacatgcccttcggggaatttggctacccacgctgggagaagatccgtctccaaaacagccagtgctacaactggactcttttgctgggcaatcggtggaaaacatttttcgagacggtccacatctacctacgtagtcggactcggctacctaccctactgcgaaatgagactggccagggccccgtggacctgtcggatccctccaagaggcagttctacatcaagatctcagacgtgcaggtgtttgggtatagcctgaggttcaacgccgacctcctgcgcagtgcagtgcagcaggtcaaccagtcctacacacagggcggccagttctattcctcttcgtcagtgatgctcctcttgttggatattcgggaccgaattaatcgcctggcccctcctgtggccccggggaaaccccagctggacttgttctcctgtatgctgaaacaccgcctgaaactgaccaacagcgagatcatcagggtgaaccacgccttggacctgtacaacacggagatcctcaaacagtcggaccagatgacagccaaactctgctaacccgggactccttgccatggacttttcctgttgttgtacacacacaacagaacaaaatgaagcaaaacaaaacaaaaaaacccacaaaaatttgtaaaatgtaattaatattcaaagaaaaggaggaaaatcttcatttgttggaaatgaaaacgttctagcaactgtataaaagcgttgggcatgtttgttatttctatactcactctgtcatgaagaagggtctcagccttttgtggagcattgagggagttgcttcttaggcctcaggtgctgtattgggggagaagggagaaagcatatgcaatgaattgtaaagatctctgctgtgcaggtgctaagattaaacactaaaaagaaagagagatatatgtaatgtacaactgacactgccatttttcctttttggaggaaatggacatagataaagaagatatttcttcggttaagatttaaaaaaaaaaaaaaaaaaaaaaaaa

SEQ ID NO: 3650 - DNA, 2034 bp, Homo sapiens
atgagagaagaccattcttttcatgttcgttacagaatggaagcttcttgcctagagctggccttggaaggggaacgtctatgtaaatcaggagactgccgcgctggcgtgtcattctttgaagctgcagttcaagttggaactgaagacctaaaaacacttagcgctatttacagccagttgggcaatgcttatttctatttgcatgattatgccaaagcattagaatatcaccatcatgatttaacccttgcaaggactattggagaccagctgggggaagcgaaagctagtggtaatctgggaaacaccttaaaagttcttgggaattttgacgaagccatagtttgttgtcagcgacacctagatatttccagagagcttaatgacaaggtgggagaagcaagagcactttacaatcttgggaatgtgtatcatgccaaagggaaaagttttggttgccctggtccccaggatgtaggagaatttccagaagaagtgagagatgctctgcaggcagccgtggatttttatgaggaaaacctatcattagtgactgctttgggtgaccgagcggcacaaggacgtgcctttggaaatcttggaaacacacattacctccttggcaacttcagggatgcagttatagctcatgagcagcgtctccttattgcaaaagaatttggagataaagcagctgaaagaagagcatatagcaaccttggaaatgcatatatatttcttggtgaatttgaaactgcctcggaatactacaagaagacactactgttggcccgacagcttaaagaccgagctgtagaagcacagtcttgttacagtcttggaaatacatatactttacttcaagactatgaaaaggccattgattatcatctgaagcacttagcaattgctcaagagctgaatgatagaattggtgaaggaagagcatgttggagcttaggaaatgcatacacagcactaggaaatcatgatcaagcaatgcattttgctgaaaagcacttggaaatttcaagagaggttggggataaaagtggtgaactaacagcacgacttaatctctcagaccttcaaatggttcttggtctgagctacagcacaaataactccataatgtctgaaaatactgaaattgatagcagtttgaatggtgtacgccccaagttgggacgccggcatagtatggaaaatatggaacttatgaagttaacaccagaaaaggtacagaactggaacagtgaaattcttgctaagcaaaaacctcttattgccaaaccttctgcaaagctactctttgtcaacagactgaaggggaaaaaatacaaaacgaattcctccactaaagttctccaagatgccagtaattctattgaccaccgaattccaaattctcagaggaaaatcagtgcagatactattggagatgaagggttctttgacttattaagccgatttcaaagcaataggatggatgatcagagatgttgcttacaagaaaagaactgccatacagcttcaacaacaacttcttccactccccctaaaatgatgctaaaaacatcatctgttcctgtggtatcccccaacacggatgagtttttagatcttcttgccagctcacagagtcgccgtctggatgaccagagggctagtttcagtaatttgccagggcttcgtctaacacaaaacagccagtcggtacttagccacctgatgactaatgacaacaaagaggctgatgaagatttctttgacatccttgtaaaatgtcaaggatccagattagatgatcaaagatgtgctccaccacctgctaccacaaagggtccgacagtaccagatgaagactttttcagccttattttacggtcccagggaaagagaatggatgaacagagagttcttttacaaagagatcaaaacagagacactgactttgggctaaaggactttttgcaaaataatgctttgttggagtttaaaaattcagggaaaaaatcggcagaccattaa

SEQ ID NO: 3651 - DNA, 1734 bp, Homo sapiens
atgcctgatcgtactgagaagcactccacaatgccagactcacctgtggatgtgaagacgcaatctaggctgactcctccaacaatgccacctcccccaactactcaaggagctccaagaaccagttcatttacaccgacaacgttaactaatggcacgagccattctcctacagccttgaatggcgccccctcaccacccaatggcttcagcaatgggccttcctcttcttcctcctcctctctggctaatcaacagctgcccccagcctgtggtgccaggcaactcagcaagctgaaaaggttccttactaccctgcagcagtttggcaatgacatttcacccgagataggagaaagagttcgcaccctcgttctgggactagtgaactccactttgacaattgaagaatttcattccaaactgcaagaagctactaacttcccactgagaccttttgtcatcccatttttgaaggccaacttgcccctgctgcagcgtgagctcctccactgcgcaagactggccaaacagaaccctgcccagtacctcgcccagcatgaacagctgcttctggatgccagcaccacctcacctgttgactcctcagagctgcttctcgatgtgaacgaaaacgggaagaggcgaactccagacagaaccaaagaaaatggctttgacagagagcctttgcactcagaacatccaagcaagcgaccatgcactattagcccaggccagcggtacagtccaaataacggcttatcctaccagcccaatggcctgcctcaccctaccccacctccacctcagcattaccgtttggatgatatggccattgcccaccactacagggactcctatcgacaccccagccacagggacctcagggacagaaacagacctatggggttgcatggcacacgtcaagaagaaatgattgatcacagactaacagacagagaatgggcagaagagtggaaacatcttgaccatctgttaaactgcataatggacatggtagaaaaaacaaggcgatctctcaccgtactaaggcggtgtcaagaagcagaccgggaagaattgaattactggatccggcggtacagtgacgccgaggacttaaaaaaaggtggcggcagtagcagcagccactctaggcagcagagtcccgtcaacccagacccagttgcactagacgcgcatcgggaattccttcacaggcctgcgtctggatacgtgccagaggagatctggaagaaagctgaggaggccgtcaatgaggtgaagcgccaggcgatgacggagctgcagaaggccgtgtctgaggcggagcggaaagcccacgacatgatcacaacagagagggccaagatggagcgcacggtcgccgaggccaaacggcaggcggcggaggacgcactggcagttatcaatcagcaggaggattcaagcgagagttgctggaattgtggccgtaaagcgagtgaaacctgcagtggctgtaacacagcccgatactgtggctcattttgccagcacaaagactgggagaagcaccatcacatctgtggacagaccctgcaggcccagcagcagggagacacacctgcagtcagctcctctgtcacgcccaacagcggggctgggagcccgatggacacaccaccagcagccactccgaggtcaaccaccccgggaaccccttccaccatagagacaacccctcgttaa

SEQ ID NO: 3652 - DNA, 765 bp, Homo sapiens
atggccataagtggagtccctgtgctaggatttttcatcatagctgtgctgatgagcgctcaggaatcatgggctatcaaagaagaacatgtgatcatccaggccgagttctatctgaatcctgaccaatcaggcgagtttatgtttgactttgatggtgatgagattttccatgtggatatggcaaagaaggagacggtctggcggcttgaagaatttggacgatttgccagctttgaggctcaaggtgcattggccaacatagctgtggacaaagccaacctggaaatcatgacaaagcgctccaactatactccgatcaccaatgtacctccagaggtaactgtgctcacgaacagccctgtggaactgagagagcccaacgtcctcatctgtttcatcgacaagttcaccccaccagtggtcaatgtcacgtggcttcgaaatggaaaacctgtcaccacaggagtgtcagagacagtcttcctgcccagggaagaccaccttttccgcaagttccactatctccccttcctgccctcaactgaggacgtttacgactgcagggtggagcactggggcttggatgagcctcttctcaagcactgggagtttgatgctccaagccctctcccagagactacagagaacgtggtgtgtgccctgggcctgactgtgggtctggtgggcatcattattgggaccatcttcatcatcaagggagtgcgcaaaagcaatgcagcagaacgcagggggcctctttaa

SEQ ID NO: 3653 - DNA, 996 bp, Homo sapiens
atggcctcggctctctggactgtccttccgagtaggatgtcactgagatccctcaaatggagcctcctgctgctgtcactcctgagtttctttgtgatgtggtacctcagccttccccactacaatgtgatagaacgcgtgaactggatgtacttctatgagtatgagccgatttacagacaagactttcacttcacacttcgagagcattcaaactgctctcatcaaaatccatttctggtcattctggtgacctcccacccttcagatgtgaaagccaggcaggccattagagttacttggggtgaaaaaaagtcttggtggggatatgaggttcttacatttttcttattaggccaagaggctgaaaaggaagacaaaatgttggcattgtccttagaggatgaacaccttctttatggtgacataatccgacaagattttttagacacatataataacctgaccttgaaaaccattatggcattcaggtgggtaactgagttttgccccaatgccaagtacgtaatgaagacagacactgatgttttcatcaatactggcaatttagtgaagtatcttttaaacctaaaccactcagagaagtttttcacaggttatcctctaattgataattattcctatagaggattttaccaaaaaacccatatttcttaccaggagtatcctttcaaggtgttccctccatactgcagtgggttgggttatataatgtccagagatttggtgccaaggatctatgaaatgatgggtcacgtaaaacccatcaagtttgaagatgtttatgtcgggatctgtttgaatttattaaaagtgaacattcatattccagaagacacaaatcttttctttctatatagaatccatttggatgtctgtcaactgagacgtgtgattgcagcccatggcttttcttccaaggagatcatcactttttggcaggtcatgctaaggaacaccacatgccattattaa

SEQ ID NO: 3654 - DNA, 5703 bp, Homo sapiens; identical to SEQ ID NO: 798

SEQ ID NO: 3655 - DNA, 5758 bp, Homo sapiens
tttctgtactctgggtgactcagagagggaagagattcagccagcacactcctcgcgagcaagcattactctactgactggcagagacaggagaggtagatgtccacgcccacagaccctggtgcgatgccccacccagggccttcgccggggcctgggccttcccctgggccaattcttgggcctagtccaggaccaggaccatccccaggttccgtccacagcatgatggggccaagtcctggacctccaagtgtctcccatcctatgccgacgatggggtccacagacttcccacaggaaggcatgcatcaaatgcataagcccatcgatggtatacatgacaaggggattgtagaagacatccattgtggatccatgaagggcactggtatgcgaccacctcacccaggcatgggccctccccagagtccaatggatcaacacagccaaggttatatgtcaccacacccatctccattaggagccccagagcacgtctccagccctatgtctggaggaggcccaactccacctcagatgccaccaagccagccgggggccctcatcccaggtgatccgcaggccatgagccagcccaacagaggtccctcacctttcagtcctgtccagctgcatcagcttcgagctcagattttagcttataaaatgctggcccgaggccagcccctccccgaaacgctgcagcttgcagtccaggggaaaaggacgttgcctggcttgcagcaacaacagcagcagcaacagcagcagcagcagcagcagcagcagcagcagcagcagcaacagcagccgcagcagcagccgccgcaaccacagacgcagcaacaacagcagccggcccttgttaactacaacagaccatctggcccggggccggagctgagcggcccgagcaccccgcagaagctgccggtgcccgcgcccggcggccggccctcgcccgcgccccccgcagccgcgcagccgcccgcggccgcagtgcccgggccctcagtgccgcagccggccccggggcagccctcgcccgtcctccagctgcagcagaagcagagccgcatcagccccatccagaaaccgcaaggcctggaccccgtggaaattctgcaagagcgggaatacagacttcaggcccgcatagctcataggatacaagaactggaaaatctgcctggctctttgccaccagatttaagaaccaaagcaaccgtggaactaaaagcacttcggttactcaatttccagcgtcagctgagacaggaggtggtggcctgcatgcgcagggacacgaccctggagacggctctcaactccaaagcatacaaacggagcaagcgccagactctgagagaagctcgcatgaccgagaagctggagaagcagcagaagattgagcaggagaggaaacgccgtcagaaacaccaggaatacctgaacagtattttgcaacatgcaaaagattttaaggaatatcatcggtctgtggccggaaagatccagaagctctccaaagcagtggcaacttggcatgccaacactgaaagagagcagaagaaggagacagagcggattgaaaaggagagaatgcggcgactgatggctgaagatgaggagggttatagaaaactgattgatcaaaagaaagacaggcgtttagcttaccttttgcagcagaccgatgagtatgtagccaatctgaccaatctggtttgggagcacaagcaagcccaggcagccaaagagaagaagaagaggaggaggaggaagaagaaggctgaggagaatgcagagggtggggagtctgccctgggaccggatggagagcccatagatgagagcagccagatgagtgacctccctgtcaaagtgactcacacagaaaccggcaaggttctgttcggaccagaagcacccaaagcaagtcagctggacgcctggctggaaatgaatcctggttatgaagttgcccctagatctgacagtgaagagagtgattctgattatgaggaagaggatgaggaagaagagtccagtaggcaggaaaccgaagagaaaatactcctggatccaaatagcgaagaagtttctgagaaggatgctaagcagatcattgagacagctaagcaagacgtggatgatgaatacagcatgcagtacagtgccaggggctcccagtcctactacaccgtggctcatgccatctcggagagggtggagaaacagtctgccctcctaattaatgggaccctaaagcattaccagctccagggcctggaatggatggtttccctgtataataacaacttgaacggaatcttagccgatgaaatggggcttggaaagaccatacagaccattgcactcatcacttatctgatggagcacaaaagactcaatggcccctatctcatcattgttcccctttcgactctatctaactggacatatgaatttgacaaatgggctccttctgtggtgaagatttcttacaagggtactcctgccatgcgtcgctcccttgtcccccagctacggagtggcaaattcaatgtcctcttgactacttatgagtatattataaaagacaagcacattcttgcaaagattcggtggaaatacatgatagtggacgaaggccaccgaatgaagaatcaccactgcaagctgactcaggtcttgaacactcactatgtggcccccagaaggatcctcttgactgggaccccgctgcagaataagctccctgaactctgggccctcctcaacttcctcctcccaacaatttttaagagctgcagcacatttgaacaatggttcaatgctccatttgccatgactggtgaaagggtggacttaaatgaagaagaaactatattgatcatcaggcgtctacataaggtgttaagaccatttttactaaggagactgaagaaagaagttgaatcccagcttcccgaaaaagtggaatatgtgatcaagtgtgacatgtcagctctgcagaagattctgtatcgccatatgcaagccaaggggatccttctcacagatggttctgagaaagataagaaggggaaaggaggtgctaagacacttatgaacactattatgcagttgagaaaaatctgcaaccacccatatatgtttcagcacattgaggaatcctttgctgaacacctaggctattcaaatggggtcatcaatggggctgaactgtatcgggcctcagggaagtttgagctgcttgatcgtattctgccaaaattgagagcgactaatcaccgagtgctgcttttctgccagatgacatctctcatgaccatcatggaggattattttgcttttcggaacttcctttacctacgccttgatggcaccaccaagtctgaagatcgtgctgctttgctgaagaaattcaatgaacctggatcccagtatttcattttcttgctgagcacaagagctggtggcctgggcttaaatcttcaggcagctgatacagtggtcatctttgacagcgactggaatcctcatcaggatctgcaggcccaagaccgagctcaccgcatcgggcagcagaacgaggtccgggtactgaggctctgtaccgtgaacagcgtggaggaaaagatcctcgcggccgcaaaatacaagctgaacgtggatcagaaagtgatccaggcgggcatgtttgaccaaaagtcttcaagccacgagcggagggcattcctgcaggccatcttggagcatgaggaggaaaatgaggaagaagatgaagtaccggacgatgagactctgaaccaaatgattgctcgacgagaagaagaatttgacctttttatgcggatggacatggaccggcggagggaagatgcccggaacccgaaacggaagccccgtttaatggaggaggatgagctgccctcctggatcattaaggatgacgctgaagtagaaaggctcacctgtgaagaagaggaggagaaaatatttgggagggggtcccgccagcgccgtgacgtggactacagtgacgccctcacggagaagcagtggctaagggccatcgaagacggcaatttggaggaaatggaagaggaagtacggcttaagaagcgaaaaagacgaagaaatgtggataaagatcctgcaaaagaagatgtggaaaaagctaagaagagaagaggccgccctcccgctgagaaactgtcaccaaatccccccaaactgacaaagcagatgaacgctatcatcgatactgtgataaactacaaagataggtgtaacgtggagaaggtgcccagtaattctcagttggaaatagaaggaaacagttcagggcgacagctcagtgaagtcttcattcagttaccttcaaggaaagaattaccagaatactatgaattaattaggaagccagtggatttcaaaaaaataaaggaaaggattcgtaatcataagtaccggagcctaggcgacctggagaaggatgtcatgcttctctgtcacaacgctcagacgttcaacctggagggatcccagatctatgaagactccatcgtcttacagtcagtgtttaagagtgcccggcagaaaattgccaaagaggaagagagtgaggatgaaagcaatgaagaggaggaagaggaagatgaagaagagtcagagtccgaggcaaaatcagtcaaggtgaaaattaagctcaataaaaaagatgacaaaggccgggacaaagggaaaggcaagaaaaggccaaatcgaggaaaagccaaacctgtagtgagcgattttgacagcgatgaggagcaggatgaacgtgaacagtcagaaggaagtgggacggatgatgagtgatcagtatggacctttttccttggtagaactgaattccttcctcccctgtctcatttctacccagtgagttcatttgtcatataggcactgggttgtttctatatcatcatcgtctataaactagctttaggatagtgccagacaaacatatgatatcatggtgtaaaaaacacacacatacacaaatatttgtaacatattgtgaccaaatgggcctcaaagattcagattgaaacaaacaaaaagcttttgatggaaaatatgtgggtggatagtatatttctatgggtgggtctaatttggtaacggtttgattgtgcctggttttatcacctgttcagatgagaagatttttgtcttttgtagcactgataaccaggagaagccattaaaagccactggttattttatttttcatcaggcaattttcgaggtttttatttgttcggtattgtttttttacactgtggtacatataagcaactttaataggtgataaatgtacagtagttagatttcacctgcatatacatttttccattttatgctctatgatctgaacaaaagctttttgaattgtataagatttatgtctactgtaaacattgcttaatttttttgctcttgatttaaaaaaaagttttgttgaaagcgctattgaatattgcaatctatatagtgtattggatggcttcttttgtcaccctgatctcctatgttaccaatgtgtatcgtctccttctccctaaagtgtacttaatctttgctttctttgcacaatgtctttggttgcaagtcataagcctgaggcaaataaaattccagtaatttcgaagaatgtggtgttggtgctttcctaataaagaaataatttagcttgacaaaa

SEQ ID NO: 3656 - DNA, 1177 bp, Homo sapiens; identical to SEQ ID NO: 1530

SEQ ID NO: 3657 - DNA, 1574 bp, Homo sapiens
tcaccacggcggcagccctttaaacccctcacccagccagcgccccatcctgtctgtccgaacccagacacaagtcttcactccttcctgcgagccctgaggaagccttgtgagtgcattggctggggcttggagggaagttgggctggagctggacaggagcagtgggtgcatttcaggcaggctctcctgaggtcccaggcgccagctccagctccctggctagggaaacccaccctctcagtcagcatgggggcccaagctccaggcagggtgggctggatcactagcgtcctggatctctctcagactgggcagccccgggctcattgaaatgccccggatgacttggctagtgcagaggaattgatggaaaccaccggggtgagagggaggctccccatctcagccagccacatccacaaggtgtgtgtaagggtgcaggcgccggccggttaggccaaggctctactgtctgttgcccctccaggagaacttccaaggagctttccccagacatggccaacaagggtccttcctatggcatgagccgcgaagtgcagtccaaaatcgagaagaagtatgacgaggagctggaggagcggctggtggagtggatcatagtgcagtgtggccctgatgtgggccgcccagaccgtgggcgcttgggcttccaggtctggctgaagaatggcgtgattctgagcaagctggtgaacagcctgtaccctgatggctccaagccggtgaaggtgcccgagaacccaccctccatggtcttcaagcagatggagcaggtggctcagttcctgaaggcggctgaggactatggggtcatcaagactgacatgttccagactgttgacctctttgaaggcaaagacatggcagcagtgcagaggaccctgatggctttgggcagcttggcagtgaccaagaatgatgggcactaccgtggagatcccaactggtttatgaagaaagcgcaggagcataagagggaattcacagagagccagctgcaggagggaaagcatgtcattggccttcagatgggcagcaacagaggggcctcccaggccggcatgacaggctacggacgacctcggcagatcatcagttagagcggagagggctagccctgagcccggccctcccccagctccttggctgcagccatcccgcttagcctgcctcacccacacccgtgtggtaccttcagccctggccaagctttgaggctctgtcactgagcaatggtaactgcacctgggcagctcctccctgtgcccccagcctcagcccaacttcttacccgaaagcatcactgccttggcccctccctcccggctgcccccatcacctctactgtctcctccctgggctaagcaggggagaagcgggctgggggtagcctggatgtgggccaagtccactgtcctccttggcggcaaaagcccattgaagaagaaccagcccagcctgccccctatcttgtcctggaatatttttggggttggaactcaaaaaaaaaaaaaaaaaatcaatcttttctcaaaaaaaaaaaaaaaaaa

SEQ ID NO: 3658 - DNA, 5748 bp, Homo sapiens; identical to SEQ ID NO: 226

SEQ ID NO: 3659 - DNA, 5619 bp, Homo sapiens
gagaagaaagccagtgcgtctctgggcgcaggggccagtggggctcggaggcacaggcaccccgcgacactccaggttccccgacccacgtccctggcagccccgattatttacagcctcagcagagcacggggcgggggcagaggggcccgcccgggagggctgctacttcttaaaacctctgcgggctgcttagtcacagccccccttgcttgggtgtgtccttcgctcgctccctccctccgtcttaggtcactgttttcaacctcgaataaaaactgcagccaacttccgaggcagcctcattgcccagcggaccccagcctctgccaggttcggtccgccatcctcgtcccgtcctccgccggcccctgccccgcgcccagggatcctccagctcctttcgcccgcgccctccgttcgctccggacaccatggacaagttttggtggcacgcagcctggggactctgcctcgtgccgctgagcctggcgcagatcgatttgaatataacctgccgctttgcaggtgtattccacgtggagaaaaatggtcgctacagcatctctcggacggaggccgctgacctctgcaaggctttcaatagcaccttgcccacaatggcccagatggagaaagctctgagcatcggatttgagacctgcaggtatgggttcatagaagggcacgtggtgattccccggatccaccccaactccatctgtgcagcaaacaacacaggggtgtacatcctcacatccaacacctcccagtatgacacatattgcttcaatgcttcagctccacctgaagaagattgtacatcagtcacagacctgcccaatgcctttgatggaccaattaccataactattgttaaccgtgatggcacccgctatgtccagaaaggagaatacagaacgaatcctgaagacatctaccccagcaaccctactgatgatgacgtgagcagcggctcctccagtgaaaggagcagcacttcaggaggttacatcttttacaccttttctactgtacaccccatcccagacgaagacagtccctggatcaccgacagcacagacagaatccctgctaccagtacgtcttcaaataccatctcagcaggctgggagccaaatgaagaaaatgaagatgaaagagacagacacctcagtttttctggatcaggcattgatgatgatgaagattttatctccagcaccatttcaaccacaccacgggcttttgaccacacaaaacagaaccaggactggacccagtggaacccaagccattcaaatccggaagtgctacttcagacaaccacaaggatgactgatgtagacagaaatggcaccactgcttatgaaggaaactggaacccagaagcacaccctcccctcattcaccatgagcatcatgaggaagaagagaccccacattctacaagcacaatccaggcaactcctagtagtacaacggaagaaacagctacccagaaggaacagtggtttggcaacagatggcatgagggatatcgccaaacacccaaagaagactcccattcgacaacagggacagctgcagcctcagctcataccagccatccaatgcaaggaaggacaacaccaagcccagaggacagttcctggactgatttcttcaacccaatctcacaccccatgggacgaggtcatcaagcaggaagaaggatggatatggactccagtcatagtataacgcttcagcctactgcaaatccaaacacaggtttggtggaagatttggacaggacaggacctctttcaatgacaacgcagcagagtaattctcagagcttctctacatcacatgaaggcttggaagaagataaagaccatccaacaacttctactctgacatcaagcaataggaatgatgtcacaggtggaagaagagacccaaatcattctgaaggctcaactactttactggaaggttatacctctcattacccacacacgaaggaaagcaggaccttcatcccagtgacctcagctaagactgggtcctttggagttactgcagttactgttggagattccaactctaatgtcaatcgttccttatcaggagaccaagacacattccaccccagtggggggtcccataccactcatggatctgaatcagatggacactcacatgggagtcaagaaggtggagcaaacacaacctctggtcctataaggacaccccaaattccagaatggctgatcatcttggcatccctcttggccttggctttgattcttgcagtttgcattgcagtcaacagtcgaagaaggtgtgggcagaagaaaaagctagtgatcaacagtggcaatggagctgtggaggacagaaagccaagtggactcaacggagaggccagcaagtctcaggaaatggtgcatttggtgaacaaggagtcgtcagaaactccagaccagtttatgacagctgatgagacaaggaacctgcagaatgtggacatgaagattggggtgtaacacctacaccattatcttggaaagaaacaaccgttggaaacataaccattacagggagctgggacacttaacagatgcaatgtgctactgattgtttcattgcgaatcttttttagcataaaattttctactctttttgttttttgtgttttgttctttaaagtcaggtccaatttgtaaaaacagcattgctttctgaaattagggcccaattaataatcagcaagaatttgatcgttccagttcccacttggaggcctttcatccctcgggtgtgctatggatggcttctaacaaaaactacacatatgtattcctgatcgccaacctttcccccaccagctaaggacatttcccagggttaatagggcctggtccctgggaggaaatttgaatgggtccattttgcccttccatagcctaatccctgggcattgctttccactgaggttgggggttggggtgtactagttacacatcttcaacagaccccctctagaaatttttcagatgcttctgggagacacccaaagggtgaagctatttatctgtagtaaactatttatctgtgtttttgaaatattaaaccctggatcagtcctttgatcagtataattttttaaagttactttgtcagaggcacaaaagggtttaaactgattcataataaatatctgtacttcttcgatcttcaccttttgtgctgtgattcttcagtttctaaaccagcactgtctgggtccctacaatgtatcaggaagagctgagaatggtaaggagactcttctaagtcttcatctcagagaccctgagttcccactcagacccactcagccaaatctcatggaagaccaaggagggcagcactgtttttgttttttgttttttgttttttttttttgacactgtccaaaggttttccatcctgtcctggaatcagagttggaagctgaggagcttcagcctcttttatggtttaatggccacctgttctctcctgtgaaaggctttgcaaagtcacattaagtttgcatgacctgttatccctggggccctatttcatagaggctggccctattagtgatttccaaaaacaatatggaagtgccttttgatgtcttacaataagagaagaagccaatggaaatgaaagagattggcaaaggggaaggatgatgccatgtagatcctgtttgacatttttatggctgtatttgtaaacttaaacacaccagtgtctgttcttgatgcagttgctatttaggatgagttaagtgcctggggagtccctcaaaaggttaaagggattcccatcattggaatcttatcaccagataggcaagtttatgaccaaacaagagagtactggctttatcctctaacctcatattttctcccacttggcaagtcctttgtggcatttattcatcagtcagggtgtccgattggtcctagaacttccaaaggctgcttgtcatagaagccattgcatctataaagcaacggctcctgttaaatggtatctcctttctgaggctcctactaaaagtcatttgttacctaaacttatgtgcttaacaggcaatgcttctcagaccacaaagcagaaagaagaagaaaagctcctgactaaatcagggctgggcttagacagagttgatctgtagaatatctttaaaggagagatgtcaactttctgcactattcccagcctctgctcctccctgtctaccctctcccctccctctctccctccacttcaccccacaatcttgaaaaacttcctttctcttctgtgaacatcattggccagatccattttcagtggtctggatttctttttattttcttttcaacttgaaagaaactggacattaggccactatgtgttgttactgccactagtgttcaagtgcctcttgttttcccagagatttcctgggtctgccagaggcccagacaggctcactcaagctctttaactgaaaagcaacaagccactccaggacaaggttcaaaatggttacaacagcctctacctgtcgccccagggagaaaggggtagtgatacaagtctcatagccagagatggttttccactccttctagatattcccaaaaagaggctgagacaggaggttattttcaattttattttggaattaaatacttttttccctttattactgttgtagtccctcacttggatatacctctgttttcacgatagaaataagggaggtctagagcttctattccttggccattgtcaacggagagctggccaagtcttcacaaacccttgcaacattgcctgaagtttatggaataagatgtattctcactcccttgatctcaagggcgtaactctggaagcacagcttgactacacgtcatttttaccaatgattttcaggtgacctgggctaagtcatttaaactgggtctttataaaagtaaaaggccaacatttaattattttgcaaagcaacctaagagctaaagatgtaatttttcttgcaattgtaaatcttttgtgtctcctgaagacttcccttaaaattagctctgagtgaaaaatcaaaagagacaaaagacatcttcgaatccatatttcaagcctggtagaattggcttttctagcagaacctttccaaaagttttatattgagattcataacaacaccaagaattgattttgtagccaacattcattcaatactgttatatcagaggagtaggagagaggaaacatttgacttatctggaaaagcaaaatgtacttaagaataagaataacatggtccattcacctttatgttatagatatgtctttgtgtaaatcatttgttttgagttttcaaagaatagcccattgttcattcttgtgctgtacaatgaccactgttattgttactttgacttttcagagcacacccttcctctggtttttgtatatttattgatggatcaataataatgaggaaagcatgatatgtatattgctgagttgaaagcacttattggaaaatattaaaaggctaacattaaaagactaaaggaaacagaaaaaaaaaaaaaaaaa

SEQ ID NO: 3660 - DNA, 5001 bp, Homo sapiens
gagaagaaagccagtgcgtctctgggcgcaggggccagtggggctcggaggcacaggcaccccgcgacactccaggttccccgacccacgtccctggcagccccgattatttacagcctcagcagagcacggggcgggggcagaggggcccgcccgggagggctgctacttcttaaaacctctgcgggctgcttagtcacagccccccttgcttgggtgtgtccttcgctcgctccctccctccgtcttaggtcactgttttcaacctcgaataaaaactgcagccaacttccgaggcagcctcattgcccagcggaccccagcctctgccaggttcggtccgccatcctcgtcccgtcctccgccggcccctgccccgcgcccagggatcctccagctcctttcgcccgcgccctccgttcgctccggacaccatggacaagttttggtggcacgcagcctggggactctgcctcgtgccgctgagcctggcgcagatcgatttgaatataacctgccgctttgcaggtgtattccacgtggagaaaaatggtcgctacagcatctctcggacggaggccgctgacctctgcaaggctttcaatagcaccttgcccacaatggcccagatggagaaagctctgagcatcggatttgagacctgcaggtatgggttcatagaagggcacgtggtgattccccggatccaccccaactccatctgtgcagcaaacaacacaggggtgtacatcctcacatccaacacctcccagtatgacacatattgcttcaatgcttcagctccacctgaagaagattgtacatcagtcacagacctgcccaatgcctttgatggaccaattaccataactattgttaaccgtgatggcacccgctatgtccagaaaggagaatacagaacgaatcctgaagacatctaccccagcaaccctactgatgatgacgtgagcagcggctcctccagtgaaaggagcagcacttcaggaggttacatcttttacaccttttctactgtacaccccatcccagacgaagacagtccctggatcaccgacagcacagacagaatccctgctaccaatatggactccagtcatagtataacgcttcagcctactgcaaatccaaacacaggtttggtggaagatttggacaggacaggacctctttcaatgacaacgcagcagagtaattctcagagcttctctacatcacatgaaggcttggaagaagataaagaccatccaacaacttctactctgacatcaagcaataggaatgatgtcacaggtggaagaagagacccaaatcattctgaaggctcaactactttactggaaggttatacctctcattacccacacacgaaggaaagcaggaccttcatcccagtgacctcagctaagactgggtcctttggagttactgcagttactgttggagattccaactctaatgtcaatcgttccttatcaggagaccaagacacattccaccccagtggggggtcccataccactcatggatctgaatcagatggacactcacatgggagtcaagaaggtggagcaaacacaacctctggtcctataaggacaccccaaattccagaatggctgatcatcttggcatccctcttggccttggctttgattcttgcagtttgcattgcagtcaacagtcgaagaaggtgtgggcagaagaaaaagctagtgatcaacagtggcaatggagctgtggaggacagaaagccaagtggactcaacggagaggccagcaagtctcaggaaatggtgcatttggtgaacaaggagtcgtcagaaactccagaccagtttatgacagctgatgagacaaggaacctgcagaatgtggacatgaagattggggtgtaacacctacaccattatcttggaaagaaacaaccgttggaaacataaccattacagggagctgggacacttaacagatgcaatgtgctactgattgtttcattgcgaatcttttttagcataaaattttctactctttttgttttttgtgttttgttctttaaagtcaggtccaatttgtaaaaacagcattgctttctgaaattagggcccaattaataatcagcaagaatttgatcgttccagttcccacttggaggcctttcatccctcgggtgtgctatggatggcttctaacaaaaactacacatatgtattcctgatcgccaacctttcccccaccagctaaggacatttcccagggttaatagggcctggtccctgggaggaaatttgaatgggtccattttgcccttccatagcctaatccctgggcattgctttccactgaggttgggggttggggtgtactagttacacatcttcaacagaccccctctagaaatttttcagatgcttctgggagacacccaaagggtgaagctatttatctgtagtaaactatttatctgtgtttttgaaatattaaaccctggatcagtcctttgatcagtataattttttaaagttactttgtcagaggcacaaaagggtttaaactgattcataataaatatctgtacttcttcgatcttcaccttttgtgctgtgattcttcagtttctaaaccagcactgtctgggtccctacaatgtatcaggaagagctgagaatggtaaggagactcttctaagtcttcatctcagagaccctgagttcccactcagacccactcagccaaatctcatggaagaccaaggagggcagcactgtttttgttttttgttttttgttttttttttttgacactgtccaaaggttttccatcctgtcctggaatcagagttggaagctgaggagcttcagcctcttttatggtttaatggccacctgttctctcctgtgaaaggctttgcaaagtcacattaagtttgcatgacctgttatccctggggccctatttcatagaggctggccctattagtgatttccaaaaacaatatggaagtgccttttgatgtcttacaataagagaagaagccaatggaaatgaaagagattggcaaaggggaaggatgatgccatgtagatcctgtttgacatttttatggctgtatttgtaaacttaaacacaccagtgtctgttcttgatgcagttgctatttaggatgagttaagtgcctggggagtccctcaaaaggttaaagggattcccatcattggaatcttatcaccagataggcaagtttatgaccaaacaagagagtactggctttatcctctaacctcatattttctcccacttggcaagtcctttgtggcatttattcatcagtcagggtgtccgattggtcctagaacttccaaaggctgcttgtcatagaagccattgcatctataaagcaacggctcctgttaaatggtatctcctttctgaggctcctactaaaagtcatttgttacctaaacttatgtgcttaacaggcaatgcttctcagaccacaaagcagaaagaagaagaaaagctcctgactaaatcagggctgggcttagacagagttgatctgtagaatatctttaaaggagagatgtcaactttctgcactattcccagcctctgctcctccctgtctaccctctcccctccctctctccctccacttcaccccacaatcttgaaaaacttcctttctcttctgtgaacatcattggccagatccattttcagtggtctggatttctttttattttcttttcaacttgaaagaaactggacattaggccactatgtgttgttactgccactagtgttcaagtgcctcttgttttcccagagatttcctgggtctgccagaggcccagacaggctcactcaagctctttaactgaaaagcaacaagccactccaggacaaggttcaaaatggttacaacagcctctacctgtcgccccagggagaaaggggtagtgatacaagtctcatagccagagatggttttccactccttctagatattcccaaaaagaggctgagacaggaggttattttcaattttattttggaattaaatacttttttccctttattactgttgtagtccctcacttggatatacctctgttttcacgatagaaataagggaggtctagagcttctattccttggccattgtcaacggagagctggccaagtcttcacaaacccttgcaacattgcctgaagtttatggaataagatgtattctcactcccttgatctcaagggcgtaactctggaagcacagcttgactacacgtcatttttaccaatgattttcaggtgacctgggctaagtcatttaaactgggtctttataaaagtaaaaggccaacatttaattattttgcaaagcaacctaagagctaaagatgtaatttttcttgcaattgtaaatcttttgtgtctcctgaagacttcccttaaaattagctctgagtgaaaaatcaaaagagacaaaagacatcttcgaatccatatttcaagcctggtagaattggcttttctagcagaacctttccaaaagttttatattgagattcataacaacaccaagaattgattttgtagccaacattcattcaatactgttatatcagaggagtaggagagaggaaacatttgacttatctggaaaagcaaaatgtacttaagaataagaataacatggtccattcacctttatgttatagatatgtctttgtgtaaatcatttgttttgagttttcaaagaatagcccattgttcattcttgtgctgtacaatgaccactgttattgttactttgacttttcagagcacacccttcctctggtttttgtatatttattgatggatcaataataatgaggaaagcatgatatgtatattgctgagttgaaagcacttattggaaaatattaaaaggctaacattaaaagactaaaggaaacagaaaaaaaaaaaaaaaaa

SEQ ID NO: 3661 - DNA, 4605 bp, Homo sapiens
gagaagaaagccagtgcgtctctgggcgcaggggccagtggggctcggaggcacaggcaccccgcgacactccaggttccccgacccacgtccctggcagccccgattatttacagcctcagcagagcacggggcgggggcagaggggcccgcccgggagggctgctacttcttaaaacctctgcgggctgcttagtcacagccccccttgcttgggtgtgtccttcgctcgctccctccctccgtcttaggtcactgttttcaacctcgaataaaaactgcagccaacttccgaggcagcctcattgcccagcggaccccagcctctgccaggttcggtccgccatcctcgtcccgtcctccgccggcccctgccccgcgcccagggatcctccagctcctttcgcccgcgccctccgttcgctccggacaccatggacaagttttggtggcacgcagcctggggactctgcctcgtgccgctgagcctggcgcagatcgatttgaatataacctgccgctttgcaggtgtattccacgtggagaaaaatggtcgctacagcatctctcggacggaggccgctgacctctgcaaggctttcaatagcaccttgcccacaatggcccagatggagaaagctctgagcatcggatttgagacctgcaggtatgggttcatagaagggcacgtggtgattccccggatccaccccaactccatctgtgcagcaaacaacacaggggtgtacatcctcacatccaacacctcccagtatgacacatattgcttcaatgcttcagctccacctgaagaagattgtacatcagtcacagacctgcccaatgcctttgatggaccaattaccataactattgttaaccgtgatggcacccgctatgtccagaaaggagaatacagaacgaatcctgaagacatctaccccagcaaccctactgatgatgacgtgagcagcggctcctccagtgaaaggagcagcacttcaggaggttacatcttttacaccttttctactgtacaccccatcccagacgaagacagtccctggatcaccgacagcacagacagaatccctgctaccagagaccaagacacattccaccccagtggggggtcccataccactcatggatctgaatcagatggacactcacatgggagtcaagaaggtggagcaaacacaacctctggtcctataaggacaccccaaattccagaatggctgatcatcttggcatccctcttggccttggctttgattcttgcagtttgcattgcagtcaacagtcgaagaaggtgtgggcagaagaaaaagctagtgatcaacagtggcaatggagctgtggaggacagaaagccaagtggactcaacggagaggccagcaagtctcaggaaatggtgcatttggtgaacaaggagtcgtcagaaactccagaccagtttatgacagctgatgagacaaggaacctgcagaatgtggacatgaagattggggtgtaacacctacaccattatcttggaaagaaacaaccgttggaaacataaccattacagggagctgggacacttaacagatgcaatgtgctactgattgtttcattgcgaatcttttttagcataaaattttctactctttttgttttttgtgttttgttctttaaagtcaggtccaatttgtaaaaacagcattgctttctgaaattagggcccaattaataatcagcaagaatttgatcgttccagttcccacttggaggcctttcatccctcgggtgtgctatggatggcttctaacaaaaactacacatatgtattcctgatcgccaacctttcccccaccagctaaggacatttcccagggttaatagggcctggtccctgggaggaaatttgaatgggtccattttgcccttccatagcctaatccctgggcattgctttccactgaggttgggggttggggtgtactagttacacatcttcaacagaccccctctagaaatttttcagatgcttctgggagacacccaaagggtgaagctatttatctgtagtaaactatttatctgtgtttttgaaatattaaaccctggatcagtcctttgatcagtataattttttaaagttactttgtcagaggcacaaaagggtttaaactgattcataataaatatctgtacttcttcgatcttcaccttttgtgctgtgattcttcagtttctaaaccagcactgtctgggtccctacaatgtatcaggaagagctgagaatggtaaggagactcttctaagtcttcatctcagagaccctgagttcccactcagacccactcagccaaatctcatggaagaccaaggagggcagcactgtttttgttttttgttttttgttttttttttttgacactgtccaaaggttttccatcctgtcctggaatcagagttggaagctgaggagcttcagcctcttttatggtttaatggccacctgttctctcctgtgaaaggctttgcaaagtcacattaagtttgcatgacctgttatccctggggccctatttcatagaggctggccctattagtgatttccaaaaacaatatggaagtgccttttgatgtcttacaataagagaagaagccaatggaaatgaaagagattggcaaaggggaaggatgatgccatgtagatcctgtttgacatttttatggctgtatttgtaaacttaaacacaccagtgtctgttcttgatgcagttgctatttaggatgagttaagtgcctggggagtccctcaaaaggttaaagggattcccatcattggaatcttatcaccagataggcaagtttatgaccaaacaagagagtactggctttatcctctaacctcatattttctcccacttggcaagtcctttgtggcatttattcatcagtcagggtgtccgattggtcctagaacttccaaaggctgcttgtcatagaagccattgcatctataaagcaacggctcctgttaaatggtatctcctttctgaggctcctactaaaagtcatttgttacctaaacttatgtgcttaacaggcaatgcttctcagaccacaaagcagaaagaagaagaaaagctcctgactaaatcagggctgggcttagacagagttgatctgtagaatatctttaaaggagagatgtcaactttctgcactattcccagcctctgctcctccctgtctaccctctcccctccctctctccctccacttcaccccacaatcttgaaaaacttcctttctcttctgtgaacatcattggccagatccattttcagtggtctggatttctttttattttcttttcaacttgaaagaaactggacattaggccactatgtgttgttactgccactagtgttcaagtgcctcttgttttcccagagatttcctgggtctgccagaggcccagacaggctcactcaagctctttaactgaaaagcaacaagccactccaggacaaggttcaaaatggttacaacagcctctacctgtcgccccagggagaaaggggtagtgatacaagtctcatagccagagatggttttccactccttctagatattcccaaaaagaggctgagacaggaggttattttcaattttattttggaattaaatacttttttccctttattactgttgtagtccctcacttggatatacctctgttttcacgatagaaataagggaggtctagagcttctattccttggccattgtcaacggagagctggccaagtcttcacaaacccttgcaacattgcctgaagtttatggaataagatgtattctcactcccttgatctcaagggcgtaactctggaagcacagcttgactacacgtcatttttaccaatgattttcaggtgacctgggctaagtcatttaaactgggtctttataaaagtaaaaggccaacatttaattattttgcaaagcaacctaagagctaaagatgtaatttttcttgcaattgtaaatcttttgtgtctcctgaagacttcccttaaaattagctctgagtgaaaaatcaaaagagacaaaagacatcttcgaatccatatttcaagcctggtagaattggcttttctagcagaacctttccaaaagttttatattgagattcataacaacaccaagaattgattttgtagccaacattcattcaatactgttatatcagaggagtaggagagaggaaacatttgacttatctggaaaagcaaaatgtacttaagaataagaataacatggtccattcacctttatgttatagatatgtctttgtgtaaatcatttgttttgagttttcaaagaatagcccattgttcattcttgtgctgtacaatgaccactgttattgttactttgacttttcagagcacacccttcctctggtttttgtatatttattgatggatcaataataatgaggaaagcatgatatgtatattgctgagttgaaagcacttattggaaaatattaaaaggctaacattaaaagactaaaggaaacagaaaaaaaaaaaaaaaaa

SEQ ID NO: 3662 - DNA, 3985 bp, Homo sapiens
gagaagaaagccagtgcgtctctgggcgcaggggccagtggggctcggaggcacaggcaccccgcgacactccaggttccccgacccacgtccctggcagccccgattatttacagcctcagcagagcacggggcgggggcagaggggcccgcccgggagggctgctacttcttaaaacctctgcgggctgcttagtcacagccccccttgcttgggtgtgtccttcgctcgctccctccctccgtcttaggtcactgttttcaacctcgaataaaaactgcagccaacttccgaggcagcctcattgcccagcggaccccagcctctgccaggttcggtccgccatcctcgtcccgtcctccgccggcccctgccccgcgcccagggatcctccagctcctttcgcccgcgccctccgttcgctccggacaccatggacaagttttggtggcacgcagcctggggactctgcctcgtgccgctgagcctggcgcagatcgatttgaatataacctgccgctttgcaggtgtattccacgtggagaaaaatggtcgctacagcatctctcggacggaggccgctgacctctgcaaggctttcaatagcaccttgcccacaatggcccagatggagaaagctctgagcatcggatttgagacctgcagtttgcattgcagtcaacagtcgaagaaggtgtgggcagaagaaaaagctagtgatcaacagtggcaatggagctgtggaggacagaaagccaagtggactcaacggagaggccagcaagtctcaggaaatggtgcatttggtgaacaaggagtcgtcagaaactccagaccagtttatgacagctgatgagacaaggaacctgcagaatgtggacatgaagattggggtgtaacacctacaccattatcttggaaagaaacaaccgttggaaacataaccattacagggagctgggacacttaacagatgcaatgtgctactgattgtttcattgcgaatcttttttagcataaaattttctactctttttgttttttgtgttttgttctttaaagtcaggtccaatttgtaaaaacagcattgctttctgaaattagggcccaattaataatcagcaagaatttgatcgttccagttcccacttggaggcctttcatccctcgggtgtgctatggatggcttctaacaaaaactacacatatgtattcctgatcgccaacctttcccccaccagctaaggacatttcccagggttaatagggcctggtccctgggaggaaatttgaatgggtccattttgcccttccatagcctaatccctgggcattgctttccactgaggttgggggttggggtgtactagttacacatcttcaacagaccccctctagaaatttttcagatgcttctgggagacacccaaagggtgaagctatttatctgtagtaaactatttatctgtgtttttgaaatattaaaccctggatcagtcctttgatcagtataattttttaaagttactttgtcagaggcacaaaagggtttaaactgattcataataaatatctgtacttcttcgatcttcaccttttgtgctgtgattcttcagtttctaaaccagcactgtctgggtccctacaatgtatcaggaagagctgagaatggtaaggagactcttctaagtcttcatctcagagaccctgagttcccactcagacccactcagccaaatctcatggaagaccaaggagggcagcactgtttttgttttttgttttttgttttttttttttgacactgtccaaaggttttccatcctgtcctggaatcagagttggaagctgaggagcttcagcctcttttatggtttaatggccacctgttctctcctgtgaaaggctttgcaaagtcacattaagtttgcatgacctgttatccctggggccctatttcatagaggctggccctattagtgatttccaaaaacaatatggaagtgccttttgatgtcttacaataagagaagaagccaatggaaatgaaagagattggcaaaggggaaggatgatgccatgtagatcctgtttgacatttttatggctgtatttgtaaacttaaacacaccagtgtctgttcttgatgcagttgctatttaggatgagttaagtgcctggggagtccctcaaaaggttaaagggattcccatcattggaatcttatcaccagataggcaagtttatgaccaaacaagagagtactggctttatcctctaacctcatattttctcccacttggcaagtcctttgtggcatttattcatcagtcagggtgtccgattggtcctagaacttccaaaggctgcttgtcatagaagccattgcatctataaagcaacggctcctgttaaatggtatctcctttctgaggctcctactaaaagtcatttgttacctaaacttatgtgcttaacaggcaatgcttctcagaccacaaagcagaaagaagaagaaaagctcctgactaaatcagggctgggcttagacagagttgatctgtagaatatctttaaaggagagatgtcaactttctgcactattcccagcctctgctcctccctgtctaccctctcccctccctctctccctccacttcaccccacaatcttgaaaaacttcctttctcttctgtgaacatcattggccagatccattttcagtggtctggatttctttttattttcttttcaacttgaaagaaactggacattaggccactatgtgttgttactgccactagtgttcaagtgcctcttgttttcccagagatttcctgggtctgccagaggcccagacaggctcactcaagctctttaactgaaaagcaacaagccactccaggacaaggttcaaaatggttacaacagcctctacctgtcgccccagggagaaaggggtagtgatacaagtctcatagccagagatggttttccactccttctagatattcccaaaaagaggctgagacaggaggttattttcaattttattttggaattaaatacttttttccctttattactgttgtagtccctcacttggatatacctctgttttcacgatagaaataagggaggtctagagcttctattccttggccattgtcaacggagagctggccaagtcttcacaaacccttgcaacattgcctgaagtttatggaataagatgtattctcactcccttgatctcaagggcgtaactctggaagcacagcttgactacacgtcatttttaccaatgattttcaggtgacctgggctaagtcatttaaactgggtctttataaaagtaaaaggccaacatttaattattttgcaaagcaacctaagagctaaagatgtaatttttcttgcaattgtaaatcttttgtgtctcctgaagacttcccttaaaattagctctgagtgaaaaatcaaaagagacaaaagacatcttcgaatccatatttcaagcctggtagaattggcttttctagcagaacctttccaaaagttttatattgagattcataacaacaccaagaattgattttgtagccaacattcattcaatactgttatatcagaggagtaggagagaggaaacatttgacttatctggaaaagcaaaatgtacttaagaataagaataacatggtccattcacctttatgttatagatatgtctttgtgtaaatcatttgttttgagttttcaaagaatagcccattgttcattcttgtgctgtacaatgaccactgttattgttactttgacttttcagagcacacccttcctctggtttttgtatatttattgatggatcaataataatgaggaaagcatgatatgtatattgctgagttgaaagcacttattggaaaatattaaaaggctaacattaaaagactaaaggaaacagaaaaaaaaaaaaaaaaa

SEQ ID NO: 3663 - DNA, 6796 bp, Homo sapiens
ggccaaaggtcaagatacttctctgggaaatgttgctgctgatgctgctttacaaagtcatacaatgagtgtttggtttaagaaagattttcatacttaaaagattttcatcttggaaatacatcaagtgaaaattaaattcttttgggaaacattttccttctgatatattatacttgtaatgggcgacatggcaaacaactcagttgcttacagtggtgtgaaaaactctttgaaggaagctaatcatgatggagactttggaattacgctcgcagagctgcgggctctcatggagctcaggtccacagatgcattacgaaaaatacaggaaagctatggagatgtctatggaatttgcaccaaattgaaaacatctcccaatgaaggtttaagtggaaaccctgcagatttagaaagaagagaagcagtgtttggaaagaattttatacctcctaaaaagccaaaaacctttcttcaattagtatgggaagcattacaagatgtcactttaattatattagaaattgcagccatagtatcattgggcctttctttttatcagcctccagaaggggataatgcactttgtggagaagtttctgttggggaggaagaaggtgaaggtgaaactggttggattgaaggagctgcaatcctcttgtctgtagtgtgtgtggtgttagtaacagctttcaatgactggagtaaggaaaaacagtttagaggtttgcagagccgaattgaacaagaacagaagttcactgtcatcaggggtggtcaggtcattcagatacctgtagctgacattactgttggagatattgctcaagtgaaatatggtgatcttcttccagctgacggcatacttattcaaggcaacgatcttaaaattgatgaaagctcattgactggtgaatcagatcatgttaaaaagtctttagataaggatcccttacttctatcaggtactcatgtaatggaaggctctggaagaatggtagttacagctgtaggtgtaaattctcaaactggaattatctttaccttacttggagctggaggtgaagaggaagagaagaaagatgagaagaaaaaggaaaagaaaaataagaaacaagatggagctattgagaatcgcaacaaagcaaaagcccaggatggtgcagccatggaaatgcagccattgaagagtgaagaaggtggagatggtgatgaaaaagataaaaagaaagcaaatttgccaaaaaaggaaaaatctgttttacaagggaaacttacaaaactggctgttcagattggcaaagcaggtctgttgatgtctgccatcacagttatcattctagtattatattttgtcattgacaccttctgggttcagaaaagaccatggcttgctgagtgcacaccaatttatatacaatactttgtgaagttcttcattattggagttacagttttagtggtcgcagtgccagaaggtcttccacttgcagtcacgatctcactggcttattcagtcaaaaaaatgatgaaagataataacttagtaaggcatctggatgcttgtgaaaccatgggaaatgctacagctatttgttcagataaaacaggaactttgacaatgaacagaatgacagtcgttcaagcttacataaatgaaaaacattataaaaaggttcctgaaccagaagctattccaccaaatattttgtcctatcttgtaacaggaatttctgtgaattgtgcttatacatcaaaaatattgccaccagagaaagagggtggattacctcgtcacgttggtaataaaactgaatgtgccttgttgggacttcttttggatttaaaacgggattatcaggatgttagaaatgaaataccagaagaagcactgtacaaagtctacaccttcaattctgttaggaagtccatgagtactgtcctgaaaaattcagatggaagttatcgaatattcagcaagggtgcatctgagataattctgaaaaagtgtttcaaaatcttgagtgctaatggtgaggcaaaagtattcagaccaagggaccgtgatgatattgtaaaaactgtgattgaaccgatggcatcagaaggcttgagaaccatatgtcttgcattcagagattttccagcaggagaaccagaaccagagtgggataatgaaaatgatattgtcaccggccttacatgcattgctgttgtggggattgaagatcctgtgagacctgaggtgccagatgcaattaaaaagtgtcagagggctggaattactgtgcggatggtcactggtgataatattaatactgctcgggccattgctaccaaatgtggtattttacatcctggggaagattttctgtgcctagaaggtaaagattttaacagaagaatacgaaatgaaaaaggagagattgagcaagagaggatagacaagatttggccaaaacttcgagtacttgcaagatcatctcctactgataagcatacactggttaaaggtataattgacagcactgtctcagaccaacgccaggttgtagctgtaactggtgatggtacaaatgatggcccagcactaaagaaagcagatgttggatttgcaatgggtattgctggaactgatgtagctaaagaagcatccgatattattctcacagatgacaactttacaagcattgttaaagcagttatgtggggacgaaatgtctatgacagcatctcaaaattccttcagttccaacttactgttaatgtagtagcagtgattgttgcttttacgggcgcctgcattactcaagactcaccgcttaaggctgtgcagatgctgtgggtaaacctcataatggatacactcgcttccctggctctggcaacggaaccacccactgagtctctcttgcttcggaaaccttatggtagaaataagcctctcatctcacgtacaatgatgaagaatattttgggtcatgcattctatcaacttgtagtagtctttacactcttatttgctggagaaaagttttttgacattgatagtggaagaaatgctcctttgcatgctcctccttcagaacattatactattgtttttaatacctttgtgctgatgcaacttttcaacgaaataaatgcccggaaaattcatggtgaaagaaatgtattcgaaggaatctttaacaatgccatcttctgcacaattgttttaggcacttttgtggtacagataataattgtgcagtttggtggaaaacctttcagttgttcagaactttcaatagaacagtggctatggtcaatattcctaggaatgggaacattactctggggccagcttatttcaacaattccaactagccgtttaaaattcctcaaagaagctggtcatggaacacaaaaggaagaaatacctgaggaggaattagcagaggatgttgaagagattgatcacgctgaaagggagttgcggcgtggccaaatcttgtggtttagaggtctgaacagaatccaaacacagattcgagtggtgaatgcatttcgtagttctttatatgaagggttagaaaaaccggaatcaagaagttcgattcacaactttatgacacatcctgagtttaggatagaagattcagagcctcatatcccccttattgatgacactgatgccgaagatgatgctcctacaaaacgtaactccagtcctccaccctctcccaacaaaaataacaatgctgttgacagtggaattcaccttacaatagaaatgaacaagtctgctacctcttcatccccaggaagcccactacatagtttggaaacatcactctgattgtaagctgaatgttaacacactagctgcattgtaaagaaacaaattgaaactgggtcttttcacatattgtgatggacaagctagtattcttgtctttggacttcaacagaagacacacttgtacgaatgtagatttatttttttaaaaaaaaaaaagcaaagctttctgccagactgagggtgctttttggggggtgggagaaatgaactgacagataaacagtaactcagcgtaagtgacctgtggatcatcagtagtacccaagcatggtcctgaacagtgtattagcagagctttagtttatctcagtcctggatgggagagagagggaggagtaaaactgggcaagacaaagagccctggatcgttgaattgatagtttaatttctgctgttggctgttaataatttggattatttatgtttataaatgatacagatctgtttacaaggtttgtagatactttttttgttcctgttcatagatgggaagcttccttataactgatgcagagaaaaattagtccttcaaatactgctgtattttcaggaaaaaaaaaaaaaggggtgtttctattgaaactgtactaaatttttgcctacaatttaccttgttaaatattgtagataaattgctaatactaatagccaaatagataacactaatgctttgtttaaaaaaacgaaaaaaacaaaacaaaacaaaaaaacatgagcagtggtgttctaatgaagttatgacatctgtcctaattagtttcttaaatacatttactacttaatggttttgaagcaactgtttaatttttaaaatttttgaaaacttgctaataaccttttgttcagaatttagtagattgtttaatgcaggacatcaactacataatgaaagatgcttgaaatgcttttgttatttcaggcaaatcaaattaaatcagactatcaaactacaagagaaccttagtcttttttgtttttgtctaaacatgttagtttagtgatgtcttggtgaactgtgagtgaactgtattgatttttctaatctttagagaccttcacacagcatgagggctgttggcattttgaaaaaggttaataagtagaagcatacatgttttccttttgtttttgaaacttgtttgtaaacataaataaatatgcccttttattaaataaattcatggcaatgtttttttaaaagacatttcagcttctttactcagttctgcatatacagtgcatcagtctgttctctttgaccacaattggaatacatttcaagatggtaacagccccatgaagtaccgctttaattccttgctggtaatctaatagaatcagattaagaaaattaacacaattttaccatttgacatactcttcattgaatttagtttgtctaaaatagtctcacaggtaaaaaacataacaacaatgaccaccattgtctttgatacatttattttaattcttaagtggccaaataacagattaggtaaaatgagattacatgaaaaggttctaaaatgatatatttagatgcaataattaaccatatgctagaatgcccacctctaagccaattggattctttagctctctttttctttccttcatctaccttcttctcttttttgcctctgtctttaccctttagaaactggcatgtgttagggcccagatttcaccagatacacaatcctcaggctgacataaagtttacgaggactgctactataactgagagtgctgaccaagcaaagaaacatttagttgatggtgcttgatatttttggtgggtgggggaaatctttttctcaccatcaaatctttgcagtaatcctctgcaggtcttagaaacacattggctctgtcagcatttgtaattgtacatttattcatcaggtatttatagtgaatcatactgtaaaaaagaggtagcatgatatgctggaaagcatattagactaggagtcaagacctggtttctagtcttggttttgccattaatgtgctgcatgatcttgggaaaatcatttaccctaaataagggtggtggactatcttgaagaaccctttcaactctaaaaattgaccctatcaactggagagcccacaaggcatagggaatagagaaaagggaaatgttttcagttttcttttttattttggttatgcttaaatatgaatgtaattaccaaaagatttagaagtgcatgtgctttggaggatttgtattgagcttttacagtattcatttttcaactcaaggcaatggctttctacaccaactctaatccataaacgggtcttatgacatctatgaagtagtagcaagacatgcttagtgtgtatttctctctttgagacactgtaatttctaccagaaatttccagagcattatgtaggtagaaaaaaatgcaagcaagctgttaaagatcttggatcccattatatagtatgtatagctgaaatctgtaattcaatcactttttctcttttatcctctaaccaaaaaattgtttaattttgcatcccaaatgtttttaatctttgtatattttttaaaaatccttttctcctcatcattgccttttttgtggttgtaaatagacttacttgcactttgaagatgagttactccttgtcatcttacaaatatgtgatatggtaattttcataacagatgtcagttttgaaccaagaattggtgatttgtttataagaaaaaaactggcttcatttctgtgaaattgctctttgaaaatttctttttacacgtgtaagccaactgagataccgtgatggtgttgatttctttcaatgatgcttaccatctattttagccactgagccttttattatttgtctatttgtaaagtttatttgtcttaactcatttaataaatatactgtttatctgtttctgaaaaaaaaaaaaaaaaaaa

SEQ ID NO: 3664 - DNA, 6950 bp, Homo sapiens; identical to SEQ ID NO: 153

SEQ ID NO: 3665 - DNA, 1798 bp, Homo sapiens
ggaaagcgcatgcgcgtcgggcacagcgcgtgcagcctcgtgcagctcttctggtctccggcgcccgcccctcagacgtaatgttgaattaaagaaaatactttatcagaagaagatggccactgcccagttgcagaggactcccatgagtgcactggtatttcccaataagatatcaactgaacaccagtctttggtgttagtgaagaggcttctagcagtttcagtatcctgtatcacgtatttgaggggaatattcccagaatgcgcttatggaacaagatatctagatgatctttgtgtcaaaatactgagagaagataaaaattgcccaggatctacacagttagtgaaatggatgctaggatgttatgatgctttacagaaaaaatatgtatacacaaacccagaagatcctcagacaatttcagaatgttaccaattcaaattcaaatacaccaataatggaccactcatggacttcataagtaaaaaccaaagcaacgaatctagcatgttgtctactgacaccaagaaagcaagcattctcctcattcgcaagatttatatcctaatgcaaaatctggggcctttacctaatgatgtttgtttgaccatgaaacttttttactatgatgaagttacacccccagattaccagcctcccggttttaaggatggtgattgtgaaggagttatatttgaaggggaacctatgtatttaaatgtgggagaagtctcaacaccttttcacatcttcaaagtaaaagtgaccactgagagagaacgaatggaaaatattgactcaactatactatcaccaaaacaaataaaaacaccatttcaaaaaatcctgagggacaaagatgtagaagatgaacaggagcattatacaagtgatgatttggacattgaaactaaaatggaagaacaggaaaaaaaccctgcatcttctgaacttgaagaaccaagtttagtttgtgaggaagatgaaattatgaggtctaaagaaagtccagatctttctatttctcattctcaggttgagcagttagtcaataaaacatctgaacttgatatgtctgaaagcaaaacaagaagtggaaaagtctttcagaataaaatggcaaatggaaatcaaccagtaaaatcttccaaagaaaatcggaagagaagtcaacatgaatctgggagaatagtcctccatcactttgattcttctagtcaagagtcagtgccaaaaaggagaaagtttagtgaaccaaaggaacatatataaaaattatttttgttctgcaggcttgcagagttcttctcaccatttaaactgaaggaccctatattatatttccctaactctgaagatgtatatgtagtttaaagcagtttgtacactaaaactaagtttttggctgactgtcatattgtggtccttaatcttgagataaatccaatagaacttttgaataaaagcaaaagtacaaatgtcataattgattcggtaataagtaaaatttcaaaattgattttgttcattacctacttaatatttcctttaaatatatactaactgttaaggccctctaatgccatttttctaaacagtaatgtttactttggtattaaaatttggtatggattcactttttacttatgttaaaattataccatttaactggctcttttgtcattgtgctgttattaaaacaatgttcttcaatattttgacataatgtattaacattttaatatataatgtacaatttaaaaaaaaaaaaaaaaaaaaaaaaaaaaaaaa

SEQ ID NO: 3666 - DNA, 1251 bp, Homo sapiens
cctcactcccgagctctactgactcccaaaagagcgcccaagaagaaaatggccataagtggagtccctgtgctaggatttttcatcatagctgtgctgatgagcgctcaggaatcatgggctatcaaagaagaacatgtgatcatccaggccgagttctatctgaatcctgaccaatcaggcgagtttatgtttgactttgatggtgatgagattttccatgtggatatggcaaagaaggagacggtctggcggcttgaagaatttggacgatttgccagctttgaggctcaaggtgcattggccaacatagctgtggacaaagccaacctggaaatcatgacaaagcgctccaactatactccgatcaccaatgtacctccagaggtaactgtgctcacgaacagccctgtggaactgagagagcccaacgtcctcatctgtttcatcgacaagttcaccccaccagtggtcaatgtcacgtggcttcgaaatggaaaacctgtcaccacaggagtgtcagagacagtcttcctgcccagggaagaccaccttttccgcaagttccactatctccccttcctgccctcaactgaggacgtttacgactgcagggtggagcactggggcttggatgagcctcttctcaagcactgggagtttgatgctccaagccctctcccagagactacagagaacgtggtgtgtgccctgggcctgactgtgggtctggtgggcatcattattgggaccatcttcatcatcaagggagtgcgcaaaagcaatgcagcagaacgcagggggcctctgtaaggcacatggaggtgatggtgtttcttagagagaagatcactgaagaaacttctgctttaatgactttacaaagctggcaatattacaatccttgacctcagtgaaagcagtcatcttcagcgttttccagccctatagccaccccaagtgtggttatgcctcctcgattgctccgtactctaacatctagctggcttccctgtctattgccttttcctgtatctattttcctctatttcctatcattttattatcaccatgcaatgcctctggaataaaacatacaggagtctgtctctgctatggaatgccccatggggcatctcttgtgtacttattgtttaaggtttcctcaaactgtgatttttctgaacacaataaactattttgatgatcttgggtggaaaaaaaaaaaaaaaaaaaaaaaaaaaaaaaaaa

SEQ ID NO: 3667 - DNA, 1080 bp, Homo sapiens
cgctgtccttgccgcccccgccatgggcctagagctgtttcttgacctggtgtcccagcccagccgcgccgtctacatcttcgccaagaagaatggcatccccttagagctgcgcaccgtggatttggtcaaagggcagcacaagagcaaggagttcttgcagatcaacagcctggggaaactgccgacgctcaaggatggtgatttcatcttgaccgaaagctcggccatcctgatttacctgagctgtaagtaccagacgccggaccactggtatccatctgacctgcaggctcgtgcccgtgttcatgagtacctgggctggcatgccgactgcatccgtggcacctttggtatacccctgtgggtccaggtgttggggcccctcattggggtccaggtgcccgaggagaaggtggaacgcaacaggactgccatggaccaggccctgcaatggctggaggacaagttcctgggggacaggcccttcctcgctggccagcaggtgacactggctgatctcatggccctggaggagctgatgcagccggtggctctcggctatgaactgtttgagggacggccacgactggcagcatggcgtggacgagtggaggctttcctgggtgctgagctatgccaggaggcccacagcatcatcttgagcatcctggaacaggcggccaagaaaaccctcccaacaccctcaccagaggcctatcaggctatgctgcttcgaatcgccaggatcccctgaagggtctgggatgggggccaggagattagcaacaaggattcattctgttacttacttgcccctttttatctttccctcttgccccagtcccttctctccagcttcatgtgaagctctgcacagacaagacactcagtgtccttggcagtgctgctactcctcaggtgcagcatacataaccagtaagagactaaatctgcaatatataaagagctcctacaaatcagtaacatgaagaacactcaaaaattggcaaatgtcatcagtgttttaaacagaataaagattccaaacactttgaatagagaaaaaaaaaaaaaaaa

SEQ ID NO: 3668 - DNA, 508 bp, Homo sapiens; identical to SEQ ID NO: 608

SEQ ID NO: 3669 - DNA, 1134 bp, Homo sapiens
atgtgcgacgaagacgagaccaccgccctcgtgtgcgacaatggctccggcctggtgaaagccggcttcgccggggatgacgcccctagggccgtgttcccgtccatcgtgggccgcccccgacaccagggcgtcatggtcggtatgggtcagaaagattcctacgtgggcgacgaggctcagagcaagagaggtatcctgaccctgaagtaccctatcgagcacggcatcatcaccaactgggatgacatggagaagatctggcaccacaccttctacaacgagcttcgcgtggctcccgaggagcaccccaccctgctcaccgaggcccccctcaatcccaaggccaaccgcgagaagatgacccagatcatgtttgagaccttcaacgtgcccgccatgtacgtggccatccaggccgtgctgtccctctacgcctccggcaggaccaccggcatcgtgctggactccggcgacggcgtcacccacaacgtgcccatttatgagggctacgcgctgccgcacgccatcatgcgcctggacctggcgggccgcgatctcaccgactacctgatgaagatcctcactgagcgtggctactccttcgtgaccacagctgagcgcgagatcgtgcgcgacatcaaggagaagctgtgctacgtggccctggacttcgagaacgagatggcgacggccgcctcctcctcctccctggaaaagagctacgagctgccagacgggcaggtcatcaccatcggcaacgagcgcttccgctgcccggagacgctcttccagccctccttcattggtatggagtcggcgggcattcacgagaccacctacaacagcatcatgaagtgtgacatcgacatcaggaaggacctgtatgccaacaacgtcatgtcggggggcaccacgatgtaccctgggatcgctgaccgcatgcagaaagagatcaccgcgctggcacccagcaccatgaagatcaagatcatcgccccgccggagcgcaaatactcggtgtggatcggcggctccatcctggcctcgctgtccaccttccagcagatgtggatcaccaagcaggagtacgacgaggccggcccttccatcgtccaccgcaaatgcttctag

SEQ ID NO: 3670 - DNA, 1134 bp, Homo sapiens
atgtgtgaagaagaggacagcactgccttggtgtgtgacaatggctctgggctctgtaaggccggctttgctggggacgatgctcccagggctgttttcccatccattgtgggacgtcccagacatcagggggtgatggtgggaatgggacaaaaagacagctacgtgggtgacgaagcacagagcaaaagaggaatcctgaccctgaagtacccgatagaacatggcatcatcaccaactgggacgacatggaaaagatctggcaccactctttctacaatgagcttcgtgttgcccctgaagagcatcccaccctgctcacggaggcacccctgaaccccaaggccaaccgggagaaaatgactcaaattatgtttgagactttcaatgtcccagccatgtatgtggctatccaggcggtgctgtctctctatgcctctggacgcacaactggcatcgtgctggactctggagatggtgtcacccacaatgtccccatctatgagggctatgccttgccccatgccatcatgcgtctggatctggctggccgagatctcactgactacctcatgaagatcctgactgagcgtggctattccttcgttactactgctgagcgtgagattgtccgggacatcaaggagaaactgtgttatgtagctctggactttgaaaatgagatggccactgccgcatcctcatcctcccttgagaagagttacgagttgcctgatgggcaagtgatcaccatcggaaatgaacgtttccgctgcccagagaccctgttccagccatccttcatcgggatggagtctgctggcatccatgaaaccacctacaacagcatcatgaagtgtgatattgacatcaggaaggacctctatgctaacaatgtcctatcagggggcaccactatgtaccctggcattgccgaccgaatgcagaaggagatcacggccctagcacccagcaccatgaagatcaagatcattgcccctccggagcgcaaatactctgtctggatcggtggctccatcctggcctctctgtccaccttccagcagatgtggatcagcaaacaggaatacgatgaagccgggccttccattgtccaccgcaaatgcttctaa

SEQ ID NO: 3671 - DNA, 729 bp, Homo sapiens
atgggcttgttagagtgctgtgcaagatgtctggtaggggccccctttgcttccctggtggccactggattgtgtttctttggggtggcactgttctgtggctgtggacatgaagccctcactggcacagaaaagctaattgagacctatttctccaaaaactaccaagactatgagtatctcatcaatgtgatccatgccttccagtatgtcatctatggaactgcctctttcttcttcctttatggggccctcctgctggccgagggcttctacaccaccggcgcagtcaggcagatctttggcgactacaagaccaccatctgcggcaagggcctgagcgcaacgtttgtgggcatcacctatgccctgaccgttgtgtggctcctggtgtttgcctgctctgctgtgcctgtgtacatttacttcaacacctggaccacctgccagtctattgccttccccagcaagacctctgccagtataggcagtctctgtgctgatgccagaatgtatggtgttctcccatggaatgctttccctggcaaggtttgtggctccaaccttctgtccatctgcaaaacagctgagttccaaatgaccttccacctgtttattgctgcatttgtgggggctgcagctacactggtttccctgctcaccttcatgattgctgccacttacaactttgccgtccttaaactcatgggccgaggcaccaagttctga

SEQ ID NO: 3672 - DNA, 3587 bp, Homo sapiens; identical to SEQ ID NO: 1542

SEQ ID NO: 3673 - DNA, 5055 bp, Homo sapiens
ggccgagcgagcccccagcccagcctggcgactggggaccccggcacatgaggtggacgcccccggggaagacttgggtgcacagccaggcgagaaggtcttgagtcagacagagcaccagccttggggaccctggaccactatcatggagactgagagcgagcagaactccaattccaccaatgggagttctagctcagggggcagctctcggccccagatagctcaaatgtcactatatgaacgacaagcagtgcaggccacaattgctgccagtcggcaggccagctccccaaacaccagcactacacagcagcagactaccaccacccaggcctcgatcaatctggccaccacatcggccgcccagctcatcagccgatcccagagtgtgagctctcccagtgctaccaccttgacccaatctgtgctactggggaacaccacctccccacccctcaaccagtctcaggcccagatgtatctacgggtaaaccgaaccctgggtcggaatgtgcctctagcctcccaactcatcctgatgcctaatggggcggtggctgcagtccagcaggaggtgccatctgctcagtctcctggagttcatgcagatgcagatcaggttcagaacttggcagtaaggaatcaacaggcctcagctcaaggacctcagatgcaaggctccactcagaaggccattcctccaggagcctcccctgtctctagcctctcccaggcctctagccaggccctagcggtggcacaggcttcctctggggccacaaaccagtccctcaaccttagtcaagctggtggaggcagtgggaatagcatcccagggtccatgggtccaggtggaggtgggcaggcacatggtggtttgggtcagttgccttcctcaggaatgggtggtgggagctgtcccaggaagggtacaggagtggtgcagcccttgcctgcagcccaaacagtgactgtgagccagggcagccagacagaggcagaaagtgcagcagccaagaaggcagaagcagatgggagtggccagcagaatgtgggcatgaacctgacacggacagccacacctgcgcccagccagacacttattagctcagccacctacacacagatccagccccattcactgattcagcaacagcaacagatccacctccagcagaaacaggtggtgatccagcagcagattgccatccaccaccagcagcagttccagcaccggcagtcccagctccttcacacagctacacacctccagttggcgcagcagcagcaacaacagcaacagcagcaacagcagcagccgcaagccaccaccctcactgcccctcagccaccacaggtcccacctactcagcaggtcccaccttcccagtcccagcagcaagcccaaaccctggtcgttcagcccatgcttcagtcttcacccttgtctcttccacctgatgcagcccctaagccaccaattcccatccaatccaaaccacctgtagcacctatcaagccgcctcagttaggggccgctaagatgtcagctgcccagcaaccaccaccccatatccctgtgcaagttgtaggcactcgacagccaggtacagcccaggcacaggctttggggttggcacagctggcagctgctgtacctacttcccgggggatgccaggtacagtgcagtctggtcaggcccatttggcctcctcgccaccttcatcccaggctcctggtgcactgcaggagtgccctcccacattggcccctgggatgacccttgctcctgtgcaggggacagcacatgtggtaaagggtggggctaccacctcctcacctgttgtagcccaggtccctgctgccttctatatgcagtctgtgcacttgccgggtaaaccccagacattggctgtcaaacgcaaggctgactctgaggaggagagagatgatgtctccacattgggttcaatgcttcctgccaaggcatctccagtagcagaaagcccaaaagtcatggacgagaagagcagtcttggagaaaaagctgaatcagtggctaatgtgaatgctaatactccaagcagtgaactagtagccttgacccccgccccttcagtaccgcctcctacactagccatggtgtctagacaaatgggtgactcaaaacccccacaggccatcgtgaagccccagattctcacccacatcattgaaggctttgttatccaggaaggagcagaacctttcccggtgggttgttctcagttactgaaggagtctgagaagccactacagactggccttccgacagggctgactgagaatcagtcaggtggctctttgggagtggacagcccatctgctgagttagataagaaggcgaatctcctgaagtgcgagtactgtgggaagtacgcccccgcagagcagtttcgtggctctaagaggttctgctccatgacttgcgctaagaggtacaatgtgagctgtagccatcagttccggctgaagaggaaaaaaatgaaagagtttcaagaagccaactatgctcgcgttcgcaggcgtggaccccgccgcagctcctctgacattgcccgtgccaagattcagggcaagtgccaccggggtcaagaagactctagccggggttcagataattccagttatgatgaagcactctctccaacatctcctgggcctttatcagtaagagctgggcatggagaacgtgacctggggaatcccaatacagctccacctacaccggaattacatggcatcaaccctgtgttcctgtccagtaatcccagccgttggagtgtagaggaggtgtacgagtttattgcttctctccaaggctgccaagagattgcagaggaatttcgctcacaggagattgatggacaggcccttttattacttaaagaagaacatcttatgagtgccatgaacatcaagctgggccctgccctcaagatctgcgccaagataaatgtcctcaaggagacctaaggtggccctcttgcacaaaccagcctaaggcagacactctccactgtccaggttataacctggtaccagcagactttgcagggaagaaagagttgttccaatcatgtaaccttctgtaggggattactgagacagggaagagaagtgcaagaattggttgctggtgctacatggcggcagctttgacattttctctgggttctactttattttttaaaatctttacagttctcaccatttcacgtaccttaatccaatctttataaaagaggcagtctagagaactaggactgctcagccttatcctggagtggagcatttagcccaggtcttaattctccaagaggaggaatacatagtatggtaaggcaaggaactgggtggaatgtcaggttgcctgcccaatgggagaggtagggtttttctagcttgtgtgacagaagtagcaaaatctggtcctcccccctcccagtgtagctgtggctcagagttttttctttttgttgtcacttactcccttgtgattgaattttttctcctgcatccatggcaggatccccagccagtatagagacttggttggcatcttctgctgcagggactaaaagtatttgactggggcacatgtggctgttgtcattctttctgcatcccactgttcccctccaatttatgttattttctaccctgtttttcagttccatctctgctctgtcctatagctttataaaaccagagtgtgtggggctgaggtcaggagtataagtacctgccttaggcactattccttatataacaaaaatattaaatatttttttcctcagtaaaaggatgaaaattggtttcagttgtcttactctattccagtctttgcccactttcacacaaatgacaaggccaatatgttttgtttgttttttaatcattaagagtttttgtacaaaaagtgatggttttttttcttcattttaaaacaccagggtgtgggggagggatgcaaacaaataacaaaaaagatgcttttgtaacattattttccctgtttagaaagaaaaaaaatcactccaatagtattgaaaagtccaaagatgaaatagtttcattttcttttcctaaggcttataaaaggccccctgcctgttgattccatccctcttttgtgtccagtggagccatgttactcttcagtggcccaggggttcactattaaagaaagatcagtccaggtttctgggcacatggcctaaacaggaagatggaagcatcagaggattaaaaacctttccccacagaaatgtgggcaagaagacacttccctgagccagcagaagggacaggtgcagcagcattccacacccagcgcagaggacagcagagccctcgatgtcccacttctgcttccgttccctttctagaagattgaaaaaaaggtcaaaaccacatgcctgtggagaaagtgcgacatgtttagaaatactggtagggaaccaggagtaagaaaagctttaccagcttttactacaaatggatgaaagacatcaggatcccaccaccgcaaggtaaagtgacttcccttttctggaacccctgtggcacaggagtaccaattttcctttccaacgaactggatttctggataggcattttggctgtatgtggacagataagaccacagtccttagcccaatcccagctatacagtcaccccaatttccacaaatgatgtgatggtaccgtataatcctgtaattgggaaatttcacatttttcctgtcctaatctcagaggtgggagaagcaagtctagaacatctccaggctcagactaaacgagagtacttggactgcaaccaagtaatcactgcaaagtagttccaagcagcaagaaataccagattctcatggaggctactatagggtacagaataacaacatgaaagcaatcaaccctgtataaataatgtttcttggcattttttttttaattaaagaaatccagtgtctcaaaaaaaaaaaaaaaaaaaaaaaaaaaaaaaa

SEQ ID NO: 3674 - DNA, 2200 bp, Homo sapiens
cgggagtgagccaaagtgtgctaaaggaaaccaacagcggcctaggggtgaaaggacagccagggttagatgttctgaggaggcgggagcaaccgagagagcacgtgagcatctgtcctttctacccgttcctctttatctttagtgttcagtagcagcggggatagcccggggcccggtgtatggccacggagttacagtgtccggactccatgccctgtcacaaccagcaagtaaactctgcctcaaccccaagtcccgagcagctgcgacctggcgatctgatcctggaccacgcagggggaaacagagcctccagggccaaggtgattctcctcacggggtacgcccattctagcctgccggccgagctggactctggggcctgcggcggctccagcctcaactcagagggcaacagtggtagtggtgacagtagcagctatgacgcaccagctggcaactccttcctagaggactgcgaactctcccggcagatcggggcgcagcttaagctgctgcctatgaatgatcagatacgggagctacagaccatcatccgggacaagacagccagtagaggtgacttcatgttttctgcggatcgtttgatcagacttgttgtggaagagggattgaatcagctgccatataaagaatgcatggtgaccactccaacagggtacaagtatgaaggagtgaaatttgagaagggaaattgtggggtcagcataatgagaagcggtgaggcaatggaacaaggtttacgagactgctgtcgatccatacgaattggaaagatcctgattcagagtgatgaggagacacaaagagccaaagtatattatgccaaattccccccagacatttaccggagaaaagtccttctgatgtatccaattctcagcactggaaatactgtaattgaagctgtaaaggttcttatagaacatggagttcaacccagtgttatcatcctactcagtctgttctccactcctcatggtgccaaatcaatcattcaggagtttccagagatcacaattttaactactgaagttcatcctgttgcacctacacattttggacagaaatactttggaacagactaagttatttaagtaaaataattgtcttatgtaatattacaatcatgttttgattttctatttgttttactgattcacttgagggtggcagagaaaaatgtgttaaaatgctttttagttttggaagtgggtatatttgaggttatatctcatttagttatttgtttactgttggcaccgaattcaacaatgaagtatatgccaactcttacaaaacataaattttaataatattctaatgcaaattactgaaccctcagtgcattaaaattatttcctaatttatgagcctcttagtttggaggttgcttgaagccacaaataaaactcaaatgagagtcagttctttgtcccactgtagtttgcattttgtttagtttggttttagctctactaaggtttcacatatgtggctattgccacattcctctactgttttctttctgatactggacatgctagtaacttggagaggagaataaaagaatgtctcctggaattttacattcccattaatgtcctcattcaattggcagacctaggatgtatggttaactctcaggccattatgtttttcatggctcatttcccaaactgcattgttggtaggtgccttgctaagctgtaattcagtgaagaagatggtggggcatttttagtaattggaactgtaacattaatttacaagattgaaccggggatgtctggatgctgacaagggagagccaagtactgttaatgccatcaatcctctaggaaggaattggtggtttttctgaagtgtgggggaaagggtggtttcttgctggatttcatggccagtaagtaaatttaaatgcttcatttttaatttggatgtttctgctagagacctttgatttggaaattagttattttgcatgtttgtcaactgtatatgtatgaaaatagaaaaaaaacatgctttttgtaaaaacccctaagatttgtatatgttcatctttaggcttctgaaagggagagaaatcatattggaaatcagtgttggtgttctgaaatctgcttgtaaaactctcatctcattttacattgatattaaaacattttaacag

SEQ ID NO: 3675 - DNA, 4478 bp, Homo sapiens; identical to SEQ ID NO: 548

SEQ ID NO: 3676 - DNA, 816 bp, Homo sapiens
atgctcataggaacccccaccccgcgtgacactactcccagctcctggctgacttctagtcttctggttgaagctgcgcctttagatgacacgaccctacccacccctgtttccagcggatgcccgggcctggagcccacagaattcttccagtccctgggtggggacggagaaaggaacgttcagattgagatggcccatggcaccaccacgctcgccttcaagttccagcatggagtgattgcagcagtggattctcgggcctcagctgggtcctacattagtgccttacgggtgaacaaggtgattgagattaacccttacctgcttggcaccatgtctggctgtgcagcagactgtcagtactgggagcgcctgctggccaaggaatgcaggctgtactatctgcgaaatggagaacgtatttcagtgtcggcagcctccaagctgctgtccaacatgatgtgccagtaccggggcatgggcctctctatgggcagtatgatctgtggctgggataagaagggtcctggactctactacgtggatgaacatgggactcggctctcaggaaatatgttctccacgggtagtgggaacacttatgcctacggggtcatggacagtggctatcggcctaatcttagccctgaagaggcctatgaccttggccgcagggctattgcttatgccactcacagagacagctattctggaggcgttgtcaatatgtaccacatgaaggaagatggtttggtgaaagtagaaagtacagatgtcagtgacctgctgcaccagtaccgggaagccaatcaa

SEQ ID NO: 3677 - DNA, 1131 bp, Homo sapiens
atgtgcgacgaagacgagaccaccgccctcgtgtgcgacaatggctccggcctggtgaaagccggcttcgccggggatgacgcccctagggccgtgttcccgtccatcgtgggccgcccccgacaccagggcgtcatggtcggtatgggtcagaaagattcctacgtgggcgacgaggctcagagcaagagaggtatcctgaccctgaagtaccctatcgagcacggcatcatcaccaactgggatgacatggagaagatctggcaccacaccttctacaacgagcttcgcgtggctcccgaggagcaccccaccctgctcaccgaggcccccctcaatcccaaggccaaccgcgagaagatgacccagatcatgtttgagaccttcaacgtgcccgccatgtacgtggccatccaggccgtgctgtccctctacgcctccggcaggaccaccggcatcgtgctggactccggcgacggcgtcacccacaacgtgcccatttatgagggctacgcgctgccgcacgccatcatgcgcctggacctggcgggccgcgatctcaccgactacctgatgaagatcctcactgagcgtggctactccttcgtgaccacagctgagcgcgagatcgtgcgcgacatcaaggagaagctgtgctacgtggccctggacttcgagaacgagatggcgacggccgcctcctcctcctccctggaaaagagctacgagctgccagacgggcaggtcatcaccatcggcaacgagcgcttccgctgcccggagacgctcttccagccctccttcatcggtatggagtcggcgggcattcacgagaccacctacaacagcatcatgaagtgtgacatcgacatcaggaaggacctgtatgccaacaacgtcatgtcggggggcaccacgatgtaccctgggatcgctgaccgcatgcagaaagagatcaccgcgctggcacccagcaccatgaagatcaagatcatcgccccgccggagcgcaaatactcggtgtggatcggcggctccatcctggcctcgctgtccaccttccagcagatgtggatcaccaagcaggagtacgacgaggccggcccttccatcgtccaccgcaaatgcttc

SEQ ID NO: 3678 - DNA, 690 bp, Homo sapiens
atggatcctaatcagaacgtgaaatgcaagatagttgtggtgggagacagtcagtgtggaaaaactgcgctgctccatgtcttcgccaaggactgcttccccgagaattacgttcctacagtgtttgagaattacacggccagttttgaaatcgacacacaaagaatagagttgagcctgtgggacacttcgggttctccttactatgacaatgtccgccccctctcttaccctgattcggatgctgtgctgatttgctttgacatcagtagaccagagaccctggacagtgtcctcaaaaagtggaaagatgaaatccaggaattttgtccaaataccaaaatgctcttggtcggctgcaagtctgatctgcggacagatgttagtacattagtagagctctccaatcacaggcagacgccagtgtcctatgaccagggggcaaatatggccaaacagattggagcagctacttatatcgaatgctcagctttacagtcggaaaatagcgtcagagacatttttcacgttgccaccttggcatgtgtaaataagacaaataaaaacgttaagcggaacaaatcacagagagccacaaagcggatttcacacatgcctagcagaccagaactctcggcagttgctacggacttacgaaaggacaaagcgaagagctgcactgtgatgtga

SEQ ID NO: 3679 - DNA, 687 bp, Homo sapiens
atggatcctaatcagaacgtgaaatgcaagatagttgtggtgggagacagtcagtgtggaaaaactgcgctgctccatgtcttcgccaaggactgcttccccgagaattacgttcctacagtgtttgagaattacacggccagttttgaaatcgacacacaaagaatagagttgagcctgtgggacacttcgggttctccttactatgacaatgtccgccccctctcttaccctgattcggatgctgtgctgatttgctttgacatcagtagaccagagaccctggacagtgtcctcaaaaagtggaaaggtgaaatccaggaattttgtccaaataccaaaatgctcttggtcggctgcaagtctgatctgcggacagatgttagtacattagtagagctctccaatcacaggcagacgccagtgtcctatgaccagggggcaaatatggccaaacagattggagcagctacttatatcgaatgctcagctttacagtcggaaaatagcgtcagagacatttttcacgttgccaccttggcatgtgtaaataagacaaataaaaacgttaagcggaacaaatcacagagagccacaaagcggatttcacacatgcctagcagaccagaactctcggcagttgctacggacttacgaaaggacaaagcgaagagctgcactgtgatg

SEQ ID NO: 3680 - DNA, 891 bp, Homo sapiens
atggacggagacggtgacccagagagcgtgggccagcccgaggaggcaagcccggaggagcagccagaggaggcgagtgctgaggaggagcggccggaggaccagcaggaggaggaggcggcggccgccgccgcgtacctggacgagctgcccgagccgctgctgctgcgcgtgctggccgcactgccggccgccgagctggtgcaggcctgccgcctggtgtgcctgcgctggaaggagctggtggacggcgccccgctgtggctgctcaagtgccagcaggaggggctggtgcccgagggcggcgtggaggaggagcgcgaccactggcagcagttctacttcctgagcacgcggcgccgcaaccttctgtgtaacccgtgtggggaagaggacttggaaggctggtgtgacgtggagcatggtggggacggctggagggtggaggagctgcctggagacagtggggtggagttcacccacgatgatagcgtcaagaagtacttcgcctcctcctttgagtggtgtcgcaaagcacaggtcattgacctgcaggctgagggctactgggaggagctgctggacacgactcagccggccatcgtggtgaaggactggtactcgggccgcagcgacgctggttgcctctacgagctcaccgttaagctactgtccgagcacgagaacgtgctggctgagttcagcagcgggcaggtggcagtgccccaagacagtgacggcgggggctggatggagatctcccacaccttcaccgactacgggccgggcgtccgcttcgtccgcttcgagcacggggggcaggactccgtctactggaagggctggttcggggcccgggtgaccaacagcagcgtgtgggtagaaccctga

SEQ ID NO: 3681 - DNA, 3350 bp, Homo sapiens; identical to SEQ ID NO: 1574

SEQ ID NO: 3682 - DNA, 980 bp, Homo sapiens; identical to SEQ ID NO: 1971

SEQ ID NO: 3683 - DNA, 3098 bp, Homo sapiens; identical to SEQ ID NO: 1649

SEQ ID NO: 3684 - DNA, 3219 bp, Homo sapiens
actgtaggcaccaccgggcgccgaatggctgttttctaactgggatcctcggtgacgtatggctgcctgccccttggcagctgtctttatggaccagtaggcagagcgaaattgacgctgacaagacttttgcatcttggaagggactgtaatctactgtagtgaagaacagagcctctcaatcagacgggtgtaaataagagacggaggggagtccaaaagaaaaggaagaggaggaaaaacaagtgtgtgttggggggaacagggggaaaagcatttttggtggatggtatgaagccagccatggaaactgcagccgaggaaaatactgaacaaagccaagagagaaaagtgaacagcagagctgaaatggaaattggcaggtaccactggatgtacccaggctcaaagaaccaccagtaccatcccgtgccaaccctgggggacagggctagccccttgagcagtccaggctgctttgaatgctgcatcaagtgtctgggaggagtcccctacgcctccctggtggccaccatcctctgcttctccggggtggccttattctgcggctgtgggcatgtggctctcgcaggcaccgtggcgattcttgagcaacacttctccaccaacgccagtgaccatgccttgctgagcgaggtgatacaactgatgcagtatgtcatctatggaattgcgtcctttttcttcttgtatgggatcattctgttggcagaaggcttttacaccacaagtgcagtgaaagaactgcacggtgagtttaaaacaaccgcttgtggccgatgcatcagtggaatgttcgttttcctcacctatgtgcttggagtggcctggctgggtgtgtttggtttctcagcggtgcccgtgtttatgttctacaacatatggtcaacttgtgaagtcatcaagtcaccgcagaccaacgggaccacgggtgtggagcagatctgtgtggatatccgacaatacggtatcattccttggaatgctttccccggaaaaatatgtggctctgccctggagaacatctgcaacacaaacgagttctacatgtcctatcacctgttcattgtggcctgtgcaggagctggtgccaccgtcattgccctgatccacttcctcatgatactgtcttctaactgggcttacttaaaggatgcgagcaaaatgcaggcttaccaggatatcaaagcaaaggaagaacaggaactgcaagatatccagtctcggtcaaaagaacaactcaattcttacacataaatgtttgccagagtgtttcggccgacgtatttacagctctgacaaatcatcagacagctgctctgcagtacagatgtgtatcccaccaaactaatgtagatgtacaaacacttcactgtctgtctcaagctgctgggatgtatctctaggaaaaccttccagtgggtaaatctttttctttagaacaaatattggaggtttcatgttagccattttaaaaggcaacactttgacaaaatgatcgttcatactttgggaatttgtggcatgttcacatttattgctagggcaattctaccaagacactcaatggaatatgtcacactccttaatagggacctgtgactccttaataaggacctgtgacatgcccagcatcaagggataagaccgtaaattcacatatatgccatctgtcctcaagtgttatctacataggaaataaaatggaattgatgtaaagttccatttctgacagctgacatttattaaactttggatcaaagataatgtgattcttatgattgatttctcaaactagcttttccctcccaagtccaggacccattaatttcctgagccaatcagaaatatatttttcaataatgctaaaattagctacaattctgctgaccctactattaaagaatctggatgctggactcactgacaagctttccagaagcaattttataacagatttcattttaacaaaatactgatccaattttcattattcttgagaaatgtcagctttgccttaatgagtatttgctttaaatttctaagaatttatatcataactagagacccaaatatctttcacagaattttgttccataaatgtttttcttaattattaagaagtgttaccttattaaaatgaccaccattctaaaccatttttcagtggtctggatacgaagtttacagtttcataccaactatctaaaacctaattgcaaattgaccacagacctctaacctcctacttttatagacttgaatacttaagtaatttaaattagggttggtatttcatttttttcttatctaaatcttagtttcctggaataataaagtttgatgttcagcaagagaactgcttgagtttaagccattttcaaaagaaacttgccttttacattattgtgttccagaacattaagtgactgtaggtactgggtattagtgatggtaaactttgtgttgctctttatgaaatgatccatataactgttgggtgcatcagtgcttttcaaaggggctgcttactatagggttaactatgtatattcattgttaagagttaacttgtggtttggctgtttcctggattttataacatacatgtgcagaaatgtattcaaatgaaaggaagcatacctttatcaagatgctattaaaattgaacatcaagtataatatttcatttggattctcttttttggttaatgcctaaaaatgcctatttgggatttttttttttttttaaattaagagaagctctcttctgtgtagaacagttgttccaaaatagcttagtgttttgttttcctgttgcatgacagatttaactattctttccagcagtggaggtgctgtcagagtccagtgttctagaagaggcagtgtctaaagcctaattttacttttctaattctggtagctattaccaggaatttttgaaagttttgtttaagtagtctaatattttttatgtaaagagcattaaattttgctatgtataaatttttgtaacctaacagtgaatcaatattttctatcagtgccaagggcttcctgtagttctattcaagtgttacaataaatatttgtagataatagtcaatacttgtgtatgcttattttaaagatctatttaggtggaaatagttgtggatgtactaagagtaatgaaataaaattatagcttcaaaa

SEQ ID NO: 3685 - DNA, 1799 bp, Homo sapiens
actgtaggcaccaccgggcgccgaatggctgttttctaactgggatcctcggtgacgtatggctgcctgccccttggcagctgtctttatggaccagtaggcagagcgaaattgacgctgacaagacttttgcatcttggaagggactgtaatctactgtagtgaagaacagagcctctcaatcagacgggtgtaaataagagacggaggggagtccaaaagaaaaggaagaggaggaaaaacaagtgtgtgttggggggaacagggggaaaagcatttttggtggatggtatgaagccagccatggaaactgcagccgaggaaaatactgaacaaagccaagagagaaaagtgaacagcagagctgaaatggaaattggcaggtaccactggatgtacccaggctcaaagaaccaccagtaccatcccgtgccaaccctgggggacagggctagccccttgagcagtccaggctgctttgaatgctgcatcaagtgtctgggaggagtcccctacgcctccctggtggccaccatcctctgcttctccggggtggccttattctgcggctgtgggcatgtggctctcgcaggcaccgtggcgattcttgagcaacacttctccaccaacgccagtgaccatgccttgctgagcgaggtgatacaactgatgcagtatgtcatctatggaattgcgtcctttttcttcttgtatgggatcattctgttggcagaaggcttttacaccacaagtgcagtgaaagaactgcacggtgagtttaaaacaaccgcttgtggccgatgcatcagtggaatgttcgttttcctcacctatgtgcttggagtggcctggctgggtgtgtttggtttctcagcggtgcccgtgtttatgttctacaacatatggtcaacttgtgaagtcatcaagtcaccgcagaccaacgggaccacgggtgtggagcagatctgtgtggatatccgacaatacggtatcattccttggaatgctttccccggaaaaatatgtggctctgccctggagaacatctgcaacacaaacgagttctacatgtcctatcacctgttcattgtggcctgtgcaggagctggtgccaccgtcattgccctgctgatctacatgatggctactacatataactatgcggttttgaagtttaagagtcgggaagattgctgcactaaattctaaattgcataaggagttttagagagctatgctctgtagcatgaaatatcactgacactccagactaaagcagagtctaggtttctgcaattttgttacagtaatttgtaaatagctttagtaaactcaccttgcatggtagattaataagatgacttactgtacatgaattacacaataatgagatctggtggctatttccacattttgaaaaggattcagttatttactgacagtggtgagcatcctttttaaaataatgttctcatacttaaacattagagagcagtatctttaaatgaattattaacactttggaatacttacattttctgttatttttgattgcctgataaccagtttcaatgatgaaaatgaaaacaagtgctgaagatgaaatggaagagaaccgttttaatctggattttgttttgtcacacctggaaaatactttgcaaatatgttctaaattgaaaacaatttttttatgatcacatggttcactaccaaatgaccctcaaataagccagatgaaaatttgaagaaaaaggtcacccagttctctggaaaaaaaaaaaaaaaaaaaaaaaaaa

SEQ ID NO: 3686 - DNA, 1679 bp, Homo sapiens; identical to SEQ ID NO: 231

SEQ ID NO: 3687 - DNA, 1533 bp, Homo sapiens
cagtgcaggcggagccgcgccgcgctcccaccccggccgggagctaggagccagcggccagccccgcgcagcgcagcgcagcccgcagaagcccggtcagcgcacgtgcccgcgagacctgcaaacttgtgccaccggctctgcccgtccccggggagcccgaacgccccgcagccctcacccctcccgccagtctccagccatgggctgctttgaatgctgcatcaagtgtctgggaggagtcccctacgcctccctggtggccaccatcctctgcttctccggggtggccttattctgcggctgtgggcatgtggctctcgcaggcaccgtggcgattcttgagcaacacttctccaccaacgccagtgaccatgccttgctgagcgaggtgatacaactgatgcagtatgtcatctatggaattgcgtcctttttcttcttgtatgggatcattctgttggcagaaggcttttacaccacaagtgcagtgaaagaactgcacggtgagtttaaaacaaccgcttgtggccgatgcatcagtggaatgttcgttttcctcacctatgtgcttggagtggcctggctgggtgtgtttggtttctcagcggtgcccgtgtttatgttctacaacatatggtcaacttgtgaagtcatcaagtcaccgcagaccaacgggaccacgggtgtggagcagatctgtgtggatatccgacaatacggtatcattccttggaatgctttccccggaaaaatatgtggctctgccctggagaacatctgcaacacaaacgagttctacatgtcctatcacctgttcattgtggcctgtgcaggagctggtgccaccgtcattgccctgctgatctacatgatggctactacatataactatgcggttttgaagtttaagagtcgggaagattgctgcactaaattctaaattgcataaggagttttagagagctatgctctgtagcatgaaatatcactgacactccagactaaagcagagtctaggtttctgcaattttgttacagtaatttgtaaatagctttagtaaactcaccttgcatggtagattaataagatgacttactgtacatgaattacacaataatgagatctggtggctatttccacattttgaaaaggattcagttatttactgacagtggtgagcatcctttttaaaataatgttctcatacttaaacattagagagcagtatctttaaatgaattattaacactttggaatacttacattttctgttatttttgattgcctgataaccagtttcaatgatgaaaatgaaaacaagtgctgaagatgaaatggaagagaaccgttttaatctggattttgttttgtcacacctggaaaatactttgcaaatatgttctaaattgaaaacaatttttttatgatcacatggttcactaccaaatgaccctcaaataagccagatgaaaatttgaagaaaaaggtcacccagttctctggaaaaaaaaaaaaaaaaaaaaaaaaaa

SEQ ID NO: 3688 - DNA, 3000 bp, Homo sapiens
atggagccccgggctgccgcggcgggcgagccagagccgccggcggcgtcctcctccttccaggcccggctctggaagaacctgcagctgggggtgggcaggagcaagggcggcgggggcgggcgcgctgggggtccagagcgccgcactgcggacaccccgtcgccctccccgccacccccggtgggcacagggaatgcaccggccagggggagtggtgcaggcagcaggtggagcggcttcaagaagcggaagcaagtgctggaccgagtcttctcctcctcgcagcccaacctgtgctgctcgtcgccggagcccctggagcccggcggcgccggcagagccgagcaggggtccacgctacgccgccggatccgcgagcatttgctccccgccgtaaaggggcccgcggcggcctcgggagcagcgggagggacgcctcctggcggacgctcccccgactcagctccttcctcttcctccgcctcatcctccctgtcctcctcgccccagcctcccccgaggggggaccgcgcccgagatgagggtgcacggcgtcagggccccggggcgcacttgtgccgccagaagagctcctctctgccgggcaccgcctgcctggagcagctgctggagccgccggctcctcccgcagagccggcgcggagtcccgcggagtctcgggccccggagacgggcgaggagcacggcagcagccagaaaataataaacactgctggaaccagtaatgcagaagtccccttggctgatcccggaatgtaccagctggacattacattaagaaggggtcaaagtttagctgctcgagatcgaggagggacgagtgatccatatgtgaagtttaaaatcggaggaaaagaagtttttagaagtaagataatacacaagaacctcaaccctgtgtgggaagaaaaagcttgtattctggttgatcatcttagggagccattgtatataaaggtatttgactatgattttggactacaggatgactttatgggctcagcctttctggatctgacacaattggagttaaacaggcccacagatgtgacccttactctgaaagatcctcattatcctgaccatgatcttggaatcattttgctctcagtcatccttacccctaaagaaggagagtccagggatgtgacaatgctaatgaggaagagttggaaaagatcaagtaaggaactttcagaaaatgaagtggttggatcttatttctctgtgaagtctctcttttggaggacgtgcggcaggccagctcttcctgtcctgggcttctgcagagcagagcttcagaatccttattgcaaaaatgtacaatttcagacccaaagtttacgcctatcagacctacacagaaaatcgcatctttggagaggaatagtcagcatcaccttgattgaagggagagacctcaaggccatggattccaacgggttgagcgatccctacgtgaagttccggcttgggcatcagaagtacaagagcaagattatgccaaaaacgttgaatcctcagtggagggaacaatttgattttcacctttatgaagaaagaggaggagtcattgatatcactgcatgggacaaagatgctgggaaaagggatgatttcattggcaggtgccaggtcgacctgtcagccctcagtagggaacagacgcacaagctggagttgcagctggaagagggtgagggacacctggtgctgctggtcactctgacagcatcagccacagtcagcatctctgacctgtctgtcaactccctggaggaccagaaggaacgagaggagatattaaagagatatagcccattgaggatatttcacaacctgaaagatgtgggatttctccaggtgaaagtcatcagagcggaagggttaatggctgccgacgtcactggaaaaagtgacccattttgtgtggtagaactgaacaacgatagactgctaacacatactgtctacaaaaatctcaatcctgagtggaataaagtcttcacgttcaacattaaagatatccattcagttcttgaagtgacagtttatgatgaagatcgggatcgaagtgctgactttctgggcaaagttgctataccattgctgtctattcaaaatggtgaacagaaagcctacgtcttgaaaaacaagcagctgacagggccaacaaagggggtcatctatcttgaaatagatgtgatttttaatgctgtgaaagccagcttacgaacattaatacccaaagaacagaagtacattgaagaggaaaacagactctctaaacagctgctactaagaaactttatcagaatgaaacgttgtgtcatggtgctggtaaatgctgcatactacgttaatagttgctttgattgggattcacccccaaggagtctcgctgcttttgtgctctttctctttgttgtctggaactttgagctctacatgataccactggttttgttgttactattgacatggaactacttcttgataatatcagggaaagataacaggcaacgtgatacagtagtggaggacatgctagaggacgaggaagaagaagatgacaaagatgacaaggacagtgaaaaaaagggatttataaataaaatctatgccatccaggaggtatgtgtcagtgtccagaacatcctagatgaagtggcttcctttggcgaaaggattaagaatactttcaactggactgtcccattcttaagctggctggccattgtagccctctgtgtgttcacagccatcctgtactgcattccgctgagatacattgtccttgtctggggcatcaataaatttacaaaaaagcttcggagtccatatgcaattgataacaatgaactacttgacttcctttccagagtcccttcagatgtacaagtggtgcaataccaagaactgaaaccagatccttctcatagcccatataaaagaaagaaaaacaatcttggctag

SEQ ID NO: 3689 - DNA, 2337 bp, Homo sapiens
atgctagacagctgcaagctgaaaagtgcctgcaatttgccatttatttgtaataagaaaataataaacactgctggaaccagtaatgcagaagtccccttggctgatcccggaatgtaccagctggacattacattaagaaggggtcaaagtttagctgctcgagatcgaggagggacgagtgatccatatgtgaagtttaaaatcggaggaaaagaagtttttagaagtaagataatacacaagaacctcaaccctgtgtgggaagaaaaagcttgtattctggttgatcatcttagggagccattgtatataaaggtatttgactatgattttggactacaggatgactttatgggctcagcctttctggatctgacacaattggagttaaacaggcccacagatgtgacccttactctgaaagatcctcattatcctgaccatgatcttggaatcattttgctctcagtcatccttacccctaaagaaggagagtccagggatgtgacaatgctaatgaggaagagttggaaaagatcaagtaaggaactttcagaaaatgaagtggttggatcttatttctctgtgaagtctctcttttggaggacgtgcggcaggccagctcttcctgtcctgggcttctgcagagcagagcttcagaatccttattgcaaaaatgtacaatttcagacccaaagtttacgcctatcagacctacacagaaaatcgcatctttggagaggaatagtcagcatcaccttgattgaagggagagacctcaaggccatggattccaacgggttgagcgatccctacgtgaagttccggcttgggcatcagaagtacaagagcaagattatgccaaaaacgttgaatcctcagtggagggaacaatttgattttcacctttatgaagaaagaggaggagtcattgatatcactgcatgggacaaagatgctgggaaaagggatgatttcattggcaggtgccaggtcgacctgtcagccctcagtagggaacagacgcacaagctggagttgcagctggaagagggtgagggacacctggtgctgctggtcactctgacagcatcagccacagtcagcatctctgacctgtctgtcaactccctggaggaccagaaggaacgagaggagatattaaagagatatagcccattgaggatatttcacaacctgaaagatgtgggatttctccaggtgaaagtcatcagagcggaagggttaatggctgccgacgtcactggaaaaagtgacccattttgtgtggtagaactgaacaacgatagactgctaacacatactgtctacaaaaatctcaatcctgagtggaataaagtcttcacgttcaacattaaagatatccattcagttcttgaagtgacagtttatgatgaagatcgggatcgaagtgctgactttctgggcaaagttgctataccattgctgtctattcaaaatggtgaacagaaagcctacgtcttgaaaaacaagcagctgacagggccaacaaagggggtcatctatcttgaaatagatgtgatttttaatgctgtgaaagccagcttacgaacattaatacccaaagaacagaagtacattgaagaggaaaacagactctctaaacagctgctactaagaaactttatcagaatgaaacgttgtgtcatggtgctggtaaatgctgcatactacgttaatagttgctttgattgggattcacccccaaggagtctcgctgcttttgtgctctttctctttgttgtctggaactttgagctctacatgataccactggttttgttgttactattgacatggaactacttcttgataatatcagggaaagataacaggcaacgtgatacagtagtggaggacatgctagaggacgaggaagaagaagatgacaaagatgacaaggacagtgaaaaaaagggatttataaataaaatctatgccatccaggaggtatgtgtcagtgtccagaacatcctagatgaagtggcttcctttggcgaaaggattaagaatactttcaactggactgtcccattcttaagctggctggccattgtagccctctgtgtgttcacagccatcctgtactgcattccgctgagatacattgtccttgtctggggcatcaataaatttacaaaaaagcttcggagtccatatgcaattgataacaatgaactacttgacttcctttccagagtcccttcagatgtacaagtggtgcaataccaagaactgaaaccagatccttctcatagcccatataaaagaaagaaaaacaatcttggctag

SEQ ID NO: 3690 - DNA, 1803 bp, Homo sapiens; identical to SEQ ID NO: 1161

SEQ ID NO: 3691 - DNA, 4002 bp, Homo sapiens
ggtgcgctgggcgcggcgtcccctgcgttgtcctcctgctgccgcccccgcggccgccgctttctgccgcggggaccctgagccccggcccgccggtgtcagccgccgcgcgcgcgcacagacacacacacagagacacacaaacacacacagaaaagacacacacgcgcacacacggcgcgcacaccctcacgcccgccacagccacaacacgcccgcacgcgccctccctctccggcccgcaacttctcggtcctcggctcctttgttgctccagccgcggccgctcgcccgtgttgtgtgtccccggtgtcaccgagcgtgttgtgtgtccgtgcggcgcggcgctgtgtggctccctcgcgcccaccacgctggcccccgggccccggctcgcccttcccaggcgccggctgcagcagagtttcagaacaagcttcctggaacccatgacccatgaagtcttgtcgacatttataccgtctgagggtagcagctcgaaactagaagaaagtgttgccagggacggcagtatctctttgtgtgaccctggcggcttatgggacgttggcttcagacctttgtgatacaccatgctgcgtgggacgatgacggcgtggagaggaatgaggcctgaggtcacactggcttgcctcctcctagccacagcaggctgctttgctgacttgaacgaggtccctcaggtcaccgtccagcctgcgtccaccgtccagaagcccggaggcactgtgatcttgggctgcgtggtggaacctccaaggatgaatgtaacctggcgcctgaatggaaaggagctgaatggctcggatgatgctctgggtgtcctcatcacccacgggaccctcgtcatcactgcccttaacaaccacactgtgggacggtaccagtgtgtggcccggatgcctgcgggggctgtggccagcgtgccagccactgtgacactagccaatctccaggacttcaagttagatgtgcagcacgtgattgaagtggatgagggaaacacagcagtcattgcctgccacctgcctgagagccaccccaaagcccaggtccggtacagcgtcaaacaagagtggctggaggcctccagaggtaactacctgatcatgccctcagggaacctccagattgtgaatgccagccaggaggacgagggcatgtacaagtgtgcagcctacaacccagtgacccaggaagtgaaaacctccggctccagcgacaggctacgtgtgcgccgctccaccgctgaggctgcccgcatcatctaccccccagaggcccaaaccatcattgtcaccaaaggccagagtctcattctggagtgtgtggccagtggaatcccacccccacgggtcacctgggccaaggatgggtccagtgtcaccggctacaacaagacgcgcttcctgctgagcaacctcctcatcgacaccaccagcgaggaggactcaggcacctaccgctgcatggccgacaatggggttgggcagcccggggcagcggtcatcctctacaatgtccaggtgtttgaaccccctgaggtcaccatggagctatcccagctggtcatcccttggggccagagtgccaagcttacctgtgaggtgcgtgggaaccccccgccctccgtgctgtggctgaggaatgctgtgcccctcatctccagccagcgcctccggctctcccgcagggccctgcgcgtgctcagcatggggcctgaggacgaaggcgtctaccagtgcatggccgagaacgaggttgggagcgcccatgccgtagtccagctgcggacctccaggccaagcataaccccaaggctatggcaggatgctgagctggctactggcacacctcctgtatcaccctccaaactcggcaaccctgagcagatgctgagggggcaaccggcgctccccagacccccaacgtcagtggggcctgcttccccgcagtgtccaggagagaaggggcagggggctcccgccgaggctcccatcatcctcagctcgccccgcacctccaagacagactcatatgaactggtgtggcggcctcggcatgagggcagtggccgggcgccaatcctctactatgtggtgaaacaccgcaaggtcacaaattcctctgacgattggaccatctctggcattccagccaaccagcaccgcctgaccctcaccagacttgaccccgggagcttgtatgaagtggagatggcagcttacaactgtgcgggagagggccagacagccatggtcaccttccgaactggacggcggcccaaacccgagatcatggccagcaaggagcagcagatccagagagacgaccctggagccagtccccagagcagcagccagccagaccacggccgcctctcccccccagaagctcccgacaggcccaccatctccacggcctccgagacctcagtgtacgtgacctggattccccgtgggaatggtgggttcccaatccagtccttccgtgtggagtacaagaagctaaagaaagtgggagactggattctggccaccagcgccatccccccgtcgcggctgtccgtggagatcacgggcctagagaaaggcacctcctacaagtttcgagtccgggctctgaacatgctgggggagagcgagcccagcgccccctctcggccctacgtggtgtcgggctacagcggtcgcgtgtacgagaggcccgtggcaggtccttatatcaccttcacggatgcggtcaatgagaccaccatcatgctcaagtggatgtacatcccagcaagtaacaacaacaccccaatccatggcttttatatctattatcgacccacagacagtgacaatgatagtgactacaagaaggatatggtggaaggggacaagtactggcactccatcagccacctgcagccagagacctcctacgacattaagatgcagtgcttcaatgaaggaggggagagcgagttcagcaacgtgatgatctgtgagaccaaagctcggaagtcttctggccagcctggtcgactgccacccccaactctggccccaccacagccgccccttcctgaaaccatagagcggccggtgggcactggggccatggtggctcgctccagcgacctgccctatctgattgtcggggtcgtcctgggctccatcgttctcatcatcgtcaccttcatccccttctgcttgtggagggcctggtctaaccaaaaacatacaacagacctgggttttcctcgaagtgcccttccaccctcctgcccgtatactatggtgccattgggaggactcccaggccaccaggccagtggacagccctacctcagtggcatcagtggacgggcctgtgctaatgggatccacatgaataggggctgcccctcggctgcagtgggctacccgggcatgaagccccagcagcactgcccaggcgagcttcagcagcagagtgacaccagcagcctgctgaggcagacccatcttggcaatggatatgacccccaaagtcaccagatcacgaggggtcccaagtctagcccggacgagggctctttcttatacacactgcccgacgactccactcaccagctgctgcagccccatcacgactgctgccaacgccaggagcagcctgctgctgtgggccagtcaggggtgaggagagcccccgacagtcctgtcctggaagcagtgtgggaccctccatttcactcagggcccccatgctgcttgggccttgtgccagttgaagaggtggacagtcctgactcctgccaagtgagtggaggagactggtgtccccagcaccccgtaggggcctacgtaggacaggaacctggaatgcagctctccccggggccactggtgcgtgtgtcttttgaaacaccacctctcacaatttaggcagaagctgatatcccagaaagactatatattgtttttttttttaaaaaaaaaaaaaaaaaaa

SEQ ID NO: 3692 - DNA, 2177 bp, Homo sapiens
ccatttaaaggtgtgcggcgggtctctgttcacatggctcaactggaaacctgtttcatgaacaagcttactcaggaaccatctggtggtattccagcacattgttcttcagggggacgactctaagtcgctttgtggtggcagcagcttagaatcagtatttgtggttgggaaagatggacttacgggagcttggtaatgcaggtggtgaaggagcaggttatgagagcacttacaaccaagcctagctccctggaccagttcaagagcaaactgcagaacctgagctacactgagatcctgaaaatccgccagtccgagaggatgaaccaggaagatttccagtcccgcccgattttggaactaaaggagaagattcagccagaaatcttagagctgatcaaacagcaacgcctgaaccgccttgtggaagggacctgctttaggaaactcaatgcccggcggaggcaagacaagttttggtattgtcggctttcgccaaatcacaaagtcctgcattacggagacttagaagagagtcctcagggagaagtgccccacgattccttgcaggacaaactgccggtggcagatatcaaagccgtggtgacgggaaaggactgccctcatatgaaagagaaaggtgcccttaaacaaaacaaggaggtgcttgaactcgctttctccatcttgtatgactcaaactgccaactgaacttcatcgctcctgacaagcatgagtactgtatctggacggatggactgaatgcgctactcgggaaggacatgatgagcgacctgacgcggaatgacctggacaccctgctcagcatggaaatcaagctccgcctcctggacctggaaaacatccagatccctgacgcacctccgccgattcccaaggagcccagcaactatgacttcgtctatgactgtaactgaagtggccgggcccagacatgccccttccaaaactggaacacctagctaacaggagagaggaatgaaaacacacccacgccttggaaccgtcctttggtaaagggaagctgtgggtccacattcccttcagcatcacctctagccctggcaactttcagcccctagctggcatcttgctcaccgccctgattctgttcctcggctccactgcttcaggtcacttcccatggctgcagtccactggtgggacaagagcaaagcccactgccagtaagaaggccaaagggcccttccatcctagccctctgcaggcatgcccttccttcccttgggcaggaaagccagcagccccagactgcccaaaaacttgcccaccagaccaagggcagtgccccaaggcccctgtctggaggaaatggcctagctatttgatgagaagaccaaaccccacatcctcctttcccctctctctagaatcatctcgcaccaccagttacacttgaattaagatctgcgctcaaatctcctcccacctctctccctgcttttgccttgctctgttcctctttggtcccaagagcagcagccgcagcctcctcgtgatcctccctagcataaatttcccaaacagtccacaggtcccatgcccactttgcgtctgcactgtgatcgtgacaaatcttccctcctcaccagctagtctggggtttcctctccctgccccaggccagaactgccttcttcatttccacccacgctcccagcctcttagctgaaagcacaaatggtgaaatcagtagtctcgctccatctctaatagactaaacctaaatgcctctaggacggactgttgctatccaagcgtttggtgttaccttctcctgggaggtcctgctgcaactcaagttccacaggatggtcaagctgtcagacatccaagtttacatcattgtaattattactggtatttacaatttgcaagagttttgggttagttttttttttttttttgctttgtttttgtacaaaagagtctaacattttttgccaaacagatatatatttaatgaaaagaagagatacataaatgtgtgaatttccagtttttttttaattattttaatcccaaacatcttcctgaaaataacattcccttaaacatgctgtggaataaaatggattgtgatgatttggaaaaaaaaaaaaaaaaaaaaaaaaaaaaaaaaaaaaaaaaa

SEQ ID NO: 3693 - DNA, 1594 bp, Homo sapiens
atcttgagactcgctaagcgtcccagccgcatccctcccgcagcgacggcggcccgggacccgcgggctgtgaaccatgaacacccgcaatagagtggtgaactccgggctcggcgcctcccctgcctcccgcccgacccgggatccccaggacccttctgggcggcaaggggagctgagccccgtggaagaccagagagagggtttggaggcagcccctaagggcccttcgcgggagagcgtcgtgcacgcgggccagaggcgcacaagtgcatacaccttgatagcaccaaatataaaccggagaaatgagatacaaagaattgcggagcaggagctggccaacctggagaagtggaaggagcagaacagagctaaaccggttcacctggtgcccagacggctaggtggaagccagtcagaaactgaagtcagacagaaacaacaactccagctgatgcaatctaaatacaagcaaaagctaaaaagagaagaatctgtaagaatcaagaaggaagctgaagaagctgaactccaaaaaatgaaggcaattcagagagagaagagcaataaactggaggagaaaaaaagacttcaagaaaaccttagaagagaagcatttagagagcatcagcaatacaaaaccgctgagttcttgagcaaactgaacacagaatcgccagacagaagtgcctgtcaaagtgctgtttgtggcccacaatcctcaacatggaaacttcctatcctgcctagggatcacagctgggccagaagctgggcttacagagattctctaaaggcagaagaaaacagaaaattgcaaaagatgaaggatgaacaacatcaaaagagtgaattactggaactgaaacggcagcagcaagagcaagaaagagccaaaatccaccagactgaacacaggagggtaaataatgcttttctggaccgactccaaggcaaaagtcaaccaggtggcctcgagcaatctggaggctgttggaatatgaatagcggtaacagctggggttctctattagttttttcgaggcacctaagggtatatgagaaaatattgactcctatctggccttcatcaactgacctcgaaaagcctcatgagatgctttttcttaatgtgattttgttcagcctcactgtttttaccttaatttcaactgcccacacacttgaccgtgcagtcaggagtgactggcttctccttgtcctcatttatgcatgtttggaggagctgattcctgaactcatatttaatctctactgccagggaaatgctacattatttttctaattggaagtataattagagtgatgttggtagggtagaaaaagagggagtcacttgatgctttcaggttaatcagagctatgggtgctacaggcttgtctttctaagtgacatattcttatctaattctcagatcaggttttgaaagctttgggggtctttttagattttaatccctactttctttatggtacaaatatgtacaaaagaaaaaggtcttatattcttttacacaaatttataaataaattttgaactccttctgtaaaaaaaaaaaaaaaaaaaaaa

SEQ ID NO: 3694 - DNA, 1529 bp, Homo sapiens; identical to SEQ ID NO: 551

SEQ ID NO: 3695 - DNA, 3067 bp, Homo sapiens; identical to SEQ ID NO: 530

SEQ ID NO: 3696 - DNA, 3070 bp, Homo sapiens
ggcgccgtcttgatactttcagaaagaatgcattccctgtaaaaaaaaaaaaaaaatactgagagagggagagagagagagaagaagagagagagacggagggagagcgagacagagcgagcaacgcaatctgaccgagcaggtcgtacgccgccgcctcctcctcctctctgctcttcgctacccaggtgacccgaggagggactccgcctccgagcggctgaggaccccggtgcagaggagcctggctcgcagaattgcagagtcgtcgcccctttttacaacctggtcccgttttattctgccgtacccagtttttggatttttgtcttccccttcttctctttgctaaacgacccctccaagataatttttaaaaaaccttctcctttgctcacctttgcttcccagccttcccatccccccaccgaaagcaaatcattcaacgacccccgaccctccgacggcaggagccccccgacctcccaggcggaccgccctccctccccgcgcgcgggttccgggcccggcgagagggcgcgagcacagccgaggccatggaggtgacggcggaccagccgcgctgggtgagccaccaccaccccgccgtgctcaacgggcagcacccggacacgcaccacccgggcctcagccactcctacatggacgcggcgcagtacccgctgccggaggaggtggatgtgctttttaacatcgacggtcaaggcaaccacgtcccgccctactacggaaactcggtcagggccacggtgcagaggtaccctccgacccaccacgggagccaggtgtgccgcccgcctctgcttcatggatccctaccctggctggacggcggcaaagccctgggcagccaccacaccgcctccccctggaatctcagccccttctccaagacgtccatccaccacggctccccggggcccctctccgtctaccccccggcctcgtcctcctccttgtcggggggccacgccagcccgcacctcttcaccttcccgcccaccccgccgaaggacgtctccccggacccatcgctgtccaccccaggctcggccggctcggcccggcaggacgagaaagagtgcctcaagtaccaggtgcccctgcccgacagcatgaagctggagtcgtcccactcccgtggcagcatgaccgccctgggtggagcctcctcgtcgacccaccaccccatcaccacctacccgccctacgtgcccgagtacagctccggactcttcccccccagcagcctgctgggcggctcccccaccggcttcggatgcaagtccaggcccaaggcccggtccagcacagaaggcagggagtgtgtgaactgtggggcaacctcgaccccactgtggcggcgagatggcacgggacactacctgtgcaacgcctgcgggctctatcacaaaatgaacggacagaaccggcccctcattaagcccaagcgaaggctgtctgcagccaggagagcagggacgtcctgtgcgaactgtcagaccaccacaaccacactctggaggaggaatgccaatggggaccctgtctgcaatgcctgtgggctctactacaagcttcacaatattaacagacccctgactatgaagaaggaaggcatccagaccagaaaccgaaaaatgtctagcaaatccaaaaagtgcaaaaaagtgcatgactcactggaggacttccccaagaacagctcgtttaacccggccgccctctccagacacatgtcctccctgagccacatctcgcccttcagccactccagccacatgctgaccacgcccacgccgatgcacccgccatccagcctgtcctttggaccacaccacccctccagcatggtcaccgccatgggttagagccctgctcgatgctcacagggcccccagcgagagtccctgcagtccctttcgacttgcatttttgcaggagcagtatcatgaagcctaaacgcgatggatatatgtttttgaaggcagaaagcaaaattatgtttgccactttgcaaaggagctcactgtggtgtctgtgttccaaccactgaatctggaccccatctgtgaataagccattctgactcatatcccctatttaacagggtctctagtgctgtgaaaaaaaaaatgctgaacattgcatataacttatattgtaagaaatactgtacaatgactttattgcatctgggtagctgtaaggcatgaaggatgccaagaagtttaaggaatatgggagaaatagtgtggaaattaagaagaaactaggtctgatattcaaatggacaaactgccagttttgtttcctttcactggccacagttgtttgatgcattaaaagaaaataaaaaaaagaaaaaagagaaaagaaaaaaaaagaaaaaagttgtaggcgaatcatttgttcaaagctgttggcctctgcaaaggaaataccagttctgggcaatcagtgttaccgttcaccagttgccgttgagggtttcagagagcctttttctaggcctacatgctttgtgaacaagtccctgtaattgttgtttgtatgtataattcaaagcaccaaaataagaaaagatgtagatttatttcatcatattatacagaccgaactgttgtataaatttatttactgctagtcttaagaactgctttctttcgtttgtttgtttcaatattttccttctctctcaatttttggttgaataaactagattacattcagttggcctaaggtggttgtgctcggagggtttcttgtttcttttccattttgtttttggatgatatttattaaatagcttctaagagtccggcggcatctgtcttgtccctattcctgcagcctgtgctgagggtagcagtgtatgagctaccagcgtgcatgtcagcgaccctggcccgacaggccacgtcctgcaatcggcccggctgcctcttcgccctgtcgtgttctgtgttagtgatcactgcctttaatacagtctgttggaataatattataagcataataataaagtgaaaatattttaaaactacaa

SEQ ID NO: 3697 - DNA, 1852 bp, Homo sapiens; identical to SEQ ID NO: 713

SEQ ID NO: 3698 - DNA, 619 bp, Homo sapiens; identical to SEQ ID NO: 658

SEQ ID NO: 3699 - DNA, 663 bp, Homo sapiens; identical to SEQ ID NO: 2492

SEQ ID NO: 3700 - DNA, 593 bp, Homo sapiens
caggacacgtgggtgggggaagctgagcgctgagaccaagggctaaagctgggagactgaaaaaatgcagaccgccggggcattattcatttctccagctctgatccgctgttgtaccaggggtctaatcaggcctgtgtctgcctccttcttgaatagcccagtgaattcatctaaacagccttcctacagcaacttcccactccaggtggccagacgggagttccagaccagtgttgtctcccgggacattgacacagcagccaagtttattggtgctggggcagccacagttggtgtggctggttcaggggctggcattggaaccgtgtttggcagcttgatcattggctatgccaggaacccgtctctcaagcagcagctcttctcctatgccattcttggctttgccctgtctgaggccatggggcttttctgtttgatggtcgccttcctcatcctcttcgccatgtgaggctccatggggggtcaccggcctgttgctactgcaactccacaccattcttggtgctggggtgtgttaagctttaccattaaacacaacgtttctctaaaaaaaaaaaaaaaaaaaa

SEQ ID NO: 3701 - DNA, 2798 bp, Homo sapiens; identical to SEQ ID NO: 1462

SEQ ID NO: 3702 - DNA, 2747 bp, Homo sapiens
ctctccctccccagtagacgctcgggcaccagccgcggcaaggatggagctgggttgctggacgcagttggggctcacttttcttcagctccttctcatctcgtccttgccaagagagtacacagtcattaatgaagcctgccctggagcagagtggaatatcatgtgtcgggagtgctgtgaatatgatcagattgagtgcgtctgccccggaaagagggaagtcgtgggttataccatcccttgctgcaggaatgaggagaatgagtgtgactcctgcctgatccacccaggttgtaccatctttgaaaactgcaagagctgccgaaatggctcatgggggggtaccttggatgacttctatgtgaaggggttctactgtgcagagtgccgagcaggctggtacggaggagactgcatgcgatgtggccaggttctgcgagccccaaagggtcagattttgttggaaagctatcccctaaatgctcactgtgaatggaccattcatgctaaacctgggtttgtcatccaactaagatttgtcatgttgagcctggagtttgactacatgtgccagtatgactatgttgaggttcgtgatggagacaaccgcgatggccagatcatcaagcgtgtctgtggcaacgagcggccagctcctatccagagcataggatcctcactccacgtcctcttccactccgatggctccaagaattttgacggtttccatgccatttatgaggagatcacagcatgctcctcatccccttgtttccatgacggcacgtgcgtccttgacaaggctggatcttacaagtgtgcctgcttggcaggctatactgggcagcgctgtgaaaatctccttgaagaaagaaactgctcagaccctgggggcccagtcaatgggtaccagaaaataacagggggccctgggcttatcaacggacgccatgctaaaattggcaccgtggtgtctttcttttgtaacaactcctatgttcttagtggcaatgagaaaagaacttgccagcagaatggagagtggtcagggaaacagcccatctgcataaaagcctgccgagaaccaaagatttcagacctggtgagaaggagagttcttccgatgcaggttcagtcaagggagacaccattacaccagctatactcagcggccttcagcaagcagaaactgcagagtgcccctaccaagaagccagcccttccctttggagatctgcccatgggataccaacatctgcatacccagctccagtatgagtgcatctcacccttctaccgccgcctgggcagcagcaggaggacatgtctgaggactgggaagtggagtgggcgggcaccatcctgcatccctatctgcgggaaaattgagaacatcactgctccaaagacccaagggttgcgctggccgtggcaggcagccatctacaggaggaccagcggggtgcatgacggcagcctacacaagggagcgtggttcctagtctgcagcggtgccctggtgaatgagcgcactgtggtggtggctgcccactgtgttactgacctggggaaggtcaccatgatcaagacagcagacctgaaagttgttttggggaaattctaccgggatgatgaccgggatgagaagaccatccagagcctacagatttctgctatcattctgcatcccaactatgaccccatcctgcttgatgctgacatcgccatcctgaagctcctagacaaggcccgtatcagcacccgagtccagcccatctgcctcgctgccagtcgggatctcagcacttccttccaggagtcccacatcactgtggctggctggaatgtcctggcagacgtgaggagccctggcttcaagaacgacacactgcgctctggggtggtcagtgtggtggactcgctgctgtgtgaggagcagcatgaggaccatggcatcccagtgagtgtcactgataacatgttctgtgccagctgggaacccactgccccttctgatatctgcactgcagagacaggaggcatcgcggctgtgtccttcccgggacgagcatctcctgagccacgctggcatctgatgggactggtcagctggagctatgataaaacatgcagccacaggctctccactgccttcaccaaggtgctgccttttaaagactggattgaaagaaatatgaaatgaaccatgctcatgcactccttgagaagtgtttctgtatatccgtctgtacgtgtgtcattgcgtgaagcagtgtgggcctgaagtgtgatttggcctgtgaacttggctgtgccagggcttctgacttcagggacaaaactcagtgaagggtgagtagacctccattgctggtaggctgatgccgcgtccactactaggacagccaattggaagatgccagggcttgcaagaagtaagtttcttcaaagaagaccatatacaaaacctctccactccactgacctggtggtcttccccaactttcagttatacgaatgccatcagcttgaccagggaagatctgggcttcatgaggccccttttgaggctctcaagttctagagagctgcctgtgggacagcccagggcagcagagctgggatgtggtgcatgcctttgtgtacatggccacagtacagtctggtccttttccttccccatctcttgtacacattttaataaaataagggttggcttctgaactacaaaaaaaaaaaaaaaa

SEQ ID NO: 3703 - DNA, 934 bp, Homo sapiens; identical to SEQ ID NO: 1526

SEQ ID NO: 3704 - DNA, 1803 bp, Homo sapiens
agctggaccccttggtaaaagacaaggccttctccaagaagaatatgaaagtgttactcagacttatttgtttcatagctctactgatttcttctctggaggctgataaatgcaaggaacgtgaagaaaaaataattttagtgtcatctgcaaatgaaattgatgttcgtccctgtcctcttaacccaaatgaacacaaaggcactataacttggtataaagatgacagcaagacacctgtatctacagaacaagcctccaggattcatcaacacaaagagaaactttggtttgttcctgctaaggtggaggattcaggacattactattgcgtggtaagaaattcatcttactgcctcagaattaaaataagtgcaaaatttgtggagaatgagcctaacttatgttataatgcacaagccatatttaagcagaaactacccgttgcaggagacggaggacttgtgtgcccttatatggagttttttaaaaatgaaaataatgagttacctaaattacagtggtataaggattgcaaacctctacttcttgacaatatacactttagtggagtcaaagataggctcatcgtgatgaatgtggctgaaaagcatagagggaactatacttgtcatgcatcctacacatacttgggcaagcaatatcctattacccgggtaatagaatttattactctagaggaaaacaaacccacaaggcctgtgattgtgagcccagctaatgagacaatggaagtagacttgggatcccagatacaattgatctgtaatgtcaccggccagttgagtgacattgcttactggaagtggaatgggtcagtaattgatgaagatgacccagtgctaggggaagactattacagtgtggaaaatcctgcaaacaaaagaaggagtaccctcatcacagtgcttaatatatcggaaattgaaagtagattttataaacatccatttacctgttttgccaagaatacacatggtatagatgcagcatatatccagttaatatatccagtcactaatttccagaagcacatgattggtatatgtgtcacgttgacagtcataattgtgtgttctgttttcatctataaaatcttcaagattgacattgtgctttggtacagggattcctgctatgattttctcccaataaaagcttcagatggaaagacctatgacgcatatatactgtatccaaagactgttggggaagggtctacctctgactgtgatatttttgtgtttaaagtcttgcctgaggtcttggaaaaacagtgtggatataagctgttcatttatggaagggatgactacgttggggaagacattgttgaggtcattaatgaaaacgtaaagaaaagcagaagactgattatcattttagtcagagaaacatcaggcttcagctggctgggtggttcatctgaagagcaaatagccatgtataatgctcttgttcaggatggaattaaagttgtcctgcttgagctggagaaaatccaagactatgagaaaatgccagaatcgattaaattcattaagcagaaacatggggctatccgctggtcaggggactttacacagggaccacagtctgcaaagacaaggttctggaagaatgtcaggtaccacatgccagtccagcgacggtcaccttcatctaaacaccagttactgtcaccagccactaaggagaaactgcaaagagaggctcacgtgcctctcgggtagcatggagaagttgccaagagttctttaggtgcctcctgtcttatggcgt

SEQ ID NO: 3705 - DNA, 1803 bp, Homo sapiens; identical to SEQ ID NO: 3704

SEQ ID NO: 3706 - DNA, 1339 bp, Homo sapiens
ggccatggtcagcgtgaacgcgcccctcggggctccagtggagagttcttacgacacgtccccatcagaaggcaccaacctcaacgcgcccaacagcctgggtgtcagcgccctgtgtgccatctgcggggaccgggccacgggcaaacactacggtgcctcgagctgtgacggctgcaagggcttcttccggaggagcgtgcggaagaaccacatgtactcctgcagatttagccggcagtgcgtggtggacaaagacaagaggaaccagtgccgctactgcaggctcaagaaatgcttccgggctggcatgaagaaggaagccgtccagaatgagcgggaccggatcagcactcgaaggtcaagctatgaggacagcagcctgccctccatcaatgcgctcctgcaggcggaggtcctgtcccgacagatcacctcccccgtctccgggatcaacggcgacattcgggcgaagaagattgccagcatcgcagatgtgtgtgagtccatgaaggagcagctgctggttctcgttgagtgggccaagtacatcccagctttctgcgagctccccctggacgaccaggtggccctgctcagagcccatgctggcgagcacctgctgctcggagccaccaagagatccatggtgttcaaggacgtgctgctcctaggcaatgactacattgtccctcggcactgcccggagctggcggagatgagccgggtgtccatacgcatccttgacgagctggtgctgcccttccaggagctgcagatcgatgacaatgagtatgcctacctcaaagccatcatcttctttgacccagatgccaaggggctgagcgatccagggaagatcaagcggctgcgttcccaggtgcaggtgagcttggaggactacatcaacgaccgccagtatgactcgcgtggccgctttggagagctgctgctgctgctgcccaccttgcagagcatcacctggcagatgatcgagcagatccagttcatcaagctcttcggcatggccaagattgacaacctgttgcaggagatgctgctgggagggtcccccagcgatgcaccccatgcccaccaccccctgcaccctcacctgatgcaggaacatatgggaaccaacgtcatcgttgccaacacaatgcccactcacctcagcaacggacagatgtccacccctgagaccccacagccctcaccgccaggtggctcagggtctgagccctataagctcctgccgggagccgtcgccacaatcgtcaagcccctctctgccatcccccagccgaccatcaccaagcaggaagttatctagcaagcc

SEQ ID NO: 3707 - DNA, 1369 bp, Homo sapiens
ggccatggtcagcgtgaacgcgcccctcggggctccagtggagagttcttacgacacgtccccatcagaaggcaccaacctcaacgcgcccaacagcctgggtgtcagcgccctgtgtgccatctgcggggaccgggccacgggcaaacactacggtgcctcgagctgtgacggctgcaagggcttcttccggaggagcgtgcggaagaaccacatgtactcctgcagatttagccggcagtgcgtggtggacaaagacaagaggaaccagtgccgctactgcaggctcaagaaatgcttccgggctggcatgaagaaggaagccgtccagaatgagcgggaccggatcagcactcgaaggtcaagctatgaggacagcagcctgccctccatcaatgcgctcctgcaggcggaggtcctgtcccgacagatcacctcccccgtctccgggatcaacggcgacattcgggcgaagaagattgccagcatcgcagatgtgtgtgagtccatgaaggagcagctgctggttctcgttgagtgggccaagtacatcccagctttctgcgagctccccctggacgaccaggtggccctgctcagagcccatgctggcgagcacctgctgctcggagccaccaagagatccatggtgttcaaggacgtgctgctcctaggcaatgactacattgtccctcggcactgcccggagctggcggagatgagccgggtgtccatacgcatccttgacgagctggtgctgcccttccaggagctgcagatcgatgacaatgagtatgcctacctcaaagccatcatcttctttgacccagatgccaaggggctgagcgatccagggaagatcaagcggctgcgttcccaggtgcaggtgagcttggaggactacatcaacgaccgccagtatgactcgcgtggccgctttggagagctgctgctgctgctgcccaccttgcagagcatcacctggcagatgatcgagcagatccagttcatcaagctcttcggcatggccaagattgacaacctgttgcaggagatgctgctgggagggtcccccagcgatgcaccccatgcccaccaccccctgcaccctcacctgatgcaggaacatatgggaaccaacgtcatcgttgccaacacaatgcccactcacctcagcaacggacagatgtgtgagtggccccgacccaggggacaggcagccacccctgagaccccacagccctcaccgccaggtggctcagggtctgagccctataagctcctgccgggagccgtcgccacaatcgtcaagcccctctctgccatcccccagccgaccatcaccaagcaggaagttatctagcaagcc

SEQ ID NO: 3708 - DNA, 1192 bp, Homo sapiens
ggccatggtcagcgtgaacgcgcccctcggggctccagtggagagttcttacgacacgtccccatcagaaggcaccaacctcaacgcgcccaacagcctgggtgtcagcgccctgtgtgccatctgcggggaccgggccacgggcaaacactacggtgcctcgagctgtgacggctgcaagggcttcttccggaggagcgtgcggaagaaccacatgtactcctgcagatttagccggcagtgcgtggtggacaaagacaagaggaaccagtgccgctactgcaggctcaagaaatgcttccgggctggcatgaagaaggaagccgtccagaatgagcgggaccggatcagcactcgaaggtcaagctatgaggacagcagcctgccctccatcaatgcgctcctgcaggcggaggtcctgtcccgacagatcacctcccccgtctccgggatcaacggcgacattcgggcgaagaagattgccagcatcgcagatgtgtgtgagtccatgaaggagcagctgctggttctcgttgagtgggccaagtacatcccagctttctgcgagctccccctggacgaccaggtggccctgctcagagcccatgctggcgagcacctgctgctcggagccaccaagagatccatggtgttcaaggacgtgctgctcctaggcaatgactacattgtccctcggcactgcccggagctggcggagatgagccgggtgtccatacgcatccttgacgagctggtgctgcccttccaggagctgcagatcgatgacaatgagtatgcctacctcaaagccatcatcttctttgacccagatgccaaggggctgagcgatccagggaagatcaagcggctgcgttcccaggtgcaggtgagcttggaggactacatcaacgaccgccagtatgactcgcgtggccgctttggagagctgctgctgctgctgcccaccttgcagagcatcacctggcagatgatcgagcagatccagttcatcaagctcttcggcatggccaagattgacaacctgttgcaggagatgctgctgggaggtccgtgccaagcccaggaggggcggggttggagtggggactccccaggagacaggcctcacacagtgagctcacccctcagctccttggcttccccactgtgccgctttgggcaagttgcttaa

SEQ ID NO: 3709 - DNA, 4131 bp, Homo sapiens; identical to SEQ ID NO: 436

SEQ ID NO: 3710 - DNA, 4115 bp, Homo sapiens
gacaggggctctgggcggccggggagcatgcccgcgcggctacgctgaatggcgcctcctctgcgacccctcgcccggctgcgaccgccggggatgctgctccgcgcgctcctgctcctgctgctgctcagtcctttgccaggagtgtggtgctttagcgaactgtcttttgtaaaagaaccacaggatgtaactgtcacaagaaaggacccagtcgttttagattgccaggctcacggagaagttcctattaaggtcacatggttgaaaaatggagcaaaaatgtctgaaaataaacggatcgaggttctttctaacggctctttatacatcagtgaggtggaaggcaggcgaggagagcagtccgatgaaggattttatcagtgcttggcaatgaacaaatatggagccattcttagtcaaaaagctcatcttgccttatcaactatttctgcatttgaagtccagccaatttccactgaggtccacgaaggtggagttgctcgatttgcatgcaagatttcatcccaccctcctgcagtcataacatgggagttcaatcggacaactctacctatgactatggacaggataactgccctaccaacaggagtattgcagatctatgatgtcagccaaagggattctggaaattatcgttgtattgctgccactgtagcccaccgacgtaaaagtatggaggcctcgctaactgtgattccagctaaggagtcaaaatccttccacacaccaacaattatagcaggtccacagaacataacaacatctcttcatcagactgtagttttggaatgcatggccacaggaaatcccaaaccaatcatttcttggagccgccttgatcacaaatccattgatgtctttaatactcgggtacttggaaatggtaatctcatgatatctgatgtcaggctacaacatgctggagtatatgtttgtcgggccactacccctggcacacgcaactttacagttgctatggcaactttaactgtattagctcctccttcatttgttgaatggccagaaagtttaacaaggcctcgagctggcactgctcgatttgtgtgtcaggcagaaggaatcccctctcccaagatgtcatggttgaaaaatggaaggaagatacattcgaatggtagaattaaaatgtacaacagtaaattggtaattaaccagattattcctgaagatgatgctatttatcagtgcatggctgagaatagccaaggatctattttatctagagccagactgactgtagtgatgtcagaagacagacccagtgctccctataatgtacatgctgaaaccatgtcaagctcagccattcttttagcctgggagaggccactttataattcagacaaagtcattgcctattctgtacactacatgaaagcagaaggtttaaataatgaagagtatcaagtagtcatcggaaatgacacaactcattatattattgatgacttagagcctgccagcaattatactttctacattgtagcatatatgccaatgggagccagccagatgtctgaccatgtgacacagaatactctagaggatgttcccctgagacctcctgaaattagtttgacaagtcgaagtcccactgatattctcatctcctggctgccaatcccagccaaatatcggcggggccaagtggtgctgtatcgcttgtctttccgcctaagtactgagaattcaatccaagttctggagctcccggggaccacgcatgagtaccttttggaaggcctgaaacctgacagtgtctacctggttcggattactgctgccaccagagtggggctgggagagtcatcagtatggacttcacataggacgcccaaagctacaagcgtgaaagcccctaagtctccagagttgcatttggagcctctgaactgtaccaccatttctgtgaggtggcagcaagatgtagaggacacagctgctattcagggctacaagctgtactacaaggaagaagggcagcaggagaatgggcccattttcttggataccaaggacctactctatactctcagtggcttagaccccagaagaaaatatcatgtgagactcctggcttacaacaacatagacgatggctatcaggcagatcagactgtcagcactccaggatgcgtgtctgttcgtgatcgcatggtccctcctccaccaccaccccaccatctctatgcgaaggctaacacctcatcttccatcttcctgcactggaggaggcctgcattcaccgctgcacaaatcattaactacaccatccgctgtaatcctgttggcctgcagaatgcttctttggttctgtaccttcaaacatcagaaactcacatgttggttcaaggtctagaaccaaacaccaaatacgaatttgccgttcgattacatgtggatcagctttccagtccttggagccctgtagtctaccattctactcttccagaagcaccagcaggcccaccagttggagtaaaagtgacattaatagaggatgacactgccctggtttcttggaaaccccctgatggcccagaaacagttgtgacccgctatactatcttatatgcatctaggaaggcctggattgcaggagagtggcaggtcttacaccgtgaaggggcaataaccatggctttgctagaaaacttggtagcaggaaatgtgtacattgtcaagatatctgcatccaatgaggtgggagaaggacccttttcaaattctgtggagctggcagtacttccaaaggaaacctctgaatcaaatcagaggcccaagcgtttagattctgctgatgccaaagtttattcaggatattaccatctggaccaaaaatcaatgactggcattgctgtaggtgttggcatagccttgacctgcatcctcatctgtgttctcatcttgatataccgaagtaaagccaggaaatcatctgcttccaagacggcacagaatggaactcaacagttacctcgtaccagtgcctccttagctagtggaaatgaggtaggaaagaacctggaaggagctgtaggaaatgaagaatctttaatgccaatgatcatgccaaacagcttcattgatgcaaagggaggaactgacctgataattaatagctatggtcctataattaaaaacaactctaagaaaaagtggttttttttccaagactcaaagaagatacaagttgagcagcctcaaagaagatttactccagcggtctgcttttaccagccaggcaccactgtattaatcagtgatgaagactcccctagctccccaggtcagacaaccagcttctcaagaccctttggtgttgcagctgatacagaacattcagcaaatagtgaaggcagccatgagactggggattctgggcggttttctcatgagtccaacgatgagatacatctgtcctcagttataagtaccacaccccccaacctctgattctttcactggcagtgattcaggtggagattccgcattgaggaagtgtgaagaccctgctgtgtcatctgttagtgagcagacttcctccttagttctgcagccgccatctgccatgctatgctttgataaaaatgattttccaatctagacggccatgctcaggtattctcaccattaaatctgttcgaaggacaatgaacagggaaccaaagccttttgtgaaaatcttaatatctttatggggtattttagctttttttgaatgtgttttgttttttatttttaaacttgtgtaatttgaatgtttcattgtcagcaatgtgaaagaacggtcgagatgtttgactggattataaaatatatcactggagcaaagggaagacttttgaaagcccctttgctgactatctacctcagtttgcctcccggcaaactctgaagacaactttgttacctcatttgttgttatagtttatctcagctacataaccaatgatacttcctagtagtattgtgttttcattgctgtacgtgtaatgtgtgtgatcaaaggagtcatataggtagatgagtaagaatgtttatctgaagctctgatttttttaaaaaaa

SEQ ID NO: 3711 - DNA, 4955 bp, Homo sapiens; identical to SEQ ID NO: 2396

SEQ ID NO: 3712 - DNA, 1918 bp, Homo sapiens
agagcaggcacaaggttcgctgccatgactgatgtgaagcgacctgacgcacaagcggagacttttctccttggcagccaacaacctgcagcaggcaaggcgggcgggggaggaaaccccgaggaggcgctcccggccgcctctttgctgagatagcaggagcagcagcctgaggagccacgagctcagcgtcactgagctagtgcgggtgcaggggcgctcaggcaggcgcacaggccgggagccgcttctgccgctcaggcggccgcgctgcaggaagccgcgccgcgctgcccgagcgcccggggctggcccgcgagcgggaggagccggcagccgcgctccgcccggcgctgagattcgtgccacctgcctcgaacaccacggaggcgagaggaacccagagagctcggcctctcgtcccgttctcgaaaagcagcctatcgtgacggagccgggagaaggctagcgtttcaatcctgtgcaggactgggatttttcttctcataatttgggggagccggagtagaggtcagagggacaggcgaggatctcaaaaagagaccgagggttgtgaacatggttaccccctcctatcattggaaaatctccttgacatttttcacactttgaagcagctgcagctggtgtcgtcggaaaagggggtgggaaaaaagagagggggcggggagagcggtgagacacagccaagagccatgagcggcgcctcctcgcctgccaatcctggcacctgtgcgccgagccactgcaccgaggaggaccctactccgggtgaacaccgggcttgaagccacggacacccagccccagtgcagcgggttctcgccggcgggacctgcagccgcccactcgggccaccgccaccgcctcctgcagttgcggagcgctcagcccctccgagacgcccgctgcgccctggcccctggggatcctcgccctgcacaggcgtggcaacgggcaggggttgttacggagttgggtgcaggattcgcctttcctgcttgtctcttctccgcccaggatttattgtctgtggagccttctgggggcggggagggagctgcgcctccgccaccgccgccgccgccgccgctgctgctgcggtcgctagcgcggcgcgctgggcaggctgaggctggggagtggacgcgctcctgcctcccccgccggcgcttcgggcttcccctcagccgcttcccgcgggaacctctccagccgtccacctgaagggcactggcatcatggtctaacgtggcaccttcctggattcccctctatctcctgttcttcctaccttctactccttccctcctcttctcctccgaagaccctggcgcccactccactgcggacccctgaacacttaaggaataacccttggcagctgcacgactacgctctccgaaacctcatgggcagtttctcccgccggcgatgatggagaacctaataaggggaaggaatcccccgcaataccagagaagtccttgtaaagaggttcgtgcagcacttcggaagaggcctgaagaggagtgagaatcgcttgaacccagcaggcggaggttgcagtgaaccaagatcacgccactgcactccagactgggcgacagaacgagactccatctcaaaaaacacatgaaaacctatgtctttgtgaatgagttatttggggctattcatatggaatataaatgtgagagcagtttgagagatggattagaatagcaagcaacaggacacatagcacataacatgcaataaacattgcttatgataattatttgagaatcaagaaatataaatcaaattggacaaatttatttttgaaaagaagttcttgctcacaatttgtaaagaagaataaagtatgataaattataaaaaaaaaaaaaaaaaa

SEQ ID NO: 3713 - DNA, 2745 bp, Homo sapiens
gcacgaggaggagtcaggcttaaaacttgttggaggggagtaaccagcctgctcctctctctctcctcctcgtctgcgccgcgtttcagaggttgcccatcagccttgtgatttatttttatatctgctttttataaagagagaaatatatatatatatatatatatttttttttcttcttaagagaaaattcctgttccaagagaaaataaggcaacatcaatgaaggagagaagagccagccagaaattatccagcaaatctatcatggatcctaatcagaacgtgaaatgcaagatagttgtggtgggagacagtcagtgtggaaaaactgcgctgctccatgtcttcgccaaggactgcttccccgagaattacgttcctacagtgtttgagaattacacggccagttttgaaatcgacacacaaagaatagagttgagcctgtgggacacttcgggttctccttactatgacaatgtccgccccctctcttaccctgattcggatgctgtgctgatttgctttgacatcagtagaccagagaccctggacagtgtcctcaaaaagtggaaaggtgaaatccaggaattttgtccaaataccaaaatgctcttggtcggctgcaagtctgatctgcggacagatgttagtacattagtagagctctccaatcacaggcagacgccagtgtcctatgaccagggggcaaatatggccaaacagattggagcagctacttatatcgaatgctcagctttacagtcggaaaatagcgtcagagacatttttcacgttgccaccttggcatgtgtaaataagacaaataaaaacgttaagcggaacaaatcacagagagccacaaagcggatttcacacatgcctagcagaccagaactctcggcagttgctacggacttacgaaaggacaaagcgaagagctgcactgtgatgtgaatctttcattatctttaatgaagacaaaggaatctagtgtaaaaaacaacagcaaacaaaaaggtgaagtctaaatgaagtgcacagccaaagtcatgtataccagaggcttaggaggcgtttgagaggatactcatctttttggaatcctgaccttaggttcggcatgtagaccaagtgatgagaagtgaatacatggaagagtttttaagtgtgacttgaaaaatatgccaaaaaatgagagatacaaatgagctagaggaagatgaggggggatgcgagtacctccaagaagaaaaatcacactctgaatggtgcttgcatttttgggtttttttttttttttgttataatctattcatggatctccactttgatttaatttttaaatgttttaatctcctttacaaaaagtatacgttaatataccgtcctcaagggggaactggcactgtgaccttagcatttagttttctagaggatgtgatctaatttctttctagctcatcattaaaaaggaaattgtatcaggacccatgggatatatccagaggcaaactttatgaggctttgaaatcttgccttcctgaagatagctgagtaggatggttctaaggaaagcctttgcaatcttgcaagatttgtagaccagcactacaaagatcgcatagatcaaataggaaaaaaaatgtcgatttttattcagtctgatggttctgttcttcattgtgattgtcattaaaaagtggtaaattgctcaatgtaatatttttgtgcgctgtttagaagttgtgtgattttttgccatcgttgataaaaatgcaaagtcaaataaaaggtgtcttggtttgatgtcatagaatgatccaaggagagaaaaaaggtagttactgttttcaccagaaaaggtaatgagtgaaggaaagaatagtagcagaaagcacagtttgtgagtaaagctgtctggaattaagttaccaaaaatacaaagcaaaaggactattattttgggttgaagctccaaaactgactagcatctgataatctgttggtttatttcacttttcattaaatgaacattgatgagagaagatgccacttacccaagctttagagaaaatccctagtggaagattatatgataaactttcagtcctgacataacactagggcatttctagagtgtcattgctaaaacctcactgaacagatgcagaccaaggtctgtgttcagcacttggtctctgttgttacgtaaaataataagcatttaaaatagtttacagatatttttgaccagttccttttagagattctttcagagaagaaaccagatctgacctgtttattgttggcgcttgttgaaaacgagctttctttcccatgatagtgcttcgtttttgaagtgttgaagctgtgctccccttaaatcgtggcaggagagattaaggtaattacaacactcagttctatgtcttacaagcactttgtcttgtctctgcaagaaaattcgattccagtcatttcccataaaatacagacattttaccaacataatatgctttgattgatgcagcattatgctttgggcagtattacaaaatagctggcgagtgctttctgtatttaaatattgtaaaaagaaaataagttataactgttataaacgagcaattttgttcgattttttaaactgttgaagtcactgtgtatgtttgtttggtcaatgtttccgcagtatttattaaaacatacttttttttttcttcaaataaaaaagtaaccatg

SEQ ID NO: 3714 - DNA, 464 bp, Homo sapiens; identical to SEQ ID NO: 2367

SEQ ID NO: 3715 - DNA, 2657 bp, Homo sapiens; identical to SEQ ID NO: 750

SEQ ID NO: 3716 - DNA, 5160 bp, Homo sapiens
gcgcaccccagcggagccaagccccacgctggccggacagggccgcctgtcgccgggctgctgagaactagccctagacctctgcgtgagggttcttctgccgaagacatcaccagtgtgtggagcctgccacacccacccgctgccaaaccacggcctttacctgtgtcttccggtgtttcccgtgcgacccatcctgtgggagtgcctcgtgggctgccccagagttcaccccacactcagcagcaccaatggtgaagatgacaagatcgaagactttccaggcatatctgccctcctgccaccggacctacagctgcattcactgcagagctcacttggccaatcatgatgaactaatttccaagtcattccaaggaagtcaaggacgagcatacctctttaactcagtagttaatgtgggctgtgggcctgcagaagagcgagtgttgctaacaggactgcatgcagtcgcagacatttactgtgaaaactgcaaaaccactctgggctggaaatacgaacatgcttttgaaagcagccagaaatataaagaaggcaaatacatcattgaactagcacacatgatcaaggacaatggctgggactgattggacagcatctacccaacccagtgtccacgtgaacgccattcaaccgaacattcttcccaagcgtgagagagtgactgacacttggttccatccatttaggggccttgccatccggggcatcctcccaccctgacgccatctttctggtgaccggcctctaaatcgctgtctctctgtctctttgctttgtatctgtttgtgagttgatcctggcttctctctctgttctagttttggctgaaaacaaaacaacaaaaggaacagatccttgaccgcatggcggcagcccaccttggtaagggccccagggcccatgcgagagctgcctgatggcctcttgtcaggagagcagtggcacgggggcgtgaggaagagggaaaggggaaactctaagggtcctggcgcggggaaggggtggaagggtggaggtaggaacaaaattgcgccgctcctggagacctgataacttaggcttgaaataattgacttgtctaaaaggacaaagagaaaaaaaaaatacctcatgactgcattctctctgactagaagcttctgttcctgacaccaaatgtgccaggttagcaaatgagcacaagatgtggccctgattctagttggtggggcaagggcctggttctcctgggctgagtgggggagtgtcctggcagcagcgagtgacctgggcagtggccaggtgggtgcgatgactctgatgcctcactcagtctctgggcaatcatcatctttgcctctagccaccgtagataaggtgtgaagggactgctgtttgcaatgggcttaccatccaaatatcccaaaggctttgaccagcaaccaagtaaaatcagtaattgaggagagcagggcacaaaggggctgcagtttgggagctcctgaagaaatggctcagatattgagtcagagaaataaaaagtaggatcagttagcaattctaactgcccttccttctgacccctcataagaggagtgtggtgagggaggggactgggtaggggtcatcccaggaggaggggtttacattggaaccagttcaggttcggtgcatctttcctcttcggttttacagtggcttccgtgggatcgtcaatttcttgttcttagagtttcgggtgtttttctccagtcttgttactgtagactgtagaaagcacgggccccaggctctgagcttagtaataacctggctggtagattcctcatgcccctaattgtcccacttaggcctgaatgtcttgcatggagagaaatctcctgtcagtgtggtccagcagcagggaggagttctgcccaaattccgatatcaccccttcccccatccaagcatccttcgattagggaagtggagagcacatccctgtaaggcccataagagaaagaggagtttgttacatttaatcaacactgtgaagtctgttctacagcaattcagccattacacagtatatgactgaaactcatttaactgggttaatttcatttcttagactgaatatattattgttaagatacgtgtgcgtgttaggtaattctcagcatctcctccaagtaggccgaccttctcggaaaattcaccctaaaagtctcacaaaagaatgagttcatggggagattctgtaaagtgatgaactgagatgaaagcagccaacagcccaggagcttttcagaatagcgtctgcagcagaaccagtttccattcagagcgcgtccttggtggaaatgcttttttgtgtgtctccacgcgctgatggtggaatgggagccccaagacgtgtgggcttagaaatcaacttttgttccccaaggcttcttgtccagatctttccagtgctttcatagccctgggagatcaagttgttctccccactttactgcaaggtagactgaagttcagaagaaatactgaatttctgctcccagaagaatagtttctctggctcacaggcccaagttctcaatgaaatcgttttttaactttcacattcctaagctggcttcccggcacagaagccatggatttcccctctctcccttccccctcctcaaggaaatagtcttcctttatggattttcattggactctttcctcagcgattgtcctggctgtttattgatagtccttcccataagaaaatggggttaaacatggggtaggtattttgtctttcaaactacaaatggaatgtggtgacataaactagacatggggtgccctcaagtttccaaggggaccaatgtgccactgttcttccttggggatgaggcctttgactgttggatggatcagagcaggctccagtcagaccctggttctgaatgttttttttttcggtgactatccagtgagccttcagtgggtgcaaggcgccatacttgctgtgagagagctgagtagagtgttggtttttccataactacagggggaaaaaaagtcattaggctttccctttgtgtcagtgaaaccaaaagtgcttcttacaacgttcgctctgttcatgggttgtctatctaacattgagcagcattggagaggccacagctgagctatggagatgctaaattaactcatggcctcagtcagttcattctttaatttcctcaccaaattattgacttagagcataaccaaagacctcattcattcaccccaggtgggttggggtaattggagtttgttggtgaagtttgggggcggggtgttgggagtagagacagggtaaggggacgtgagaaaggaaaaggcatgaagttctatacctcagccagcagctgccttcgtttggaactgaagtccagccagcagactctctagctccatctcccctgtgccaccctaggtcatatgaccttggccaccttggagtagacccagacccctcgggacccgggacattagtctcaggctgctgatggattgatttgacatgaaccaaacacagccaaactcgatacccacaagctgtcagctgaacctgactgagtgttcttcctgagttcacgaggataggctagagtgcatttttactggtggatcagtgtgtgcgaaagagatgaccctttataaagagattttcaagtggatatatataaaagaaacagttgcttgtaaaatatacttttgtaaataatatttaattttttaaataatatatttggtgctgttttctcagatcccctgagagcactttttattttccttttaaattctatggtttcctttgcatttcttgaagtatattttaagggaaacagtgatcaccaatacatgttttcagttttttttttttttaaggtctctatcactttaatctggatcaaggctttgaagcaatgcctctctgcattttttccccagtggaacagactctgcagtacattaatcaggttgagaattgaaatattttcttgcatcagtattggctagaaaagaaaataaataaaaccaagttaatttagtagtaacaacttacagtgattcttcctgttggaagaatttccaacaaatcagaatcacgtttttagttgtgcgtgtgcgcgcacacgtgtgtaaaaagcactttcgattgtgcctcctgttttctcgagtggggacactttaactacagtttacacctcgggcgcataaagtttttcttctctttctctctggttgtttctgtttctgagtggaccaacagcagaacccacgaggatttgttttgagtatggagctgttgcgggtttgctcctttttcttgctttgcgtgctcagtttttacagactgtaaaggagatgtgttgtttgtgaagatggagcagagtcaaatctgtgcttctaactgagatgagagtgtattaatcacgtatcgcagggctccagctgttttagaagccacatcatgttaaacattaactggtttggattaaaagaacattaatattataatacacatatcttagtggtaaacagctttttttttttaaggtcagattgcctcaggtttagaaagaggctgagaaatcaaatcttgaacacaatcaacttacatattttaaaggaatctgcctcaaatgagaaaatatgctagttatctagatagaggaaagagatatttacttttttaaaaattaaaatagttatgaaatctggcagaaaaggtaaagcctagaagaaactatgaaagctattctcatgttaccaaattctatctgcgcatatgtttttgtataacatttcggtgacagtgggagtcggttccctttcccaacctgcagagactatcttccaatacagaatctgtctatttatgcttgtgtttacaaactgtatttgttgggtttgggtttttgttttctttggtggcatttttcaggtcactttgcttctataacaaaggtaattgttttcaaataatttgtcttcaccttttcctgtatttgtacatagtgattcagtattagagaaaagtgcattgtttctgtcatatttccaatctgtgttggtgctcatttgagaaaataaaagttttcaaatattaaaaaaaaaaaa

SEQ ID NO: 3717 - DNA, 1047 bp, Homo sapiens; identical to SEQ ID NO: 73

SEQ ID NO: 3718 - DNA, 2869 bp, Homo sapiens; identical to SEQ ID NO: 109

SEQ ID NO: 3719 - DNA, 939 bp, Homo sapiens
atggatggagagaatcactcagtggtatctgagtttttgtttctgggactcactcattcatgggagatccagctcctcctcctagtgttttcctctgtgctctatgtggcaagcattactggaaacatcctcattgtgttttctgtgaccactgaccctcacttacactcccccatgtactttctactggccagtctctccttcattgacttaggagcctgctctgtcacttctcccaagatgatttatgacctgttcagaaagcgcaaagtcatctcctttggaggctgcatcgctcaaatcttcttcatccacgtcgttggtggtgtggagatggtgctgctcatagccatggcctttgacagatatgtggccctatgtaagcccctccactatctgaccattatgagcccaagaatgtgcctttcatttctggctgttgcctggacccttggtgtcagtcactccctgttccaactggcatttcttgttaatttagccttctgtggccctaatgtgttggacagcttctactgtgaccttcctcggcttctcagactagcctgtaccgacacctacagattgcagttcatggtcactgttaacagtgggtttatctgtgtgggtactttcttcatacttctaatctcctacgtcttcatcctgtttactgtttggaaacattcctcaggtggttcatccaaggccctttccactctttcagctcacagcacagtggtccttttgttctttggtccacccatgtttgtgtatacacggccacaccctaattcacagatggacaagtttctggctatttttgatgcagttctcactccttttctgaatccagttgtctatacattcaggaataaggagatgaaggcagcaataaagagagtatgcaaacagctagtgatttacaagaggatctcataa

SEQ ID NO: 3720 - DNA, 1040 bp, Homo sapiens; identical to SEQ ID NO: 1960

SEQ ID NO: 3721 - DNA, 1542 bp, Homo sapiens; identical to SEQ ID NO: 1578

SEQ ID NO: 3722 - DNA, 1815 bp, Homo sapiens
ggaaagcgcatgcgcgtcgggcacagcgcgtgcagcctcgtgcagctcttctggtctccggcgcccgcccctcagacgtaatgttgaattaaagaaaatactttatcagaagaagatggccactgcccagttgcagaggactcccatgagtgcactggtatttcccaataagatatcaactgaacaccagtctttggtgttagtgaagaggcttctagcagtttcagtatcctgtatcacgtatttgaggggaatattcccagaatgcgcttatggaacaagatatctagatgatctttgtgtcaaaatactgagagaagataaaaattgcccaggatctacacagttagtgaaatggatgctaggatgttatgatgctttacagaaaaaatatgtatacacaaacccagaagatcctcagacaatttcagaatgttaccaattcaaattcaaatacaccaataatggaccactcatggacttcataagtaaaaaccaaagcaacgaatctagcatgttgtctactgacaccaagaaagcaagcattctcctcattcgcaagatttatatcctaatgcaaaatctggggcctttacctaatgatgtttgtttgaccatgaaacttttttactatgatgaagttacacccccagattaccagcctcccggttttaaggatggtgattgtgaaggagttatatttgaaggggaacctatgtatttaaatgtgggagaagtctcaacaccttttcacatcttcaaagtaaaagtgaccactgagagagaacgaatggaaaatattgactcaactatactatcaccaaaacaaataaaaacaccatttcaaaaaatcctgagggacaaagatgtagaagatgaacaggagcattatacaagtgatgatttggacattgaaactaaaatggaagaacaggaaaaaaaccctgcatcttctgaacttgaagaaccaagtttagtttgtgaggaagatgaaattatgaggtctaaagaaagtccagatctttctatttctcattctcaggttgagcagttagtcaataaaacatctgaacttgatatgtctgaaagcaaaacaagaagtggaaaagtctttcagaataaaatggcaaatggaaatcaaccagtaaaatcttccaaagaaaatcggaagagaagtcaacatgaatctgggagaatagtcctccatcactttgattcttctagtcaagagtcagtgccaaaaaggagaaagtttagtgaaccaaaggaacatatataaaaattatttttgttctgcaggcttgcagagttcttctcaccatttaaactgaaggaccctatattatatttccctaactctgaagatgtatatgtagtttaaagcagtttgtacactaaaactaagtttttggctgactgtcatattgtggtccttaatcttgagataaatccaatagaacttttgaataaaagcaaaagtacaaatgtcataattgattcggtaataagtaaaatttcaaaattgattttgttcattacctacttaatatttcctttaaatatatactaactgttaaggccctctaatgccatttttctaaacagtaatgtttactttggtattaaaatttggtatggattcactttttacttatgttaaaattataccatttaactggctcttttgtcattgtgctgttattaaaacaatgttcttcaatattttgacataatgtattaacattttaatatataatgtacaatttaaaaaaaaaaaaaaaaaaaaaaaaaaaaaaaaggaaaaaaaaaaaaagg

SEQ ID NO: 3723 - DNA, 939 bp, Homo sapiens; identical to SEQ ID NO: 3719

SEQ ID NO: 3724 - DNA, 2005 bp, Homo sapiens; identical to SEQ ID NO: 701

SEQ ID NO: 3725 - DNA, 2723 bp, Homo sapiens; identical to SEQ ID NO: 2509

SEQ ID NO: 3726 - DNA, 2760 bp, Homo sapiens
ggcgaagaggcggggtcgcccaagctgccgcgctggcattttctcctggacaaggagagagtgcggctgctgagagccgagcccagcaatcccgatcctctgagtcgtgaagaagggaggcagcgagggggttggggttggggcctgaggcaagcccccaggctccgctcttgccagagggacaggagccatggctcagaaaatggactgtggtgcgggcctcctcggcttccaggctgaggcctccgtagaagacagcgccttgcttatgcagaccttgatggaggccatccagatctcagaggctccacctactaaccaggccaccgcagctgctagtccccagagttcacagcccccaactgccaatgagatggctgacattcaggtttcagcagctgccgctaggcctaagtcagcctttaaagtccagaatgccaccacaaaaggcccaaatggtgtctatgatttctctcaggctcataatgccaaggatgtgcccaacacgcagcccaaggcagcctttaagtcccaaaatgctaccccaaagggtccaaatgctgcctatgatttttcccaggcagcaaccactggtgagttagctgctaacaagtctgagatggccttcaaggcccagaatgccactactaaagtgggcccaaatgccacctacaatttctctcagtctctcaatgccaatgacctggccaacagcaggcctaagacccctttcaaggcttggaatgataccactaaggccccaacagctgatacccagacccagaatgtaaatcaggccaaaatggccacttcccaggctgacatagagaccgacccaggtatctctgaacctgacggtgcaactgcacagacatcagcagatggttcccaggctcagaatctggagtcccggacaataattcggggcaagaggacccgcaagattaataacttgaatgttgaagagaacagcagtggggatcagaggcgggccccactggctgcagggacctggaggtctgcaccagttccagtgaccactcagaacccacctggcgcaccccccaatgtgctctggcagacgccattggcttggcagaacccctcaggctggcaaaaccagacagccaggcagaccccaccagcacgtcagagccctccagctaggcagaccccaccagcctggcagaacccagtcgcttggcagaacccagtgatttggccaaacccagtaatctggcagaacccagtgatctggccaaaccccattgtctggcccggccctgttgtctggccgaatccactggcctggcagaatccacctggatggcagactccacctggatggcagaccccaccgggctggcagggtcctccagactggcaaggtcctcctgactggccgctaccacccgactggccactgccacctgattggccacttcccactgactggccactaccacctgactggatccccgctgattggccaattccacctgactggcagaacctgcgcccctcgcctaacctgcgcccttctcccaactcgcgtgcctcacagaacccaggtgctgcacagccccgagatgtggcccttcttcaggaaagagcaaataagttggtcaagtacttgatgcttaaggactacacaaaggtgcccatcaagcgctcagaaatgctgagagatatcatccgtgaatacactgatgtttatccagaaatcattgaacgtgcatgctttgtcctagagaagaaatttgggattcaactgaaagaaattgacaaagaagaacacctgtatattctcatcagtacccccgagtccctggctggcatactgggaacgaccaaagacacacccaagctcggtctcctcttggtgattctgggtgtcatcttcatgaatggcaaccgtgccagtgaggctgtcctctgggaggcactacgcaagatgggactgcgtcctggggtgagacatcccctccttggagatctaaggaaacttctcacctatgagtttgtaaagcagaaatacctggactacagacgagtgcccaacagcaaccccccggagtatgagttcctctggggcctccgttcctaccatgagactagcaagatgaaagtgctgagattcattgcagaggttcagaaaagagaccctcgtgactggactgcacagttcatggaggctgcagatgaggccttggatgctctggatgctgctgcagctgaggccgaagcccgggctgaagcaagaacccgcatgggaattggagatgaggctgtgtctgggccctggagctgggatgacattgagtttgagctgctgacctgggatgaggaaggagattttggagatccctggtccagaattccatttaccttctgggccagataccaccagaatgcccgctccagattccctcagacctttgccggtcccattattggtcctggtggtacagccagtgccaacttcgctgccaactttggtgccattggtttcttctgggttgagtgagatgttggatattgctatcaatcgcagtagtctttcccctgtgtgaggctgaagcctcagattccttctaaacacagctatctagagagccacatcctgttgactgaaagtggcatgcaagataaatttatttgctgttccttgtctactgctttttttccccttgtgtgctgtcaagttttggtatcagaaataaacattgaaattgcaaagtgaaaaaaaaaaaaaaaaaa

SEQ ID NO: 3727 - DNA, 2665 bp, Homo sapiens
gccaaacaaaagaggacagcacttccggtcacgccatcgttgctgccttcttcgtcaagcccccaggctccgctcttgccagagggacaggagccatggctcagaaaatggactgtggtgcgggcctcctcggcttccaggctgaggcctccgtagaagacagcgccttgcttatgcagaccttgatggaggccatccagatctcagaggctccacctactaaccaggccaccgcagctgctagtccccagagttcacagcccccaactgccaatgagatggctgacattcaggtttcagcagctgccgctaggcctaagtcagcctttaaagtccagaatgccaccacaaaaggcccaaatggtgtctatgatttctctcaggctcataatgccaaggatgtgcccaacacgcagcccaaggcagcctttaagtcccaaaatgctaccccaaagggtccaaatgctgcctatgatttttcccaggcagcaaccactggtgagttagctgctaacaagtctgagatggccttcaaggcccagaatgccactactaaagtgggcccaaatgccacctacaatttctctcagtctctcaatgccaatgacctggccaacagcaggcctaagacccctttcaaggcttggaatgataccactaaggccccaacagctgatacccagacccagaatgtaaatcaggccaaaatggccacttcccaggctgacatagagaccgacccaggtatctctgaacctgacggtgcaactgcacagacatcagcagatggttcccaggctcagaatctggagtcccggacaataattcggggcaagaggacccgcaagattaataacttgaatgttgaagagaacagcagtggggatcagaggcgggccccactggctgcagggacctggaggtctgcaccagttccagtgaccactcagaacccacctggcgcaccccccaatgtgctctggcagacgccattggcttggcagaacccctcaggctggcaaaaccagacagccaggcagaccccaccagcacgtcagagccctccagctaggcagaccccaccagcctggcagaacccagtcgcttggcagaacccagtgatttggccaaacccagtaatctggcagaacccagtgatctggccaaaccccattgtctggcccggccctgttgtctggccgaatccactggcctggcagaatccacctggatggcagactccacctggatggcagaccccaccgggctggcagggtcctccagactggcaaggtcctcctgactggccgctaccacccgactggccactgccacctgattggccacttcccactgactggccactaccacctgactggatccccgctgattggccaattccacctgactggcagaacctgcgcccctcgcctaacctgcgcccttctcccaactcgcgtgcctcacagaacccaggtgctgcacagccccgagatgtggcccttcttcaggaaagagcaaataagttggtcaagtacttgatgcttaaggactacacaaaggtgcccatcaagcgctcagaaatgctgagagatatcatccgtgaatacactgatgtttatccagaaatcattgaacgtgcatgctttgtcctagagaagaaatttgggattcaactgaaagaaattgacaaagaagaacacctgtatattctcatcagtacccccgagtccctggctggcatactgggaacgaccaaagacacacccaagctcggtctcctcttggtgattctgggtgtcatcttcatgaatggcaaccgtgccagtgaggctgtcctctgggaggcactacgcaagatgggactgcgtcctggggtgagacatcccctccttggagatctaaggaaacttctcacctatgagtttgtaaagcagaaatacctggactacagacgagtgcccaacagcaaccccccggagtatgagttcctctggggcctccgttcctaccatgagactagcaagatgaaagtgctgagattcattgcagaggttcagaaaagagaccctcgtgactggactgcacagttcatggaggctgcagatgaggccttggatgctctggatgctgctgcagctgaggccgaagcccgggctgaagcaagaacccgcatgggaattggagatgaggctgtgtctgggccctggagctgggatgacattgagtttgagctgctgacctgggatgaggaaggagattttggagatccctggtccagaattccatttaccttctgggccagataccaccagaatgcccgctccagattccctcagacctttgccggtcccattattggtcctggtggtacagccagtgccaacttcgctgccaactttggtgccattggtttcttctgggttgagtgagatgttggatattgctatcaatcgcagtagtctttcccctgtgtgaggctgaagcctcagattccttctaaacacagctatctagagagccacatcctgttgactgaaagtggcatgcaagataaatttatttgctgttccttgtctactgctttttttccccttgtgtgctgtcaagttttggtatcagaaataaacattgaaattgcaaagtgaaaaaaaaaaaaaaaaaa

SEQ ID NO: 3728 - DNA, 2928 bp, Homo sapiens; identical to SEQ ID NO: 2497

SEQ ID NO: 3729 - DNA, 933 bp, Homo sapiens; identical to SEQ ID NO: 2272

SEQ ID NO: 3730 - DNA, 859 bp, Homo sapiens; identical to SEQ ID NO: 1759

SEQ ID NO: 3731 - DNA, 910 bp, Homo sapiens
ctcctcgccttcctccggctcagccgccgcgccgccgggctgctccttcttcctcctcgggcgcccgcggcgatgttcaaccgcgccgtgagccggctgagcaggaagcggccgccgtcagacatccacgacagcgatggcagttccagcagcagccaccagagcctcaagagcacagccaaatgggcggcatccctggagaatctgctggaagacccagaaggcgtgaaaagatttagggaatttttaaaaaaggaattcagtgaagaaaatgttttgttttggctagcatgtgaagattttaagaaaatgcaagataagacgcagatgcaggaaaaggcaaaggagatctacatgacctttctgtccagcaaggcctcatcacaggtcaacgtggaggggcagtctcggctcaacgagaagatcctggaagaaccgcaccctctgatgttccagaaactccaggaccagatctttaatctcatgaagtacgacagctacagccgcttcttaaagtctgacttgtttttaaaacacaagcgaaccgaggaagaggaagaagatttgcctgatgctcaaactgcagctaaaagagcttccagaatttataacacatgagcccccaaaaagccgggactggcagctttaagaagcaaaggaatttcctctcaggaccgtgccgggtttatcattgctttgttatttgtaaggactgaaatgtacaaaacccttcaatgggatgtgtgttttattaactgcttcaccagtaaattttgcatgatggctaagctaacataaaaaaagaataataataacttggaagttttagtttacaaaacagagattccttcaacactggacacgtcgagcattttgtagcttaattaaacctcatgtaaggccaaaaaaa

SEQ ID NO: 3732 - DNA, 7753 bp, Homo sapiens
gcccgcgccggctgtgctgcacagggggaggagagggaaccccaggcgcgagcgggaagaggggacctgcagccacaacttctctggtcctctgcatcccttctgtccctccacccgtccccttccccaccctctggcccccaccttcttggaggcgacaacccccgggaggcattagaagggatttttcccgcaggttgcgaagggaagcaaacttggtggcaacttgcctcccggtgcgggcgtctctcccccaccgtctcaacatgcttaggggtccggggcccgggctgctgctgctggccgtccagtgcctggggacagcggtgccctccacgggagcctcgaagagcaagaggcaggctcagcaaatggttcagccccagtccccggtggctgtcagtcaaagcaagcccggttgttatgacaatggaaaacactatcagataaatcaacagtgggagcggacctacctaggcaatgcgttggtttgtacttgttatggaggaagccgaggttttaactgcgagagtaaacctgaagctgaagagacttgctttgacaagtacactgggaacacttaccgagtgggtgacacttatgagcgtcctaaagactccatgatctgggactgtacctgcatcggggctgggcgagggagaataagctgtaccatcgcaaaccgctgccatgaagggggtcagtcctacaagattggtgacacctggaggagaccacatgagactggtggttacatgttagagtgtgtgtgtcttggtaatggaaaaggagaatggacctgcaagcccatagctgagaagtgttttgatcatgctgctgggacttcctatgtggtcggagaaacgtgggagaagccctaccaaggctggatgatggtagattgtacttgcctgggagaaggcagcggacgcatcacttgcacttctagaaatagatgcaacgatcaggacacaaggacatcctatagaattggagacacctggagcaagaaggataatcgaggaaacctgctccagtgcatctgcacaggcaacggccgaggagagtggaagtgtgagaggcacacctctgtgcagaccacatcgagcggatctggccccttcaccgatgttcgtgcagctgtttaccaaccgcagcctcacccccagcctcctccctatggccactgtgtcacagacagtggtgtggtctactctgtggggatgcagtggctgaagacacaaggaaataagcaaatgctttgcacgtgcctgggcaacggagtcagctgccaagagacagctgtaacccagacttacggtggcaactcaaatggagagccatgtgtcttaccattcacctacaatggcaggacgttctactcctgcaccacagaagggcgacaggacggacatctttggtgcagcacaacttcgaattatgagcaggaccagaaatactctttctgcacagaccacactgttttggttcagactcgaggaggaaattccaatggtgccttgtgccacttccccttcctatacaacaaccacaattacactgattgcacttctgagggcagaagagacaacatgaagtggtgtgggaccacacagaactatgatgccgaccagaagtttgggttctgccccatggctgcccacgaggaaatctgcacaaccaatgaaggggtcatgtaccgcattggagatcagtgggataagcagcatgacatgggtcacatgatgaggtgcacgtgtgttgggaatggtcgtggggaatggacatgcattgcctactcgcagcttcgagatcagtgcattgttgatgacatcacttacaatgtgaacgacacattccacaagcgtcatgaagaggggcacatgctgaactgtacatgcttcggtcagggtcggggcaggtggaagtgtgatcccgtcgaccaatgccaggattcagagactgggacgttttatcaaattggagattcatgggagaagtatgtgcatggtgtcagataccagtgctactgctatggccgtggcattggggagtggcattgccaacctttacagacctatccaagctcaagtggtcctgtcgaagtatttatcactgagactccgagtcagcccaactcccaccccatccagtggaatgcaccacagccatctcacatttccaagtacattctcaggtggagacctaaaaattctgtaggccgttggaaggaagctaccataccaggccacttaaactcctacaccatcaaaggcctgaagcctggtgtggtatacgagggccagctcatcagcatccagcagtacggccaccaagaagtgactcgctttgacttcaccaccaccagcaccagcacacctgtgaccagcaacaccgtgacaggagagacgactcccttttctcctcttgtggccacttctgaatctgtgaccgaaatcacagccagtagctttgtggtctcctgggtctcagcttccgacaccgtgtcgggattccgggtggaatatgagctgagtgaggagggagatgagccacagtacctggatcttccaagcacagccacttctgtgaacatccctgacctgcttcctggccgaaaatacattgtaaatgtctatcagatatctgaggatggggagcagagtttgatcctgtctacttcacaaacaacagcgcctgatgcccctcctgacccgactgtggaccaagttgatgacacctcaattgttgttcgctggagcagaccccaggctcccatcacagggtacagaatagtctattcgccatcagtagaaggtagcagcacagaactcaaccttcctgaaactgcaaactccgtcaccctcagtgacttgcaacctggtgttcagtataacatcactatctatgctgtggaagaaaatcaagaaagtacacctgttgtcattcaacaagaaaccactggcaccccacgctcagatacagtgccctctcccagggacctgcagtttgtggaagtgacagacgtgaaggtcaccatcatgtggacaccgcctgagagtgcagtgaccggctaccgtgtggatgtgatccccgtcaacctgcctggcgagcacgggcagaggctgcccatcagcaggaacacctttgcagaagtcaccgggctgtcccctggggtcacctattacttcaaagtctttgcagtgagccatgggagggagagcaagcctctgactgctcaacagacaaccaaactggatgctcccactaacctccagtttgtcaatgaaactgattctactgtcctggtgagatggactccacctcgggcccagataacaggataccgactgaccgtgggccttacccgaagaggccagcccaggcagtacaatgtgggtccctctgtctccaagtaccccctgaggaatctgcagcctgcatctgagtacaccgtatccctcgtggccataaagggcaaccaagagagccccaaagccactggagtctttaccacactgcagcctgggagctctattccaccttacaacaccgaggtgactgagaccaccattgtgatcacatggacgcctgctccaagaattggttttaagctgggtgtacgaccaagccagggaggagaggcaccacgagaagtgacttcagactcaggaagcatcgttgtgtccggcttgactccaggagtagaatacgtctacaccatccaagtcctgagagatggacaggaaagagatgcgccaattgtaaacaaagtggtgacaccattgtctccaccaacaaacttgcatctggaggcaaaccctgacactggagtgctcacagtctcctgggagaggagcaccaccccagacattactggttatagaattaccacaacccctacaaacggccagcagggaaattctttggaagaagtggtccatgctgatcagagctcctgcacttttgataacctgagtcccggcctggagtacaatgtcagtgtttacactgtcaaggatgacaaggaaagtgtccctatctctgataccatcatcccagctgttcctcctcccactgacctgcgattcaccaacattggtccagacaccatgcgtgtcacctgggctccacccccatccattgatttaaccaacttcctggtgcgttactcacctgtgaaaaatgaggaagatgttgcagagttgtcaatttctccttcagacaatgcagtggtcttaacaaatctcctgcctggtacagaatatgtagtgagtgtctccagtgtctacgaacaacatgagagcacacctcttagaggaagacagaaaacaggtcttgattccccaactggcattgacttttctgatattactgccaactcttttactgtgcactggattgctcctcgagccaccatcactggctacaggatccgccatcatcccgagcacttcagtgggagacctcgagaagatcgggtgccccactctcggaattccatcaccctcaccaacctcactccaggcacagagtatgtggtcagcatcgttgctcttaatggcagagaggaaagtcccttattgattggccaacaatcaacagtttctgatgttccgagggacctggaagttgttgctgcgacccccaccagcctactgatcagctgggatgctcctgctgtcacagtgagatattacaggatcacttacggagaaacaggaggaaatagccctgtccaggagttcactgtgcctgggagcaagtctacagctaccatcagcggccttaaacctggagttgattataccatcactgtgtatgctgtcactggccgtggagacagccccgcaagcagcaagccaatttccattaattaccgaacagaaattgacaaaccatcccagatgcaagtgaccgatgttcaggacaacagcattagtgtcaagtggctgccttcaagttcccctgttactggttacagagtaaccaccactcccaaaaatggaccaggaccaacaaaaactaaaactgcaggtccagatcaaacagaaatgactattgaaggcttgcagcccacagtggagtatgtggttagtgtctatgctcagaatccaagcggagagagtcagcctctggttcagactgcagtaaccactattcctgcaccaactgacctgaagttcactcaggtcacacccacaagcctgagcgcccagtggacaccacccaatgttcagctcactggatatcgagtgcgggtgacccccaaggagaagaccggaccaatgaaagaaatcaaccttgctcctgacagctcatccgtggttgtatcaggacttatggtggccaccaaatatgaagtgagtgtctatgctcttaaggacactttgacaagcagaccagctcagggagttgtcaccactctggagaatgtcagcccaccaagaagggctcgtgtgacagatgctactgagaccaccatcaccattagctggagaaccaagactgagacgatcactggcttccaagttgatgccgttccagccaatggccagactccaatccagagaaccatcaagccagatgtcagaagctacaccatcacaggtttacaaccaggcactgactacaagatctacctgtacaccttgaatgacaatgctcggagctcccctgtggtcatcgacgcctccactgccattgatgcaccatccaacctgcgtttcctggccaccacacccaattccttgctggtatcatggcagccgccacgtgccaggattaccggctacatcatcaagtatgagaagcctgggtctcctcccagagaagtggtccctcggccccgccctggtgtcacagaggctactattactggcctggaaccgggaaccgaatatacaatttatgtcattgccctgaagaataatcagaagagcgagcccctgattggaaggaaaaagacagacgagcttccccaactggtaacccttccacaccccaatcttcatggaccagagatcttggatgttccttccacagttcaaaagacccctttcgtcacccaccctgggtatgacactggaaatggtattcagcttcctggcacttctggtcagcaacccagtgttgggcaacaaatgatctttgaggaacatggttttaggcggaccacaccgcccacaacggccacccccataaggcataggccaagaccatacccgccgaatgtaggacaagaagctctctctcagacaaccatctcatgggccccattccaggacacttctgagtacatcatttcatgtcatcctgttggcactgatgaagaacccttacagttcagggttcctggaacttctaccagtgccactctgacaggcctcaccagaggtgccacctacaacatcatagtggaggcactgaaagaccagcagaggcataaggttcgggaagaggttgttaccgtgggcaactctgtcaacgaaggcttgaaccaacctacggatgactcgtgctttgacccctacacagtttcccattatgccgttggagatgagtgggaacgaatgtctgaatcaggctttaaactgttgtgccagtgcttaggctttggaagtggtcatttcagatgtgattcatctagatggtgccatgacaatggtgtgaactacaagattggagagaagtgggaccgtcagggagaaaatggccagatgatgagctgcacatgtcttgggaacggaaaaggagaattcaagtgtgaccctcatgaggcaacgtgttacgatgatgggaagacataccacgtaggagaacagtggcagaaggaatatctcggtgccatttgctcctgcacatgctttggaggccagcggggctggcgctgtgacaactgccgcagacctgggggtgaacccagtcccgaaggcactactggccagtcctacaaccagtattctcagagataccatcagagaacaaacactaatgttaattgcccaattgagtgcttcatgcctttagatgtacaggctgacagagaagattcccgagagtaaatcatctttccaatccagaggaacaagcatgtctctctgccaagatccatctaaactggagtgatgttagcagacccagcttagagttcttctttctttcttaagccctttgctctggaggaagttctccagcttcagctcaactcacagcttctccaagcatcaccctgggagtttcctgagggttttctcataaatgagggctgcacattgcctgttctgcttcgaagtattcaataccgctcagtattttaaatgaagtgattctaagatttggtttgggatcaataggaaagcatatgcagccaaccaagatgcaaatgttttgaaatgatatgaccaaaattttaagtaggaaagtcacccaaacacttctgctttcacttaagtgtctggcccgcaatactgtaggaacaagcatgatcttgttactgtgatattttaaatatccacagtactcactttttccaaatgatcctagtaattgcctagaaatatctttctcttacctgttatttatcaatttttcccagtatttttatacggaaaaaattgtattgaaaacacttagtatgcagttgataagaggaatttggtataattatggtgggtgattattttttatactgtatgtgccaaagctttactactgtggaaagacaactgttttaataaaagatttacattcc

SEQ ID NO: 3733 - DNA, 3031 bp, Homo sapiens; identical to SEQ ID NO: 2453

SEQ ID NO: 3734 - DNA, 939 bp, Homo sapiens; identical to SEQ ID NO: 2182

SEQ ID NO: 3735 - DNA, 5343 bp, Homo sapiens
gccccccctccccgcggcgccgcatcttgaatggaaacatggcggtgccggctcggacctgcggcgcctctcggcccggcccagcgcggactgcgcgcccctggcccggctgcggcccccaccctggccccggcacccggcgcccgacgtccgggcccccgcgcccgctgtggctgctgctgccgcttctaccgctgctcgccgcccccggcgcctctgcctacagcttcccccagcagcacacgatgcagcactgggcccggcgtctggagcaggaggtcgacggcgtgatgcggatttttggaggcgtccagcagctccgtgagatttacaaggacaaccggaacctgttcgaggtacaggagaatgagcctcagaagttggtggagaaggtggcaggggacattgagagccttctggacaggaaggtgcaggccctgaagagactggctgatgctgcagagaacttccagaaagcacaccgctggcaggacaacatcaaggaggaagacatcgtgtactatgacgccaaggctgacgctgagctggacgaccctgagagtgaggatgtggaaagggggtctaaggccagcaccctaaggctggacttcatcgaggacccaaacttcaagaacaaggtcaactattcatacgcggctgtacagatccctacggacatctacaaaggctccactgtcatcctcaatgagctcaactggacagaggccctggagaatgtgttcatggaaaaccgcagacaagaccccacactgctgtggcaggtcttcggcagcgccacaggagtcactcgctactacccggccaccccgtggcgagcccccaagaagatcgacctgtacgatgtccgaaggagaccctggtatatccagggggcctcgtcacccaaagacatggtcatcatcgtggatgtgagtggcagtgtgagcggcctgaccctgaagctgatgaagacatctgtctgcgagatgctggacacgctgtctgatgatgactatgtgaatgtggcctcgttcaacgagaaggcacagcctgtgtcatgcttcacacacctggtgcaggccaatgtgcgcaacaagaaggtgttcaaggaagctgtgcagggcatggtggccaagggcaccacaggctacaaggccggctttgagtatgcctttgaccagctgcagaactccaacatcactcgggccaactgcaacaagatgatcatgatgttcacggatggtggtgaggaccgcgtgcaggacgtctttgagaagtacaattggccaaaccggacggtgcgcgtgtttactttctccgtggggcagcataactatgacgtcacaccgctgcagtggatggcctgtgccaacaaaggctactattttgagatcccttccatcggagccatccgcatcaacacacaggaatatctagatgtgttgggcaggcccatggtgctggcaggcaaggaggccaagcaggtgcagtggaccaacgtgtatgaggatgcactgggactggggttggtggtaacagggaccctccctgttttcaacctgacacaggatggccctggggaaaagaagaaccagctgatcctgggcgtgatgggcattgacgtggctctgaatgacatcaagaggctgacccccaactacacgcttggagccaacggctatgtgtttgccattgacctgaacggctacgtgttgctgcaccccaatctcaagccccagaccaccaacttccgggagcctgtgactctggacttcctggatgcggagctagaggatgagaacaaggaagagatccgtcggagcatgattgatggcaacaagggccacaagcagatcagaacgttggtcaagtccctggatgagaggtacatagatgaggtgacacggaactacacctgggtgcctataaggagcactaactacagcctggggctggtgctcccaccctacagcaccttctacctccaagccaatctcagtgaccagatcctgcaggtcaagtattttgagttcctgctccccagcagctttgagtctgaaggacacgttttcattgctcccagagagtactgcaaggacctgaatgcctcagacaacaacaccgagttcctgaaaaactttattgagctcatggagaaagtgactccagactccaagcagtgcaacaacttccttctgcacaacctgatcttggacacgggcatcacgcagcagctggtagagcgtgtgtggagggaccaggatctcaacacgtacagcctactggccgtgttcgctgccacagacggtggcatcacccgagtcttccccaacaaggcagctgaggactggacagagaaccctgagcccttcaatgccagcttctaccgccgcagcctggataaccacggttatgtcttcaagcccccacaccaggatgccctgttaaggccgctggagctggagaatgacactgtgggcatcctcgtcagcacagctgtggagctcagcctaggcaggcgcacactgaggccagcagtggtgggcgtcaagctggacctagaggcttgggctgagaagttcaaggtgctagccagcaaccgtacccaccaagaccagcctcagaagtgcggccccaacagccactgtgagatggactgcgaggttaacaatgaggacttactctgtgtcctcattgatgatggaggattcctggtgctgtcaaaccagaaccatcagtgggaccaggtgggcaggttcttcagtgaggtggatgccaacctgatgctggcactctacaataactccttctacacccgcaaggagtcctatgactatcaggcagcctgtgcccctcagccccctggcaacctgggtgctgcaccccggggtgtctttgtgcccaccgttgcagatttccttaacctggcctggtggacctctgctgccgcctggtccctgttccagcagcttctctacggcctcatctaccacagctggttccaagcagaccccgcggaggccgaggggagccccgagacgcgcgagagcagctgcgtcatgaaacagacccagtactacttcggctcggtaaacgcctcctacaacgccatcatcgactgcggaaactgctccaggctgttccacgcgcagagactgaccaacaccaatcttctctttgtggtggccgagaagccgctgtgcagccagtgcgaggctggccggctgctgcagaaggagacgcactgcccagcggacggcccggagcagtgtgagctagtgcagagaccgcgataccggagaggcccgcacatctgcttcgactacaacgcgacagaagatacctcagactgtggccgcggggcctccttcccgccgtcgctgggcgtcctggtctccctgcaactgctgctcctcctgggcctgccgccccggccgcagcctcaagtcctcgtccacgcctctcgccgcctctgagcaccctgccccaccccacctccactcccacctcacccggcctcttcgcctttcccaccctcctgccccacactccccgccttagagcctcgtccctccctcactgaaggacctgagctggccaggccctgagagtctggtctgcgccttgggatggggagtcccaaagcgggacgccgcaggtgtttggcacccaaatcacatctcacctccgaactgttcaagtgtccccagacccttcttgcctgctgggctccccccagtgggatgggacagggaggccacacgcactggtgccaaaaccaggcctctgctgccgcccttcctggaggctgcctatgttgggggggaccctgcctcagctgacccggcctctctgccccacccaagcccaaacttggtttctgtgagaatagtggaggaaggtgagatggccagtttgaagcctgtgcctcccagcttaaatcctagcaggagagaggctctggggcagcccccatgggctcctgcccctttcaggcctacagccacatccccaagcccaccaggtgtcaggatagtcacagtgataccagttcagacactaccccatatacacctggaacattgaggatggaaactggactcacattcgacataccccactgggcacacgcacaaacacacacactatggggtggggtgggtgtaggggcttacaaagccttacacagggcgaggggttggtgggagggttggcacctgcacactccatctcctgctcaccacctgcctctaatctgagctgcagcctggctggtcctcccatttctaaagctgaatgtcaaacagtgccaaatgctggggcagggggtgaagaaccctctgtcccacccctagccaccagtgtcctccaagtgccccctcacctctccaggtgctcattgtaaccatttctcactagtgtcaggcccccagtgggaccacatgccactgcctgcacctttcggcagaggaacccccaccagacatcaccctttgccttagcaggggtgactttgtctctcctggctgggccatccttccgccaatctggcccttacacactcaggcctgtgcccactccctatctccttcccacccctacacacacactccctgcttgcaggaggccaaactgtccctcccttgctgaacacacacacacacacacacacacaggtggggactgggcacagctcttcacaccattcattctggtcatttcccccaaaggcatcccagcctgggggccagtggggaactgagggcaaggggatatagtgatggggctcagatggactgggaggagggggagggtgatgcattaattaatggcttcgttaattaatgtcatgttgcttgtcgctttctcagtgtgtgtgtgtggtccatgcccactgctggtgccagggtgggtgtccatgtgcacccggcctggatgccagctgtgtccttcgggggcgtgcgtgtaactgtagtgtagtcaggtgctcaatggagaatataaacatatacagaaaaatatatattttaagtttaaaaaacagaaaaacagacaaaacaatccccatcaggtagctgtctaacccccagctgggtctaatccttctcattacccacccgacctggctgcccctcaccttgggctgggggactggggggccatttccttttctctgccctttttttgttgttctattttgtacagacaagttggaaaaacaacagcgacaaaaaagtcaagaaactttgtaaaatatcgtgtgtgtgattccttgtaaaatattttcaaatggtttattacagaagatcagttattaaataatgttcatattttcacttcaaa

SEQ ID NO: 3736 - DNA, 5337 bp, Homo sapiens
gccccccctccccgcggcgccgcatcttgaatggaaacatggcggtgccggctcggacctgcggcgcctctcggcccggcccagcgcggactgcgcgcccctggcccggctgcggcccccaccctggccccggcacccggcgcccgacgtccgggcccccgcgcccgctgtggctgctgctgccgcttctaccgctgctcgccgcccccggcgcctctgcctacagcttcccccagcagcacacgatgcagcactgggcccggcgtctggagcaggaggtcgacggcgtgatgcggatttttggaggcgtccagcagctccgtgagatttacaaggacaaccggaacctgttcgaggtacaggagaatgagcctcagaagttggtggagaaggtggcaggggacattgagagccttctggacaggaaggtgcaggccctgaagagactggctgatgctgcagagaacttccagaaagcacaccgctggcaggacaacatcaaggaggaagacatcgtgtactatgacgccaaggctgacgctgagctggacgaccctgagagtgaggatgtggaaagggggtctaaggccagcaccctaaggctggacttcatcgaggacccaaacttcaagaacaaggtcaactattcatacgcggctgtacagatccctacggacatctacaaaggctccactgtcatcctcaatgagctcaactggacagaggccctggagaatgtgttcatggaaaaccgcagacaagaccccacactgctgtggcaggtcttcggcagcgccacaggagtcactcgctactacccggccaccccgtggcgagcccccaagaagatcgacctgtacgatgtccgaaggagaccctggtatatccagggggcctcgtcacccaaagacatggtcatcatcgtggatgtgagtggcagtgtgagcggcctgaccctgaagctgatgaagacatctgtctgcgagatgctggacacgctgtctgatgatgactatgtgaatgtggcctcgttcaacgagaaggcacagcctgtgtcatgcttcacacacctggtgcaggccaatgtgcgcaacaagaaggtgttcaaggaagctgtgcagggcatggtggccaagggcaccacaggctacaaggccggctttgagtatgcctttgaccagctgcagaactccaacatcactcgggccaactgcaacaagatgatcatgatgttcacggatggtggtgaggaccgcgtgcaggacgtctttgagaagtacaattggccaaaccggacggtgcgcgtgtttactttctccgtggggcagcataactatgacgtcacaccgctgcagtggatggcctgtgccaacaaaggctactattttgagatcccttccatcggagccatccgcatcaacacacaggaatatctagatgtgttgggcaggcccatggtgctggcaggcaaggaggccaagcaggtgcagtggaccaacgtgtatgaggatgcactgggactggggttggtggtaacagggaccctccctgttttcaacctgacacaggatggccctggggaaaagaagaaccagctgatcctgggcgtgatgggcattgacgtggctctgaatgacatcaagaggctgacccccaactacacgcttggagccaacggctatgtgtttgccattgacctgaacggctacgtgttgctgcaccccaatctcaagccccagaccaccaacttccgggagcctgtgactctggacttcctggatgcggagctagaggatgagaacaaggaagagatccgtcggagcatgattgatggcaacaagggccacaagcagatcagaacgttggtcaagtccctggatgagaggtacatagatgaggtgacacggaactacacctgggtgcctataaggagcactaactacagcctggggctggtgctcccaccctacagcaccttctacctccaagccaatctcagtgaccagatcctgcaggtcaagtattttgagttcctgctccccagcagctttgagtctgaaggacacgttttcattgctcccagagagtactgcaaggacctgaatgcctcagacaacaacaccgagttcctgaaaaactttattgagctcatggagaaagtgactccagactccaagcagtgcaacaacttccttctgcacaacctgatcttggacacgggcatcacgcagcagctggtagagcgtgtgtggagggaccaggatctcaacacgtacagcctactggccgtgttcgctgccacagacggtggcatcacccgagtcttccccaacaaggcagctgaggactggacagagaaccctgagcccttcaatgccagcttctaccgccgcagcctggataaccacggttatgtcttcaagcccccacaccaggatgccctgttaaggccgctggagctggagaatgacactgtgggcatcctcgtcagcacagctgtggagctcagcctaggcaggcgcacactgaggccagcagtggtgggcgtcaagctggacctagaggcttgggctgagaagttcaaggtgctagccagcaaccgtacccaccaagaccagcctcagaagtgcggccccaacagccactgtgagatggactgcgaggttaacaatgaggacttactctgtgtcctcattgatgatggaggattcctggtgctgtcaaaccagaaccatcagtgggaccaggtgggcaggttcttcagtgaggtggatgccaacctgatgctggcactctacaataactccttctacacccgcaaggagtcctatgactatcaggcagcctgtgcccctcagccccctggcaacctgggtgctgcaccccggggtgtctttgtgcccaccgttgcagatttccttaacctggcctggtggacctctgctgccgcctggtccctgttccagcagcttctctacggcctcatctaccacagctggttccaagcagaccccgcggaggccgaggggagccccgagacgcgcgagagcagctgcgtcatgaaacagacccagtactacttcggctcggtaaacgcctcctacaacgccatcatcgactgcggaaactgctccaggctgttccacgcgcagagactgaccaacaccaatcttctctttgtggtggccgagaagccgctgtgcagccagtgcgaggctggccggctgctgcagaaggagacgcactcggacggcccggagcagtgtgagctagtgcagagaccgcgataccggagaggcccgcacatctgcttcgactacaacgcgacagaagatacctcagactgtggccgcggggcctccttcccgccgtcgctgggcgtcctggtctccctgcaactgctgctcctcctgggcctgccgccccggccgcagcctcaagtcctcgtccacgcctctcgccgcctctgagcaccctgccccaccccacctccactcccacctcacccggcctcttcgcctttcccaccctcctgccccacactccccgccttagagcctcgtccctccctcactgaaggacctgagctggccaggccctgagagtctggtctgcgccttgggatggggagtcccaaagcgggacgccgcaggtgtttggcacccaaatcacatctcacctccgaactgttcaagtgtccccagacccttcttgcctgctgggctccccccagtgggatgggacagggaggccacacgcactggtgccaaaaccaggcctctgctgccgcccttcctggaggctgcctatgttgggggggaccctgcctcagctgacccggcctctctgccccacccaagcccaaacttggtttctgtgagaatagtggaggaaggtgagatggccagtttgaagcctgtgcctcccagcttaaatcctagcaggagagaggctctggggcagcccccatgggctcctgcccctttcaggcctacagccacatccccaagcccaccaggtgtcaggatagtcacagtgataccagttcagacactaccccatatacacctggaacattgaggatggaaactggactcacattcgacataccccactgggcacacgcacaaacacacacactatggggtggggtgggtgtaggggcttacaaagccttacacagggcgaggggttggtgggagggttggcacctgcacactccatctcctgctcaccacctgcctctaatctgagctgcagcctggctggtcctcccatttctaaagctgaatgtcaaacagtgccaaatgctggggcagggggtgaagaaccctctgtcccacccctagccaccagtgtcctccaagtgccccctcacctctccaggtgctcattgtaaccatttctcactagtgtcaggcccccagtgggaccacatgccactgcctgcacctttcggcagaggaacccccaccagacatcaccctttgccttagcaggggtgactttgtctctcctggctgggccatccttccgccaatctggcccttacacactcaggcctgtgcccactccctatctccttcccacccctacacacacactccctgcttgcaggaggccaaactgtccctcccttgctgaacacacacacacacacacacacacaggtggggactgggcacagctcttcacaccattcattctggtcatttcccccaaaggcatcccagcctgggggccagtggggaactgagggcaaggggatatagtgatggggctcagatggactgggaggagggggagggtgatgcattaattaatggcttcgttaattaatgtcatgttgcttgtcgctttctcagtgtgtgtgtgtggtccatgcccactgctggtgccagggtgggtgtccatgtgcacccggcctggatgccagctgtgtccttcgggggcgtgcgtgtaactgtagtgtagtcaggtgctcaatggagaatataaacatatacagaaaaatatatattttaagtttaaaaaacagaaaaacagacaaaacaatccccatcaggtagctgtctaacccccagctgggtctaatccttctcattacccacccgacctggctgcccctcaccttgggctgggggactggggggccatttccttttctctgccctttttttgttgttctattttgtacagacaagttggaaaaacaacagcgacaaaaaagtcaagaaactttgtaaaatatcgtgtgtgtgattccttgtaaaatattttcaaatggtttattacagaagatcagttattaaataatgttcatattttcacttcaaa

SEQ ID NO: 3737 - DNA, 4028 bp, Homo sapiens
atgaagcagccgatcatggcggatggcccccggtgcaagaggcgcaaacaagccaatcccaggaggaaaaacgtggtgaactatgacaatgtagtggacacaggttctgaaacagatgaggaagacaagcttcatattgctgaggatgacggtattgccaaccctctggaccaggagacgagtccagctagtgtgcccaaccatgagtcctccccacacgtgagccaagctctgttgccaagagaggaagaggaagatgaaataagggagggtggagtggaacacccctggcacaacaacgagattctacaagcctctgtagatggtccagaagaaatgaaggaagactatgacactatggggccagaagccacgatccagaccgcaattaacaatggtacagtgaagaatgcaaattgcacatcagattttgaggaatactttgccaaaagaaaactggaggaacgcgatggtcatgcagtcagcatcgaggagtaccttcagcgcagtgacacagccattatttacccagaagcccctgaggagctgtctcgccttggcacgccagaggccaatgggcaagaagaaaatgacctgccacctggaactccagatgcttttgcccaactgctgacctgcccctactgcgaccggggctacaagcgcttgacatcactgaaggagcacatcaagtaccgccacgagaagaatgaagagaacttttcctgccctctctgtagctacacgtttgcctaccgcacccagctcgagcggcatatggtgacacacaagccagggacagatcagcaccaaatgctaacccaaggagcaggtaatcgcaagttcaaatgcacagagtgtggcaaggccttcaaatataaacaccatctgaaagaacacctgcgaattcacagtggtgaaaaaccttacgagtgcccaaactgcaagaaacgtttctcccattctggttcctacagttcgcacatcagcagcaagaaatgtattggtttaatctctgtaaatggccgaatgagaaacaatatcaagacgggttcttcccctaattctgtttcttcttctcctactaattcagccattacccagttaagaaacaagttggagaatggaaaaccacttagtatgtctgaacagacaggcttacttaaaacaggccgggcgcggtggctcacgcctgtaatcccagcactttgggaggccgaggcgggcggatcacgaggtcaggagatcgagaccatcccggctaaaacggtgaaaccccgtctctactaaaaatacaaaaaattagccgggcgtagtggcgggcgcctgtagtcccagctactcgggaggctgaggcaggagaatggcgtgaacccgggaggcggagcttgcagtgagccgagatcccgccactgcactccagcctgggcgacagagcgagactccgtcccaaaatataaatatatatataaaaaaaaaaaaaaaaaaaaaaaaaaaaaaaaaaaaaaaaaaaaaaaaaaaaaaaaaaaaaaaaaaaaaaaaaaaaaattaaaacagaaccactagacttcaatgactataaagttcttatggctacacacgggtttagtggcactagtccctttatgaatggtgggcttggagccaccagccctttaggagttcatccatctgctcagagtccaatgcagcacttaggtgtagggatggaagcccctttacttgggtttcccaccatgaatagtaatttaagtgaggtacaaaaggttctacagattgtggacaatactgtttccaggcaaaaaatggactgcaaggctgaagaaatttcaaagttgaaaggttatcacatgaaggatccatgctctcaacctgaggaacaaggagttacttctcctaatattccgcctgtcggtcttccggtagtgagtcataatggtgccactaaaagtattattgactatacgttggaaaaagtcaatgaagccaaagcttgcctccagagcttgactactgactcaaggagacagatcagtaatataaagaaagagaagctacgtactttaatagatttggtcactgatgacaaaatgattgagaaccacaacatatccactccattttcatgccagttctgtaaagaaagttttcctggccccatccctttgcatcagcatgaacgttacctttgtaagatgaatgaagagatcaaggcggtcctgcagcctcatgaaaacatagtccccaacaaagccggagtttttgttgataataaagccctcctcttgtcatctgtactttctgagaaaggaatgacaagccccatcaacccatacaaggaccacatgtctgtactcaaagcatactatgctatgaacatggagcccaactccgatgaactgctgaaaatttccattgctgtgggccttcctcaggaatttgtgaaggaatggtttgaacaacgaaaagtctaccagtactcaaattccaggtccccatccctggaaagaagctccaagccgttagctcccaacagtaaccctcccacaaaagactctttattacccaggtctcctgtaaaacctatggactccataacatcaccatctatagcagaactccacaacagtgttacgaattgtgatcctcctctcaggctaacaaaaccttcccattttaccaatattaaaccagttgaaaaattggaccactccaggagtaatactccttctcccttaaatctttcctccacatcttctaaaaactcccacagtagttcatacactccaaacagcttctcttctgaggagctccaggctgagcctttagacttgtcattaccaaaacaaatgaaagaacccaaaagtattatagccacaaagaacaaaacaaaagctagtagcatcagtttagatcataacagtgtttcttcctcatctgaaaactcagatgagcctctgaacttgacttttatcaagaaggaattttcaaattcaaataatctggacaacaaaagcactaacccagtgttcagcatgaacccatttagtgccaaacctttatacacagctcttccacctcaaagcgcatttccccctgctactttcatgccaccagtccagaccagtattcctgggctacgaccatacccaggactggatcagatgagcttcctaccacatatggcctacacctacccaactggagcagctacttttgctgatatgcagcaaaggagaaagtaccagcggaaacaaggatttcagggagaattgcttgatggagcacaagactacatgtcaggcctagatgatatgacagactccgactcctgtctgtctcgcaaaaagatcaagaagacagagagtggcatgtatgcatgtgacttatgtgacaagacattccagaaaagcagttcccttctgcgacataaatacgaacacacaggaaaaagaccacatcagtgtcagatttgtaagaaagcgtttaaacacaagcaccaccttatcgagcactcaaggcttcactcgggcgagaagccctatcagtgtgataaatgtggcaagcgcttctcacactcgggctcgtactcgcagcacatgaatcacaggtattcctactgcaagcgggaggcggaggagcgggaagcggcggagcgcgaggcgcgcgagaaagggcacttggaacccaccgagctgctgatgaaccgggcttacttgcagagcattacccctcaggggtactctgactcggaggagagggagagtatgccgagggatggcgagagcgagaaggagcacgagaaagaaggcgaggatggctacgggaagctgggcagacaggatggcgacgaggagttcgaggaggaagaggaagaaagtgaaaataaaagtatggatacggatcccgaaacgatacgagatgaagaagagactggagatcactccatggacgatagttcggaggatgggaaaatggaaaccaaatcagaccacgaggaagacaatatggaagatggcatgtaataa

SEQ ID NO: 3738 - DNA, 3653 bp, Homo sapiens
atgaagcagccgatcatggcggatggcccccggtgcaagaggcgcaaacaagccaatcccaggaggaaaaacgtggtgaactatgacaatgtagtggacacaggttctgaaacagatgaggaagacaagcttcatattgctgaggatgacggtattgccaaccctctggaccaggagacgagtccagctagtgtgcccaaccatgagtcctccccacacgtgagccaagctctgttgccaagagaggaagaggaagatgaaataagggagggtggagtggaacacccctggcacaacaacgagattctacaagcctctgtagatggtccagaagaaatgaaggaagactatgacactatggggccagaagccacgatccagaccgcaattaacaatggtacagtgaagaatgcaaattgcacatcagattttgaggaatactttgccaaaagaaaactggaggaacgcgatggtcatgcagtcagcatcgaggagtaccttcagcgcagtgacacagccattatttacccagaagcccctgaggagctgtctcgccttggcacgccagaggccaatgggcaagaagaaaatgacctgccacctggaactccagatgcttttgcccaactgctgacctgcccctactgcgaccggggctacaagcgcttgacatcactgaaggagcacatcaagtaccgccacgagaagaatgaagagaacttttcctgccctctctgtagctacacgtttgcctaccgcacccagctcgagcggcatatggtgacacacaagccagggacagatcagcaccaaatgctaacccaaggagcaggtaatcgcaagttcaaatgcacagagtgtggcaaggccttcaaatataaacaccatctgaaagaacacctgcgaattcacagtggtgaaaaaccttacgagtgcccaaactgcaagaaacgtttctcccattctggttcctacagttcgcacatcagcagcaagaaatgtattggtttaatctctgtaaatggccgaatgagaaacaatatcaagacgggttcttcccctaattctgtttcttcttctcctactaattcagccattacccagttaagaaacaagttggagaatggaaaaccacttagtatgtctgaacagacaggcttacttaaaattaaaacagaaccactagacttcaatgactataaagttcttatggctacacacgggtttagtggcactagtccctttatgaatggtgggcttggagccaccagccctttaggagttcatccatctgctcagagtccaatgcagcacttaggtgtagggatggaagcccctttacttgggtttcccaccatgaatagtaatttaagtgaggtacaaaaggttctacacaagtgaggtacaaaaggtctgtttccaggcaaaaaatggactgcaaggctgaagaaatttcaaagttgaaaggttatcacatgaaggatccatgctctcaacctgaggaacaaggagttacttctcctaatattccgcctgtcggtcttccggtagtgagtcataatggtgccactaaaagtattattgactatacgttggaaaaagtcaatgaagccaaagcttgcctccagagcttgactactgactcaaggagacagatcagtaatataaagaaagagaagctacgtactttaatagatttggtcactgatgacaaaatgattgagaaccacaacatatccactccattttcatgccagttctgtaaagaaagttttcctggccccatccctttgcatcagcatgaacgttacctttgtaagatgaatgaagagatcaaggcggtcctgcagcctcatgaaaacatagtccccaacaaagccggagtttttgttgataataaagccctcctcttgtcatctgtactttctgagaaaggaatgacaagccccatcaacccatacaaggaccacatgtctgtactcaaagcatactatgctatgaacatggagcccaactccgatgaactgctgaaaatttccattgctgtgggccttcctcaggaatttgtgaaggaatggtttgaacaacgaaaagtctaccagtactcaaattccaggtccccatccctggaaagaagctccaagccgttagctcccaacagtaaccctcccacaaaagactctttattacccaggtctcctgtaaaacctatggactccataacatcaccatctatagcagaactccacaacagtgttacgaattgtgatcctcctctcaggctaacaaaaccttcccattttaccaatattaaaccagttgaaaaattggaccactccaggagtaatactccttctcccttaaatctttcctccacatcttctaaaaactcccacagtagttcatacactccaaacagcttctcttctgaggagctccaggctgagcctttagacttgtcattaccaaaacaaatgaaagaacccaaaagtattatagccacaaagaacaaaacaaaagctagtagcatcagtttagatcataacagtgtttcttcctcatctgaaaactcagatgagcctctgaacttgacttttatcaagaaggaattttcaaattcaaataatctggacaacaaaagcactaacccagtgttcagcatgaacccatttagtgccaaacctttatacacagctcttccacctcaaagcgcatttccccctgctactttcatgccaccagtccagaccagtattcctgggctacgaccatacccaggactggatcagatgagcttcctaccacatatggcctacacctacccaactggagcagctacttttgctgatatgcagcaaaggagaaagtaccagcggaaacaaggatttcagggagaattgcttgatggagcacaagactacatgtcaggcctagatgatatgacagactccgactcctgtctgtctcgcaaaaagatcaagaagacagagagtggcatgtatgcatgtgacttatgtgacaagacattccagaaaagcagttcccttctgcgacataaatacgaacacacaggaaaaagaccacatcagtgtcagatttgtaagaaagcgtttaaacacaagcaccaccttatcgagcactcaaggcttcactcgggcgagaagccctatcagtgtgataaatgtggcaagcgcttctcacactcgggctcgtactcgcagcacatgaatcacaggtattcctactgcaagcgggaggcggaggagcgggaagcggcggagcgcgaggcgcgcgagaaagggcacttggaacccaccgagctgctgatgaaccgggcttacttgcagagcattacccctcaggggtactctgactcggaggagagggagagtatgccgagggatggcgagagcgagaaggagcacgagaaagaaggcgaggatggctacgggaagctgggcagacaggatggcgacgaggagttcgaggaggaagaggaagaaagtgaaaataaaagtatggatacggatcccgaaacgatacgagatgaagaagagactggagatcactccatggacgatagttcggaggatgggaaaatggaaaccaaatcagaccacgaggaagacaatatggaagatggcatgtaataa

SEQ ID NO: 3739 - DNA, 3196 bp, Homo sapiens; identical to SEQ ID NO: 643

SEQ ID NO: 3740 - DNA, 3291 bp, Homo sapiens
ggcagcctatgacatcagacaggaacgcctgggatgccgcgctgctcctggccaacctccgaggaggaggagggtcccgccggctaagagttaattagccccgcacggcgaggggggaggcgccagttttctggggacactggctgccactgtactcctacccaggggagctcacggagagttggatgaattctgggttgttagctgcggtcagctgggctcccgggagcctgttgctggtggagaacagggggcgcctggccaagggaccagcggcttgctgagactcaacatgacactcctggggtctgagcattccttgctgattaggagcaagttcagatcagttttacagttaagacttcaacaaagaaggacccaggaacaactggctaaccaaggcataataccaccactgaaacgtccagctgaattccatgagcaaagaaaacatttggatagtgacaaggctaaaaattccctgaagcgcaaagccagaaacaggtgcaacagtgccgacttggttaatatgcacatactccaagcttccactgccgagaggtccattccaactgctcagatgaagctgaaaagagcccgactcgccgatgatctcaatgaaaaaattgctctacgaccagggccactggagctggtggaaaaaaacattcttcctgtggattctgctgtgaaagaggccataaaaggtaaccaggtgagtttctccaaatccacggatgcttttgcctttgaagaggacagcagcagcgatgggctttctccggatcagactcgaagtgaagacccccaaaactcagcgggatccccgccagacgctaaagcctcagataccccttcgacaggttctctggggacaaaccaggatcttgcttctggctcagaaaatgacagaaatgactcagcctcacagcccagccaccagtcagatgcggggaagcaggggcttggcccccccagcacccccatagccgtgcatgctgctgtaaagtccaaatccttgggtgacagtaagaaccgccacaaaaagcccaaggaccccaagccaaaggtgaagaagcttaaatatcaccagtacattcccccagaccagaaggcagagaagtcccctccacctatggactcagcctacgctcggctgctccagcaacagcagctgttcctgcagctccaaatcctcagccagcagcagcagcagcagcaacaccgattcagctacctagggatgcaccaagctcagcttaaggaaccaaatgaacagatggtcagaaatccaaactcttcttcaacgccactgagcaatacccccttgtctcctgtcaaaaacagtttttctggacaaactggtgtctcttctttcaaaccaggcccactcccacctaacctggatgatctgaaggtctctgaattaagacaacagcttcgaattcggggcttgcctgtgtcaggcaccaaaacggctctcatggaccggcttcgacccttccaggactgctctggcaacccagtgccgaactttggggatataacgactgtcacttttcctgtcacacccaacacgctgcccaattaccagtcttcctcttctaccagtgccctgtccaacggcttctaccactttggcagcaccagctccagccccccgatctccccagcctcctctgacctgtcagtcgctgggtccctgccggacaccttcaatgatgcctccccctccttcggcctgcacccgtccccagtccacgtgtgcacggaggaaagtctcatgagcagcctgaatgggggctctgttccttctgagctggatgggctggactccgagaaggacaagatgctggtggagaagcagaaggtgatcaatgaactcacctggaaactccagcaagagcagaggcaggtggaggagctgaggatgcagcttcagaagcagaaaaggaataactgttcagagaagaagccgctgcctttcctggctgcctccatcaagcaggaagaggctgtctccagctgtccttttgcatcccaagtacctgtgaaaagacaaagcagcagctcagagtgtcacccaccggcttgtgaagctgctcaactccagcctcttggaaatgctcattgtgtggagtcctcagatcaaaccaatgtactttcttccacatttctcagcccccagtgttcccctcagcattcaccgctgggggctgtgaaaagcccacagcacatcagtttgcccccatcacccaacaaccctcactttctgccctcatcctccggggcccagggagaagggcacagggtctcctcgcccatcagcagccaggtgtgcactgcacagaactcaggagcacacgatggccatcctccaagcttctctccccattcttccagcctccacccgcccttctctggagcccaagcagacagcagtcatggtgccgggggaaacccttgtcccaaaagcccatgtgtacagcaaaagatggctggtttacactcttctgataaggtggggccaaagttttcaattccatccccaactttttctaagtcaagttcagcaatttcagaggtaacacagcctccatcctatgaagatgccgtaaagcagcaaatgacccggagtcagcagatggatgaactcctggacgtgcttattgaaagcggagaaatgccagcagacgctagagaggatcactcatgtcttcaaaaagtcccaaagatacccagatcttcccgaagtccaactgctgtcctcaccaagccctcggcttcctttgaacaagcctcttcaggcagccagatcccctttgatccctatgccaccgacagtgatgagcatcttgaagtcttattaaattcccagagccccctaggaaagatgagtgatgtcacccttctaaaaattgggagcgaagagcctcactttgatgggataatggatggattctctgggaaggctgcagaagacctcttcaatgcacatgagatcttgccaggccccctctctccaatgcagacacagttttcaccctcttctgtggacagcaatgggctgcagttaagcttcactgaatctccctgggaaaccatggagtggctggacctcactccgccaaattccacaccaggctttagcgccctcaccaccagcagccccagcatcttcaacatcgatttcctggatgtcactgatctcaatttgaattcttccatggaccttcacttgcagcagtggtagaatgcccaatgcaccagtgctatggaagaccaatggag

SEQ ID NO: 3741 - DNA, 729 bp, Homo sapiens
atgggcttgttagagtgctgtgcaagatgtctggtaggggccccctttgcttccctggtggccactggattgggtttctttggggtggcactgttctgtggctgtggacatgaagccctcactggcacagaaaagctaattgagacctatttctccaaaaactaccaagactatgagtatctcatcaatgtgatccatgccttccagtatgtcatctatggaactgcctctttcttcttcctttatggggccctcctgctggctgagggcttctacaccaccggcgcagtcaggcagatctttggcgactacaagaccaccatctgcggcaagggcctgagcgcaacgtttgtgggcatcacctatgccctgaccgttgtgtggctcctggtgtttgcctgctctgctgtgcctgtgtacatttacttcaacacctggaccacctgccagtctattgccttccccagcaagacctctgccagtataggcagtctctgtgctgatgccagaatgtatggtgttctcccatggaatgctttccctggcaaggtttgtggctccaaccttctgtccatctgcaaaacagctgagttccaaatgaccttccacctgtttattgctgcatttgtgggggctgcagctacactggtttccctgctcaccttcatgattgctgccacttacaactttgccgtccttaaactcatgggccgaggcaccaagttctag

SEQ ID NO: 3742 - DNA, 729 bp, Homo sapiens
atgggcttgttagagtgctgtgcaagatgtctggtaggggccccctttgcttccctggtggccactggattgtgtttctttggggtggcactgttctgtggctgtggacatgaagccctcactggcacagaaaagctaattgagacctatttctccaaaaactaccaagactatgagtatctcatcaatgtgatccatgccttccagtatgtcatctatggaactgcctctttcttcttcctttatggggccctcctactggctgagggcttctacaccaccggcgcagtcaggcagatctttggcgactacaagaccaccatctgcggcaagggcctgagcgcaacgtttgtgggcatcacctatgccctgaccgttgtgtggctcctggtgtttgcctgctctgctgtgcctgtgtacatttacttcaacacctggaccacctgccagtctattgccttccccagcaagacctctgccagtataggcagtctctgtgctgatgccagaatgtatggtgttctcccatggaatgctttccctggcaaggtttgtggctccaaccttctgtccatctgcaaaacagctgagttccaaatgaccttccacctgtttattgctgcatttgtgggggctgcagctacactggtttccctgctcaccttcatgattgctgccacttacaactttgccatccttaaactcatgggccgaggcaccaagttctag

SEQ ID NO: 3743 - DNA, 1326 bp, Homo sapiens
atgtactccccgtactgcctcacccaggatgagttccacccgttcatcgaggcactgctgcctcacgtccgcgctttctcctacacctggttcaacctgcaggcgcggaagcgcaagtacttcaagaagcatgaaaagcggatgtcgaaggacgaggagcgggcggtgaaggacgagctgctgggcgagaagcccgagatcaagcagaagtgggcatcccggctgctggccaagctgcgcaaggacatccggcccgagttccgcgaggacttcgtgctgaccatcacgggcaagaagcccccctgctgcgtgctctccaaccccgaccagaagggcaagatccggcggattgactgcctgcgccaggctgacaaggtgtggcggctggacctggtcatggtgattttgtttaaggggatccccctggaaagtactgatggggagcggctctacaagtcgcctcagtgctcgaaccccggcctgtgcgtccagccacatcacattggagtcacaatcaaagaactggatctttatctggcttactttgtccacactccggaatccggacaatcagatagttcaaaccagcaaggagatgcggacatcaaaccactgcccaacgggcacttaagtttccaggactgttttgtgacttccggggtctggaatgtgacggagctggtgagagtatcacagactcctgttgcaacagcatcagggcccaacttctccctggcggacctggagagtcccagctactacaacatcaaccaggtgaccctggggcggcggtccatcacctcccctccttccaccagcaccaccaagcgccccaagtccatcgatgacagtgagatggagagccctgttgatgacgtgttctatcccgggacaggccgttccccagcagctggcagcagccagtccagcgggtggcccaacgatgtggatgcaggcccggcttctctaaagaagtcaggaaagctggacttctgcagtgccctctcctctcagggcagctccccgcgcatggctttcacccaccacccgctgcctgtgcttgccggagtcagaccagggagcccccgggccacagcatcagccctgcacttcccctccacgtccatcatccagcagtcgagcccgtatttcacgcacccgaccatccgctaccaccaccaccacgggcaggactcactgaaggagtttgtgcagtttgtgtgctcggatggctcgggccaggccaccggacagcattcgcaacgacaggcgcctcctctgccaaccggtttgtcagcatcggaccccgggacggcaactttctag

SEQ ID NO: 3744 - DNA, 1314 bp, Homo sapiens
atgagcgcggtattactgctggccctcctggggttcatcctcccactgccaggagtgcaggcgctgctctgccagtttgggacagttcagcatgtgtggaaggtgtccgacctgccccggcaatggacccctaagaacaccagctgcgacagcggcttggggtgccaggacacgttgatgctcattgagagcggaccccaagtgagcctggtgctctccaagggctgcacggaggccaaggaccaggagccccgcgtcactgagcaccggatgggccccggcctctccctgatctcctacaccttcgtgtgccgccaggaggacttctgcaacaacctcgttaactccctcccgctttgggccccacagcccccagcagacccaggatccttgaggtgcccagtctgcttgtctatggaaggctgtctggaggggacaacagaagagatctgccccaaggggaccacacactgttatgatggcctcctcaggctcaggggaggaggcatcttctccaatctgagagtccagggatgcatgccccagccaggttgcaacctgctcaatgggacacaggaaattgggcccgtgggtatgactgagaactgcaataggaaagattttctgacctgtcatcgggggaccaccattatgacacacggaaacttggctcaagaacccactgattggaccacatcgaataccgagatgtgcgaggtggggcaggtgtgtcaggagacgctgctgctcatagatgtaggactcacatcaaccctggtggggacaaaaggctgcagcactgttggggctcaaaattcccagaagaccaccatccactcagcccctcctggggtgcttgtggcctcctatacccacttctgctcctcggacctgtgcaatagtgccagcagcagcagcgttctgctgaactccctccctcctcaagctgcccctgtcccaggagaccggcagtgtcctacctgtgtgcagccccttggaacctgttcaagtggctccccccgaatgacctgccccaggggcgccactcattgttatgatgggtacattcatctctcaggaggtgggctgtccaccaaaatgagcattcagggctgcgtggcccaaccttccagcttcttgttgaaccacaccagacaaatcgggatcttctctgcgcgtgagaagcgtgatgtgcagcctcctgcctctcagcatgagggaggtggggctgagggcctggagtctctcacttggggggtggggctggcactggccccagcgctgtggtggggagtggtttgcccttcctgctag

SEQ ID NO: 3745 - DNA, 2828 bp, Homo sapiens
agaccaccttgcggccgaccccgctcccccgcctcctcgggagagataaatgctgactccgctcggaaagttctcaactgcaaagtttgctgtccggctgcctagggtctgggaagctcgggcaccctccctctccggggctcctgctcccacccctccggcccccccaccgtcgcgctcctccaggctgggcctgtggccgcggtgctttttaattttcccccagctcagaatcttgctgctcggcccccaggagagcaacaactcaacgggaacgatgtggaaggtgtcagctctgctcttcgttttgggaagcgcgtcgctctgggtcctggcagaaggagccagcacaggccagccagaagatgacactgagactacaggtttggaaggcggcgttgccatgccaggtgccgaagatgatgtggtgactccaggaaccagcgaagaccgctataagtctggcttgacaactctggtggcaacaagtgtcaacagtgtaacaggcattcgcatcgaggatctgccaacttcagaaagcacagtccacgcgcaagaacaaagtccaagcgccacagcctcaaacgtggccaccagtcactccacggagaaagtggatggagacacacagacaacagttgagaaagatggtttgtcaacagtgaccctggttggaatcatagttggggtcttactagccatcggcttcattggtgcaatcatcgttgtggttatgcgaaaaatgtcgggaaggtactcgccctaaagagctgaagggttacgccctgctgccaacgtgcttaaaaaaagaccgtttctgactctgtgccctgtccctgagctcgtgggagaagatgacccgtggaacacttgcctggcccactcagaatccacggtgacctctccgcttgccaaaataaccgaaggaaagaccgttcaccagacttggctcctctaaacatttgctgttcaaacatgtttttgaatatacattctataaaagattatttgaaagacaaaattcatagaaaatggagcaaaactgtataaactgatttgtaactaacactggaccattggatcgatattatatgctgtaaccatgtgtctccgtctgaccattcttgttattgttaaaatgcagaggaatctggaaatatttatatccacggagtccttggatccagtgctacgtcagtaaatagcaccagcattttgcaattgctgatctgctgaaatgtacacattctggtctagtttggtctatcttttaaagcctgatctggtgtgaataatcaactaggaaatctaaacttggataacacgtggtgaacaactgcctttagctggtccagattaatcatttcaaagacatccattttagatcacaagcaggaagtcgatagtctcaaaggcactttgtttctcccaagtaggccaccaggcagcctctagagttgctttacccaaatccttctccagccatgacttggtgactctaagcttgctcccacctgccccctccacttccctcagatgatgaggagccagggctaagggggcagccttctctcttcccagtgatgcacatccttcacattggctgctttgttctggaatatggatatctcagcctggatgccgaggaagctgctggatgcttaatggtgctagaggctcaagtgtgtttgaaaccaagagccagttgtcccccatgcagaaagaaatcctgtgtgagcctctggtatgagaaataaaatctgccagttttataacattcactttctgcctctgaggaaagatacagggaacaaaaatcaatttgtacagtcttaatattaaaagcagcttgactaaatacctgatttaaaaatagaagacatccccagtcctcatgacataccgcaaatatctgtggggtcctgttgaaaagaacaaaataaaggagcccaaggggtcattctgtctcagcaccatccagcctggcacttctcttcccatatatccattggatttttttttttttttcctaaacaaagtttttacactgagcagatgctctgtcatgatggcggttgtgcaattctggtatcctctaaatttgtaagcattcataaaacaggaaaaagtaaactatcattcggaagcacagcccattcctcccattttttgcaatgatgtctggatgttattttaaacagtgtgtctgtgtgttcccaaatccagctggccccaccagctcagattccattttttttgtgtgtgtgtgtgaaacgtagtctgcaactctgcctcccggcaattatacatgtgtcaggatgtcaaaaagcaattctcctgcctcagcctcctgagtagctgggactacaggttcctaccaccacacccggccaatttttgtatttttagtagagatggggtttcaccgtatcggcgaggatgatctctatctcttgacctcgtgatctgcccgcctcggcctcccaaagtgctgggattacaggcgtgtgccactgcgctcggcctcagattccatatttgaacaccagctgattgagagaaggggaatgagaagagctggatgagtttaaataactcattgttcagattcctgaacaggagttgggataatggccatcttttctttcctatcctttcttcccccctcactgtgaaaaataacagtccaccccaagtcatacactggacccagtgcctgcggggacaggactgtgggtttcttggtcacacctgtgttggtgctcaatgcagtgtagacatgttttcaaataaaacaaatgattgtgtacaaaaaaaaaaaaaaaaaa

SEQ ID NO: 3746 - DNA, 2822 bp, Homo sapiens
agaccaccttgcggccgaccccgctcccccgcctcctcgggagagataaatgctgactccgctcggaaagttctcaactgcaaagtttgctgtccggctgcctagggtctgggaagctcgggcaccctccctctccggggctcctgctcccacccctccggcccccccaccgtcgcgctcctccaggctgggcctgtggccgcggtgctttttaattttcccccagctcagaatcttgctgctcggcccccaggagagcaacaactcaacgggaacgatgtggaaggtgtcagctctgctcttcgttttgggaagcgcgtcgctctgggtcctggcagaaggagccagcacaggccagccagaagatgacactgagactacaggtttggaaggcggcgttgccatgccaggtgccgaagatgatgtggtgactccaggaaccagcgaagaccgctataagtctggcttgacaactctggtggcaacaagtgtcaacagtgtaacaggcattcgcatcgaggatctgccaacttcagaaagcacagtccacgcgcaagaacaaagtccaagcgccacagcctcaaacgtggccaccagtcactccacggagaaagtggatggagacacacagacaacagttgagaaagatggtttgtcaacagtgaccctggttggaatcatagttggggtcttactagccatcggcttcattggtgcaatcatcgttgtggttatgcgaaaaatgtcgggaaggccctaaagagctgaagggttacgccctgctgccaacgtgcttaaaaaaagaccgtttctgactctgtgccctgtccctgagctcgtgggagaagatgacccgtggaacacttgcctggcccactcagaatccacggtgacctctccgcttgccaaaataaccgaaggaaagaccgttcaccagacttggctcctctaaacatttgctgttcaaacatgtttttgaatatacattctataaaagattatttgaaagacaaaattcatagaaaatggagcaaaactgtataaactgatttgtaactaacactggaccattggatcgatattatatgctgtaaccatgtgtctccgtctgaccattcttgttattgttaaaatgcagaggaatctggaaatatttatatccacggagtccttggatccagtgctacgtcagtaaatagcaccagcattttgcaattgctgatctgctgaaatgtacacattctggtctagtttggtctatcttttaaagcctgatctggtgtgaataatcaactaggaaatctaaacttggataacacgtggtgaacaactgcctttagctggtccagattaatcatttcaaagacatccattttagatcacaagcaggaagtcgatagtctcaaaggcactttgtttctcccaagtaggccaccaggcagcctctagagttgctttacccaaatccttctccagccatgacttggtgactctaagcttgctcccacctgccccctccacttccctcagatgatgaggagccagggctaagggggcagccttctctcttcccagtgatgcacatccttcacattggctgctttgttctggaatatggatatctcagcctggatgccgaggaagctgctggatgcttaatggtgctagaggctcaagtgtgtttgaaaccaagagccagttgtcccccatgcagaaagaaatcctgtgtgagcctctggtatgagaaataaaatctgccagttttataacattcactttctgcctctgaggaaagatacagggaacaaaaatcaatttgtacagtcttaatattaaaagcagcttgactaaatacctgatttaaaaatagaagacatccccagtcctcatgacataccgcaaatatctgtggggtcctgttgaaaagaacaaaataaaggagcccaaggggtcattctgtctcagcaccatccagcctggcacttctcttcccatatatccattggatttttttttttttttcctaaacaaagtttttacactgagcagatgctctgtcatgatggcggttgtgcaattctggtatcctctaaatttgtaagcattcataaaacaggaaaaagtaaactatcattcggaagcacagcccattcctcccattttttgcaatgatgtctggatgttattttaaacagtgtgtctgtgtgttcccaaatccagctggccccaccagctcagattccattttttttgtgtgtgtgtgtgaaacgtagtctgcaactctgcctcccggcaattatacatgtgtcaggatgtcaaaaagcaattctcctgcctcagcctcctgagtagctgggactacaggttcctaccaccacacccggccaatttttgtatttttagtagagatggggtttcaccgtatcggcgaggatgatctctatctcttgacctcgtgatctgcccgcctcggcctcccaaagtgctgggattacaggcgtgtgccactgcgctcggcctcagattccatatttgaacaccagctgattgagagaaggggaatgagaagagctggatgagtttaaataactcattgttcagattcctgaacaggagttgggataatggccatcttttctttcctatcctttcttcccccctcactgtgaaaaataacagtccaccccaagtcatacactggacccagtgcctgcggggacaggactgtgggtttcttggtcacacctgtgttggtgctcaatgcagtgtagacatgttttcaaataaaacaaatgattgtgtacaaaaaaaaaaaaaaaaaa

SEQ ID NO: 3747 - DNA, 2652 bp, Homo sapiens; identical to SEQ ID NO: 227

SEQ ID NO: 3748 - DNA, 2646 bp, Homo sapiens
gacaatgtgcaaatgacaccgttttgtgctcaccagggcaaagcaagggagcgccctcacttcagcatctcagccctgctaaagaaaaagctgctgggtaacatcctttgtttttgcccagggaagctttagctgtgattcccttcagccggctcctgaatgtcaaagccagcacaggccagccagaagatgacactgagactacaggtttggaaggcggcgttgccatgccaggtgccgaagatgatgtggtgactccaggaaccagcgaagaccgctataagtctggcttgacaactctggtggcaacaagtgtcaacagtgtaacaggcattcgcatcgaggatctgccaacttcagaaagcacagtccacgcgcaagaacaaagtccaagcgccacagcctcaaacgtggccaccagtcactccacggagaaagtggatggagacacacagacaacagttgagaaagatggtttgtcaacagtgaccctggttggaatcatagttggggtcttactagccatcggcttcattggtgcaatcatcgttgtggttatgcgaaaaatgtcgggaaggccctaaagagctgaagggttacgccctgctgccaacgtgcttaaaaaaagaccgtttctgactctgtgccctgtccctgagctcgtgggagaagatgacccgtggaacacttgcctggcccactcagaatccacggtgacctctccgcttgccaaaataaccgaaggaaagaccgttcaccagacttggctcctctaaacatttgctgttcaaacatgtttttgaatatacattctataaaagattatttgaaagacaaaattcatagaaaatggagcaaaactgtataaactgatttgtaactaacactggaccattggatcgatattatatgctgtaaccatgtgtctccgtctgaccattcttgttattgttaaaatgcagaggaatctggaaatatttatatccacggagtccttggatccagtgctacgtcagtaaatagcaccagcattttgcaattgctgatctgctgaaatgtacacattctggtctagtttggtctatcttttaaagcctgatctggtgtgaataatcaactaggaaatctaaacttggataacacgtggtgaacaactgcctttagctggtccagattaatcatttcaaagacatccattttagatcacaagcaggaagtcgatagtctcaaaggcactttgtttctcccaagtaggccaccaggcagcctctagagttgctttacccaaatccttctccagccatgacttggtgactctaagcttgctcccacctgccccctccacttccctcagatgatgaggagccagggctaagggggcagccttctctcttcccagtgatgcacatccttcacattggctgctttgttctggaatatggatatctcagcctggatgccgaggaagctgctggatgcttaatggtgctagaggctcaagtgtgtttgaaaccaagagccagttgtcccccatgcagaaagaaatcctgtgtgagcctctggtatgagaaataaaatctgccagttttataacattcactttctgcctctgaggaaagatacagggaacaaaaatcaatttgtacagtcttaatattaaaagcagcttgactaaatacctgatttaaaaatagaagacatccccagtcctcatgacataccgcaaatatctgtggggtcctgttgaaaagaacaaaataaaggagcccaaggggtcattctgtctcagcaccatccagcctggcacttctcttcccatatatccattggatttttttttttttttcctaaacaaagtttttacactgagcagatgctctgtcatgatggcggttgtgcaattctggtatcctctaaatttgtaagcattcataaaacaggaaaaagtaaactatcattcggaagcacagcccattcctcccattttttgcaatgatgtctggatgttattttaaacagtgtgtctgtgtgttcccaaatccagctggccccaccagctcagattccattttttttgtgtgtgtgtgtgaaacgtagtctgcaactctgcctcccggcaattatacatgtgtcaggatgtcaaaaagcaattctcctgcctcagcctcctgagtagctgggactacaggttcctaccaccacacccggccaatttttgtatttttagtagagatggggtttcaccgtatcggcgaggatgatctctatctcttgacctcgtgatctgcccgcctcggcctcccaaagtgctgggattacaggcgtgtgccactgcgctcggcctcagattccatatttgaacaccagctgattgagagaaggggaatgagaagagctggatgagtttaaataactcattgttcagattcctgaacaggagttgggataatggccatcttttctttcctatcctttcttcccccctcactgtgaaaaataacagtccaccccaagtcatacactggacccagtgcctgcggggacaggactgtgggtttcttggtcacacctgtgttggtgctcaatgcagtgtagacatgttttcaaataaaacaaatgattgtgtacaaaaaaaaaaaaaaaaaa

SEQ ID NO: 3749 - DNA, 4261 bp, Homo sapiens; identical to SEQ ID NO: 1988

SEQ ID NO: 3750 - DNA, 6463 bp, Homo sapiens; identical to SEQ ID NO: 1711

SEQ ID NO: 3751 - DNA, 1099 bp, Homo sapiens
actggtgacgtagatctcatgtgaccaggagtcgacgtgtgcagaagtcctggtaatctggtccttgttcccgtctggataccagcttccttcagcagcgcaggcggtggtccctgaggcccgtggaaggagtcaaacttgcgggaattttgcagtttatctgcagggctgttgtttccagcaagacccaaagctagaaaaggaggaggaagaaactgacccgatcagtgccagtcattgtattcaaagaagaataagcaagaaagaaaagaaggaaggaagagaggtagacagatacaagatgaaatcctgtcaaaaaatggaaggaaaaccagaaaatgagagtgaaccaaagcatgaggaagagccaaagcctgaggaaaagccagaagaggaggagaagctagaggaggaggccaaagcaaaaggaacttttagagaaaggctgattcaatctctccaggagtttaaagaagatatacacaacaggcatttaagcaatgaagatatgtttagagaagtggatgaaatagatgagataaggagagtcagaaacaaacttatagtgatgcgttggaaggttaatcgaaaccatccttacccctatttaatgtagtttaccttgatttttatctgatattaacaataccatatagcttgctttttattagcatttcctgatattcctttgtccatatttctacttataacctgttgctattaatggttttagatgtatctcttgttatctgcatctcattgtttattgtattttgaaccaatctacaagtctctgtcttttaataaaagaactttacacatttgtaaaaaagaggttcttggtaagatataaaatggaaaaaggctaagtaatatgtgaatatcatatttttgaaaggtaaaaagtacatttgtatattacatatatggacataacttgtgaaggatgaaagaaagtacagcctctcggtggtgggattatgaatgatttttctccttttgcttgtttgtattttctatattcctaaaattaacacacattattattgctagaataataaaagttttataaaaaagaagcaacaaaaaaaaaaaaaaa

SEQ ID NO: 3752 - DNA, 1023 bp, Homo sapiens; identical to SEQ ID NO: 646

SEQ ID NO: 3753 - DNA, 1020 bp, Homo sapiens
actggtgacgtagatctcatgtgaccaggagtcgacgtgtgcagaagtcctggtaatctggtccttgttcccgtctggataccagcttccttcagcagcgcaggcggtggtccctgaggcccgtggaaggagtcaaacttgcgggaattttgcagtcattgtattcaaagaagaataagcaagaaagaaaagaaggaaggaagagaggtagacagatacaagatgaaatcctgtcaaaaaatggaaggaaaaccagaaaatgagagtgaaccaaagcatgaggaagagccaaagcctgaggaaaagccagaagaggaggagaagctagaggaggaggccaaagcaaaaggaacttttagagaaaggctgattcaatctctccaggagtttaaagaagatatacacaacaggcatttaagcaatgaagatatgtttagagaagtggatgaaatagatgagataaggagagtcagaaacaaacttatagtgatgcgttggaaggttaatcgaaaccatccttacccctatttaatgtagtttaccttgatttttatctgatattaacaataccatatagcttgctttttattagcatttcctgatattcctttgtccatatttctacttataacctgttgctattaatggttttagatgtatctcttgttatctgcatctcattgtttattgtattttgaaccaatctacaagtctctgtcttttaataaaagaactttacacatttgtaaaaaagaggttcttggtaagatataaaatggaaaaaggctaagtaatatgtgaatatcatatttttgaaaggtaaaaagtacatttgtatattacatatatggacataacttgtgaaggatgaaagaaagtacagcctctcggtggtgggattatgaatgatttttctccttttgcttgtttgtattttctatattcctaaaattaacacacattattattgctagaataataaaagttttataaaaaagaagcaacaaaaaaaaaaaaaaa

SEQ ID NO: 3754 - DNA, 1245 bp, Homo sapiens; identical to SEQ ID NO: 786

SEQ ID NO: 3755 - DNA, 1102 bp, Homo sapiens
actggtgacgtagatctcatgtgaccaggagtcgacgtgtgcagaagtcctggtaatctggtccttgttcccgtctggataccagcttccttcagcagcgcaggcggtggtccctgaggcccgtggaaggagtcaaacttgcgggaattttgcagtttatctgcagggctgttgtttccagcaagacccaaagctagaaaaggaggaggaagaaactgacccgatcagtgccagaagtcattgtattcaaagaagaataagcaagaaagaaaagaaggaaggaagagaggtagacagatacaagatgaaatcctgtcaaaaaatggaaggaaaaccagaaaatgagagtgaaccaaagcatgaggaagagccaaagcctgaggaaaagccagaagaggaggagaagctagaggaggaggccaaagcaaaaggaacttttagagaaaggctgattcaatctctccaggagtttaaagaagatatacacaacaggcatttaagcaatgaagatatgtttagagaagtggatgaaatagatgagataaggagagtcagaaacaaacttatagtgatgcgttggaaggttaatcgaaaccatccttacccctatttaatgtagtttaccttgatttttatctgatattaacaataccatatagcttgctttttattagcatttcctgatattcctttgtccatatttctacttataacctgttgctattaatggttttagatgtatctcttgttatctgcatctcattgtttattgtattttgaaccaatctacaagtctctgtcttttaataaaagaactttacacatttgtaaaaaagaggttcttggtaagatataaaatggaaaaaggctaagtaatatgtgaatatcatatttttgaaaggtaaaaagtacatttgtatattacatatatggacataacttgtgaaggatgaaagaaagtacagcctctcggtggtgggattatgaatgatttttctccttttgcttgtttgtattttctatattcctaaaattaacacacattattattgctagaataataaaagttttataaaaaagaagcaacaaaaaaaaaaaaaaa

SEQ ID NO: 3756 - DNA, 7111 bp, Homo sapiens
gcgtcagccctcacgtcacttcgccagcagtagcagaggcggcggcggcggctcccggaattgggttggagcaggagcctcgctggctgcttcgctcgcgctctacgcgctcagtccccggcggtagcaggagcctggacccaggcgccgccggcgggcgtgaggcgccggagcccggcctcgaggtgcataccggacccccattcgcatctaacaaggaatctgcgccccagagagtcccgggagcgccgccggtcggtgcccggcgcgccgggccatgcagcgacggccgccgcggagctccgagcagcggtagcgcccccctgtaaagcggttcgctatgccggggccactgtgaaccctgccgcctgccggaacactcttcgctccggaccagctcagcctctgataagctggactcggcacgcccgcaacaagcaccgaggagttaagagagccgcaagcgcagggaaggcctccccgcacgggtgggggaaagcggccggtgcagcgcggggacaggcactcgggctggcactggctgctagggatgtcgtcctggataaggtggcatggacccgccatggcgcggctctggggcttctgctggctggttgtgggcttctggagggccgctttcgcctgtcccacgtcctgcaaatgcagtgcctctcggatctggtgcagcgacccttctcctggcatcgtggcatttccgagattggagcctaacagtgtagatcctgagaacatcaccgaaattttcatcgcaaaccagaaaaggttagaaatcatcaacgaagatgatgttgaagcttatgtgggactgagaaatctgacaattgtggattctggattaaaatttgtggctcataaagcatttctgaaaaacagcaacctgcagcacatcaattttacccgaaacaaactgacgagtttgtctaggaaacatttccgtcaccttgacttgtctgaactgatcctggtgggcaatccatttacatgctcctgtgacattatgtggatcaagactctccaagaggctaaatccagtccagacactcaggatttgtactgcctgaatgaaagcagcaagaatattcccctggcaaacctgcagatacccaattgtggtttgccatctgcaaatctggccgcacctaacctcactgtggaggaaggaaagtctatcacattatcctgtagtgtggcaggtgatccggttcctaatatgtattgggatgttggtaacctggtttccaaacatatgaatgaaacaagccacacacagggctccttaaggataactaacatttcatccgatgacagtgggaagcagatctcttgtgtggcggaaaatcttgtaggagaagatcaagattctgtcaacctcactgtgcattttgcaccaactatcacatttctcgaatctccaacctcagaccaccactggtgcattccattcactgtgaaaggcaaccccaaaccagcgcttcagtggttctataacggggcaatattgaatgagtccaaatacatctgtactaaaatacatgttaccaatcacacggagtaccacggctgcctccagctggataatcccactcacatgaacaatggggactacactctaatagccaagaatgagtatgggaaggatgagaaacagatttctgctcacttcatgggctggcctggaattgacgatggtgcaaacccaaattatcctgatgtaatttatgaagattatggaactgcagcgaatgacatcggggacaccacgaacagaagtaatgaaatcccttccacagacgtcactgataaaaccggtcgggaacatctctcggtctatgctgtggtggtgattgcgtctgtggtgggattttgccttttggtaatgctgtttctgcttaagttggcaagacactccaagtttggcatgaaaggttttgttttgtttcataagatcccactggatgggtagctgaaataaaggaaaagacagagaaaggggctgtggtgcttgttggttgatgctgccatgtaagctggactcctgggactgctgttggcttatcccgggaagtgctgcttatctggggttttctggtagatgtgggcggtgtttggaggctgtactatatgaagcctgcatatactgtgagctgtgattggggaacaccaatgcagaggtaactctcaggcagctaagcagcacctcaagaaaacatgttaaattaatgcttctcttcttacagtagttcaaatacaaaactgaaatgaaatcccattggattgtacttctcttctgaaaagtgtgctttttgaccctactggacatttattgacttaattgcttctgtttattaaaattgacctgcaaagttaaaaaaaaattaaagttgagaacaggtataagtgcacactgaatagtctaatctacatgtaacacatattttagtgtgattttctatactctaatcagcactgaattcagagggtttgactttttcatctataacacagtgactaaaagagttaagggtatatataccatcactttgggacttggtagtattattaaaaggttatttccttcactgtcaataaaagtccaaatgtttagcttaggtctgagagtcaaacaatgttaaggattgtcttaaagttccttagccagcaaaacaaaacaaaacaaaacaaacaaatgaaaaacgtttaaaaagaagaagaagaaaaaaaacaagaacaagcagcaacagctgttttgttggggctatagatttaagttaggcatagtcaatttcagaataactaagagtggaatatatgcatatggtgaaattataaccttgcccttttttatttgccctctgcgatccacctgctttttagaagtctgccgagtgagaaggccacagtatctcatgctgtttgcattacagaactgcagcttttctactctgaaaaggcctgggagcagaatggctggcctgctgtgagcaggagaggagattctaagaaggatagtcccccctacaacatactgtcatactgctgggttttcatgggtaggaaagcttgtcctgaccccagcagcaaagaggtggcaggtcgctaatgaatatatgctttataatgtccttcttcattgctgagagggcagccttagagctgtggatttctgcatcccccctgagtctgacccatggacacctgtttcattcactttagcatcacagtgacctttgtatgctctgttcagtctgtgtcaggcagtatgcttgtcctgaagagaggtttggctatccccaccccaccccaccccaccctgttccttttttatcaggaggacttcagagccaggcctgcagcattttgtttgaaaacacaatcagctctgacagttagacatgcacacagacgccatagctggattggaaacattgatgttttaaaaatttattttttttggaaatagttgcacaaatgctgcaatttagctttaaggttctatagatttttaactagtccaacacagtcagaaacattgttttgaatcctctgtaaaccaaggcattaatcttaataaaccaggatccatttaggtaccacttgatataaaaaggatatccataatgaatattttatactgcatcctttacattagccactaaatacgttattgcttgatgaagacctttcacagaatcctatggattgcagcatttcacttggctacttcatacccatgccttaaagaggggcagtttctcaaaagcagaaacatgccgccagttctcaagttttcctcctaactccatttgaatgtaagggcagctggcccccaatgtggggaggtccgaacattttctgaattcccattttcttgttcgcggctaaatgacagtttctgtcattacttagattccgatctttcccaaaggtgttgatttacaaagaggccagctaatagcagaaatcatgaccctgaaagagagatgaaattcaagctgtgagccaggcaggagctcagtatggcaaaggttcttgagaatcagccatttggtacaaaaaagatttttaaagcttttatgttataccatggagccatagaaaggctatggattgtttaagaactattttaaagtgttccagacccaaaaaggaaaaataaaaaaaaaggaatatttgtacccaacagctagaaggattgcaaggtagatttttgttttaaaatggagagaagtggacagataaggccatttaatatatcaaagatcagttgacatctcctagggaatgatgaaaacagcaggctattagaaaattatttcatatagttctcgtgttcttttcttttttttaatccctgaagggatgatcagtaacatagcttctcttttctgtactctagaccaccccttttcatcattttgctttttatgtctcccataagaaatgtgctttttagagcttcctaatgcatgtgttgcattattgcagcattagaaaaggagaggtagcatttttgctgaaatcgggcctgtcactctccaataaaggttctggcacttcaatgccaggcaggtctcctaaatgaacagaatgatctgtgtgagccgatgcctgcccttccagaggggccactgtccccagccgcagccaactgtgtcccacaggaatgggagcctaggtttccaaatcttgtgattctttaggagaaacatgaaacctggatttcgtgtgaaatgtcccgattgttaaaaagttggctcaattatttttaaaacattttgtaagccaacaaaagtctgtgggctgccagtttattacttttgtcttaaaacatgatcattgttctctcacggtatccttctgtcttcccgttgcaaattcacttttctttcttcctgacattgccattgagggctttgttaccacaagctaagaaactgagtttaacagcccagttatctgcaacatgtcaattacctttgctcctctcctgtgattcccaccatgctgtgaccctcagctgtctccctttgctgggaattctgcaccaatgtctcccctcaacccattccctggttggtcctactcccgtgtggccagagacatcctagcaaatccttcctcctattatatctgacactaatttcttttcaacagcgctcatgtctcttggcccagtcaggtgctgccaggtttagataggaaagtacatgtcccattttcatgggtgcccttaatgtggtccacgtcctatatcttattatatttactcatggctcaatgggggcctccagagaccctctcaggctgctgagctagactaaggaatgcatccaccgtcatcacatgagacactgactctgtgacgacaaaagtacaaacagtctgaggctaagaaaggttcatctcacaacaggaaaaacaaatctcaacacacattagagataattgattcaggggttttctctcccagtctcccagcagggactgatttcatttctgacccactaggttttctttccagaaataggtagcaaggacaagaactaaacaatcccagccccacccagcaacacagaacacaggagtttgcttttggcttctcactctccaagtaaccctgaattaggcccagaatggctgaggcttggagcatctcctcagacagagcagaggcgacacctcttcaggggtgtgtggagtaaatagctcgaagagctgaagacagaaaaccagtttcacgccaggtgcgagagagagcataatggagggaagcccgctttctctctcctcttcttttctctttatttctttagagcacttgacttttttttctctctctctctagtattctaaactgaccccatgaccaactgagaatttatttttgtttcattggttgtttcacagaattagaacacacacgactttttattcctccattgcaaaatggaatcaagatactacacaagacctgtgctttcttcctttgcatgatttacacctccgcctgttttggtgctagctgtctagaacttctctcttggtttgaatctgattccttcacactacactagaagtttatttcatcttgttttgtctagactccagatacagagggacagctggactgaggacaagcaattccatctagcatagggtctctcagggttggtgcatccagccacatgggcagggccagtcacatctagtctatgtccccagagcccttggagttgcgcagcttagctgacttgactccaaggaaattagtacagaagtaaccactctattaagtgtgttctgctatgttcacatgcctgtagtacctgcaaaccatgccaggttcatctaaagacataggggaagattaaggactcttttggacagaccatgaattgaatttgctgccaggtgctgccagactgaatttggctgacagaactcccagcccaggaaagttccatgacaatgactgtcgcagaaggaaatttcccactaaagtcagtccattttcaagttttggtcttcagagacaaaagaacgtcccagccacctgattttgatggtgaggtaactctaagttgaattcaggctagtgttgcagtatagctttggcatgttcatgagtgagcacccagaatgtgttgaaccaacccccacccctaactactgactatgactgcagtgggtttttatggggaaaaaaagtgtgaaaagcaaaaagaaaggaacagagattttttatcacctttattgtaagacagtccatttatgaattgagtataaacacatacaaagtaacaagagattcctaagaaacgcaaatccttgagtttcacgcacttcatgttcaaccatttgctgtaatccagaggcagcctgtgaatcattctcatgccctgttttttttttttttttcctataatgttctgggtttaaaagccatcttttccacattttctgtaaataatggataatcattttaaaaatttttatttttagtgctgttttaacaatgtagatagatcataaatgtacttgctgaattcaatcatttttaacaagccaataaagtttgataattcatctc

SEQ ID NO: 3757 - DNA, 4729 bp, Homo sapiens; identical to SEQ ID NO: 1733

SEQ ID NO: 3758 - DNA, 2889 bp, Homo sapiens; identical to SEQ ID NO: 246

SEQ ID NO: 3759 - DNA, 760 bp, Homo sapiens; identical to SEQ ID NO: 2459

SEQ ID NO: 3760 - DNA, 3672 bp, Homo sapiens; identical to SEQ ID NO: 1920

SEQ ID NO: 3761 - DNA, 4267 bp, Homo sapiens; identical to SEQ ID NO: 126

SEQ ID NO: 3762 - DNA, 4077 bp, Homo sapiens
ctggagctggtgctgaaaaagggggtttgcagaggctgccctggggctggtgctgaaagaagagcccacagctgacttcatggtgctacaataacctcagaatctacttttcactctcaggagaacccacatgtctaatatttagacatgatggcaaactgggcggaagcaagacctctcctcattcttattgttttattagggcaatttgtctcaataaaagcccaggaagaagacgaggatgaaggatatggtgaagaaatagcctgcactcagaatggccagatgtacttaaacagggacatttggaaacctgccccttgtcagatctgggtccgaggggaatgccaggagagagagggagacttgggccacagggtgctcctggacaacgaggtgcacatggtatgcctggaaaacctggaccaatgggtcctcttgggataccaggctcttctggttttccaggaaatcctggaatgaagggagaagcaggtcctacaggacctcctggtgaacctggtgatcctggaccaatgggtccgattggttcacgtggaccagagggccctcctggtaaacctggggaagatggtgaacctggcagaaatggaaatcctggtgaagtgggatttgcaggatctccgggagctcgtggatttcctggggctcctggtcttccaggtctgaagggtcaccgaggacacaaaggtcttgaaggccctaaaggtgaagttggagcacctggttccaagggtgaagctggccccactggtccaatgggtgacccaggaacagttggtcctccagggccagtgggagaaaggggtgctcctggcaatcgtggttttccaggctctgatggtttacctgggccaaagggtgctcaaggagaacggggtcctgtaggttcttcaggacccaaaggaagccagggggatccaggacgtccaggggaacctgggcttccaggtgctcggggtttgacaggaaatcctggtgttcaaggtcctgaaggaaaacttggacctttgggtgcgccaggggaagatggccgtccaggtcctccaggctccataggaatcagagggcagcccgggagcatgggccttccaggccccaaaggtagcagtggtgaccctgggaaacctggagaagcaggaaatgctggagttcctgggcagaggggagctcctggaaaagatggtgaagttggtccttctggtcctgtgggcccgccgggtctagctggtgaaagaggagaacaaggacctccaggccccacaggttttcaggggcttcctggtcctccagggcctcctggagaaggtggaaaaccaggtgatcaaggtgttcctggagatcccggagcagttggcccgttaggacctagaggagaacgaggaaatcctggggaaagaggagaacctgggataactggactccctggtgagaagggaatggctggaggacatggtcctgatggcccaaaaggcagtccaggtccatctgggacccctggagatacaggcccaccaggtcttcaaggtatgccgggagaaagaggaattgcaggaactcctggccccaagggtgacagaggtggcataggagaaaaaggtgctgaaggcacagctggaaatgatggtgcaagaggtcttccaggtcctttgggccctccaggtccggcaggtcctactggagaaaagggtgaacctggtcctcgaggtttagttggccctcctggctcccggggcaatcctggttctcgaggtgaaaatgggccaactggagctgttggttttgccggaccccagggtcctgacggacagcctggagtaaaaggtgaacctggagagccaggacagaagggagatgctggttctcctggaccacaaggtttagcaggatcccctggccctcatggtcctaatggtgttcctggactaaaaggtggtcgaggaacccaaggtccgcctggtgctacaggatttcctggttctgcgggcagagttggacctccaggccctgctggagctccaggacctgcgggacccctaggggaacccgggaaggagggacctccaggtcttcgtggggaccctggctctcatgggcgtgtgggagatcgaggaccagctggcccccctggtggcccaggagacaaaggggacccaggagaagatgggcaacctggtccagatggcccccctggtccagctggaacgaccgggcagagaggaattgttggcatgcctgggcaacgtggagagagaggcatgcccggcctaccaggcccagcgggaacaccaggaaaagtaggaccaactggtgcaacaggagataaaggtccacctggacctgtggggcccccaggctccaatggtcctgtaggggaacctggaccagaaggtccagctggcaatgatggtaccccaggacgggatggtgctgttggagaacgtggtgatcgtggagaccctgggcctgcaggtctgccaggctctcagggtgcccctggaactcctggccctgtgggtgctccaggagatgcaggacaaagaggagatccgggttctcggggtcctataggaccacctggtcgagctgggaaacgtggattacctggaccccaaggacctcgtggtgacaaaggtgatcatggagaccgaggcgacagaggtcagaagggccacagaggctttactggtcttcagggtcttcctggccctcctggtccaaatggtgaacaaggaagtgctggaatccctggaccatttggcccaagaggtcctccaggcccagttggtccttcaggtaaagaaggaaaccctgggccacttgggccaattggacctccaggtgtacgaggcagtgtaggagaagcaggacctgagggccctcctggtgagcctggcccacctggccctccgggtccccctggccaccttacagctgctcttggggatatcatggggcactatgatgaaagcatgccagatccacttcctgagtttactgaagatcaggcggctcctgatgacaaaaacaaaacggacccaggggttcatgctaccctgaagtcactcagtagtcagattgaaaccatgcgcagccccgatggctcgaaaaagcacccagcccgcacgtgtgatgacctaaagctttgccattccgcaaagcagagtggtgaatactggattgatcctaaccaaggatctgttgaagatgcaatcaaagtttactgcaacatggaaacaggagaaacatgtatttcagcaaacccatccagtgtaccacgtaaaacctggtgggccagtaaatctcctgacaataaacctgtttggtatggtcttgatatgaacagagggtctcagttcgcttatggagaccaccaatcacctaatacagccattactcagatgacttttttgcgccttttatcaaaagaagcctcccagaacatcacttacatctgtaaaaacagtgtaggatacatggacgatcaagctaagaacctcaaaaaagctgtggttctcaaaggggcaaatgacttagatatcaaagcagagggaaatattagattccggtatatcgttcttcaagacacttgctctaagcggaatggaaatgtgggcaagactgtctttgaatatagaacacagaatgtggcacgcttgcccatcatagatcttgctcctgtggatgttggcggcacagaccaggaattcggcgttgaaattgggccagtttgttttgtgtaaagtaagccaagacacatcgacaatgagcaccaccatcaatgaccaccgccattcacaagaactttgactgtttgaagttgatcctgagactcttgaagtaatggctgatcctgcatcagcattgtatatatggtcttaagtgcctggcctccttatccttcagaatatttattttacttacaatcctcaagttttaattgattttaaatatttttcaatacaacagtttaggtttaagatgaccaatgacaatgaccacctttgcagaaagtaaactgattgaataaataaaaaaaaaaaaaaaaaaaaaaaa

SEQ ID NO: 3763 - DNA, 4017 bp, Homo sapiens
atggtcagctactgggacaccggggtcctgctgtgcgcgctgctcagctgtctgcttctcacaggatctagttcaggttcaaaattaaaagatcctgaactgagtttaaaaggcacccagcacatcatgcaagcaggccagacactgcatctccaatgcaggggggaagcagcccataaatggtctttgcctgaaatggtgagtaaggaaagcgaaaggctgagcataactaaatctgcctgtggaagaaatggcaaacaattctgcagtactttaaccttgaacacagctcaagcaaaccacactggcttctacagctgcaaatatctagctgtacctacttcaaagaagaaggaaacagaatctgcaatctatatatttattagtgatacaggtagacctttcgtagagatgtacagtgaaatccccgaaattatacacatgactgaaggaagggagctcgtcattccctgccgggttacgtcacctaacatcactgttactttaaaaaagtttccacttgacactttgatccctgatggaaaacgcataatctgggacagtagaaagggcttcatcatatcaaatgcaacgtacaaagaaatagggcttctgacctgtgaagcaacagtcaatgggcatttgtataagacaaactatctcacacatcgacaaaccaatacaatcatagatgtccaaataagcacaccacgcccagtcaaattacttagaggccatactcttgtcctcaattgtactgctaccactcccttgaacacgagagttcaaatgacctggagttaccctgatgaaaaaaataagagagcttccgtaaggcgacgaattgaccaaagcaattcccatgccaacatattctacagtgttcttactattgacaaaatgcagaacaaagacaaaggactttatacttgtcgtgtaaggagtggaccatcattcaaatctgttaacacctcagtgcatatatatgataaagcattcatcactgtgaaacatcgaaaacagcaggtgcttgaaaccgtagctggcaagcggtcttaccggctctctatgaaagtgaaggcatttccctcgccggaagttgtatggttaaaagatgggttacctgcgactgagaaatctgctcgctatttgactcgtggctactcgttaattatcaaggacgtaactgaagaggatgcagggaattatacaatcttgctgagcataaaacagtcaaatgtgtttaaaaacctcactgccactctaattgtcaatgtgaaaccccagatttacgaaaaggccgtgtcatcgtttccagacccggctctctacccactgggcagcagacaaatcctgacttgtaccgcatatggtatccctcaacctacaatcaagtggttctggcacccctgtaaccataatcattccgaagcaaggtgtgacttttgttccaataatgaagagtcctctatcctggatgctgacagcaacatgggaaacagaattgagagcatcactcagcgcatggcaataatagaaggaaagaataagatggctagcaccttggttgtggctgactctagaatttctggaatctacatttgcatagcttccaataaagttgggactgtgggaagaaacataagcttttatatcacagatgtgccaaatgggtttcatgttaacttggaaaaaatgccgacggaaggagaggacctgaaactgtcttgcacagttaacaagttcttatacagagacgttacttggattttactgcggacagttaataacagaacaatgcactacagtattagcaagcaaaaaatggccatcactaaggagcactccatcactcttaatcttaccatcatgaatgtttccctgcaagattcaggcacctatgcctgcagagccaggaatgtatacacaggggaagaaatcctccagaagaaagaaattacaatcagagatcaggaagcaccatacctcctgcgaaacctcagtgatcacacagtggccatcagcagttccaccactttagactgtcatgctaatggtgtccccgagcctcagatcacttggtttaaaaacaaccacaaaatacaacaagagcctggaattattttaggaccaggaagcagcacgctgtttattgaaagagtcacagaagaggatgaaggtgtctatcactgcaaagccaccaaccagaagggctctgtggaaagttcagcatacctcactgttcaaggaacctcggacaagtctaatctggagctgatcactctaacatgcacctgtgtggctgcgactctcttctggctcctattaaccctctttatccgaaaaatgaaaaggtcttcttctgaaataaagactgactacctatcaattataatggacccagatgaagttcctttggatgagcagtgtgagcggctcccttatgatgccagcaagtgggagtttgcccgggagagacttaaactgggcaaatcacttggaagaggggcttttggaaaagtggttcaagcatcagcatttggcattaagaaatcacctacgtgccggactgtggctgtgaaaatgctgaaagagggggccacggccagcgagtacaaagctctgatgactgagctaaaaatcttgacccacattggccaccatctgaacgtggttaacctgctgggagcctgcaccaagcaaggagggcctctgatggtgattgttgaatactgcaaatatggaaatctctccaactacctcaagagcaaacgtgacttattttttctcaacaaggatgcagcactacacatggagcctaagaaagaaaaaatggagccaggcctggaacaaggcaagaaaccaagactagatagcgtcaccagcagcgaaagctttgcgagctccggctttcaggaagataaaagtctgagtgatgttgaggaagaggaggattctgacggtttctacaaggagcccatcactatggaagatctgatttcttacagttttcaagtggccagaggcatggagttcctgtcttccagaaagtgcattcatcgggacctggcagcgagaaacattcttttatctgagaacaacgtggtgaagatttgtgattttggccttgcccgggatatttataagaaccccgattatgtgagaaaaggagatactcgacttcctctgaaatggatggctcctgaatctatctttgacaaaatctacagcaccaagagcgacgtgtggtcttacggagtattgctgtgggaaatcttctccttaggtgggtctccatacccaggagtacaaatggatgaggacttttgcagtcgcctgagggaaggcatgaggatgagagctcctgagtactctactcctgaaatctatcagatcatgctggactgctggcacagagacccaaaagaaaggccaagatttgcagaacttgtggaaaaactaggtgatttgcttcaagcaaatgtacaacaggatggtaaagactacatcccaatcaatgccatactgacaggaaatagtgggtttacatactcaactcctgccttctctgaggacttcttcaaggaaagtatttcagctccgaagtttaattcaggaagctctgatgatgtcagatatgtaaatgctttcaagttcatgagcctggaaagaatcaaaacctttgaagaacttttaccgaatgccacctccatgtttgatgactaccagggcgacagcagcactctgttggcctctcccatgctgaagcgcttcacctggactgacagcaaacccaaggcctcgctcaagattgacttgagagtaaccagtaaaagtaaggagtcggggctgtctgatgtcagcaggcccagtttctgccattccagctgtgggcacgtcagcgaaggcaagcgcaggttcacctacgaccacgctgagctggaaaggaaaatcgcgtgctgctccccgcccccagactacaactcggtggtcctgtactccaccccacccatctag

SEQ ID NO: 3764 - DNA, 5576 bp, Homo sapiens; identical to SEQ ID NO: 723

SEQ ID NO: 3765 - DNA, 1781 bp, Homo sapiens
cttctcaatatcagcactggattgtagaacttgttgctgattttggcctggcattcaagttaactcttccccttggtatctgtacatacctttgatgtcagtgtttagtacacgtggcttggtcacttcatggctaaaaacgtgcttgtggaagacaagtctggcttggaatataaatagtttctggaaaggacactgacaacttcaaagcaaaatgaagctcttttggttgcttttcaccattgggttctgctgggctcagtattcctcaaatacacaacaaggacgaacatctattgttcatctgtttgaatggcgatgggttgatattgctcttgaatgtgagcgatatttagctcccaagggatttggaggggttcaggtctctccaccaaatgaaaatgttgccattcacaaccctttcagaccttggtgggaaagataccaaccagttagctataaattatgcacaagatctggaaatgaagatgaatttagaaacatggtgactagatgcaacaatgttggggttcgtatttatgtggatgctgtaattaatcatatgtgtggtaatgctgtgagtgcaggaacaagcagtacctgtggaagttacttcaaccctggaagtagggactttccagcagtcccatattctggatgggattttaatgatggtaaatgtaaaactggaagtggagatatcgagaactataatgatgctactcaggtcagagattgtcgtctgtctggtcttctcgatcttgcactggggaaggattatgtgcgttctaagattgccgaatatatgaaccatctcattgacattggtgttgcagggttcagaattgatgcttccaagcacatgtggcctggagacataaaggcaattttggacaaactgcataatctaaacagtaactggttcccggaaggtagtaaacctttcatttaccaggaggtaattgatctgggtggtgagccaattaaaagcagtgactactttggtaatggccgggtgacagaattcaagtatggtgcaaaactcggcacagttattcgcaagtggaatggagagaagatgtcttacttaaagaactggggagaaggttggggtttcatgccttctgacagagcgcttgtctttgtggataaccatgacaatcaacgaggacatggcgctggaggagcctctatacttaccttctgggatgctaggctgtacaaaatggcagttggatttatgcttgctcatccttatggatttacacgagtaatgtcaagctaccgttggccaagatattttgaaaatggaaaagatgttaatgattgggttgggccaccaaatgataatggagtaactaaagaagttactattaatccagacactacttgtggcaatgactgggtctgtgaacatcgatggcgccaaataaggaacatggttaatttccgcaatgtagtggatggccagccttttacaaactggtatgataatgggagcaaccaagtggcttttgggagaggaaacagaggattcattgttttcaacaatgatgactggacattttctttaactttgcaaactggtcttcctgctggcacatactgtgatgtcatttctggagataaaattaatggcaactgcacaggcattaaaatctacgtttctgatgatggcaaagctcatttttctattagtaactctgctgaagatccatttattgcaattcatgctgaatctaaattgtaaaatttaaaattaaatgcaaatccgcaaagca

SEQ ID NO: 3766 - DNA, 1838 bp, Homo sapiens
agcagtctctgatccgtgcagggtattaatgtgtcagggctgagtgttctgagatttatctagaggctgggaagggctcctgaaccagttgtttccgtcttgtcggtctgtcagggttggaaagtccaagccataggacccagtttcctttcttagcttacgttatctaccagagcaccgtgggctgttacttgccttgagttggaagcggttcgcatttataccggaatataaatagtttctggaaaggacactgacaacttcaaagcaaaatgaagctcttttggttgcttttcaccattgggttctgctgggctcagtattcctcaaatacacaacaaggacgaacatctattgttcatctgtttgaatggcgatgggttgatattgctcttgaatgtgagcgatatttagctcccaagggatttggaggggttcaggtctctccaccaaatgaaaatgttgccattcacaaccctttcagaccttggtgggaaagataccaaccagttagctataaattatgcacaagatctggaaatgaagatgaatttagaaacatggtgactagatgcaacaatgttggggttcgtatttatgtggatgctgtaattaatcatatgtgtggtaatgctgtgagtgcaggaacaagcagtacctgtggaagttacttcaaccctggaagtagggactttccagcagtcccatattctggatgggattttaatgatggtaaatgtaaaactggaagtggagatatcgagaactataatgatgctactcaggtcagagattgtcgtctgtctggtcttctcgatcttgcactggggaaggattatgtgcgttctaagattgccgaatatatgaaccatctcattgacattggtgttgcagggttcagaattgatgcttccaagcacatgtggcctggagacataaaggcaattttggacaaactgcataatctaaacagtaactggttcccggaaggtagtaaacctttcatttaccaggaggtaattgatctgggtggtgagccaattaaaagcagtgactactttggtaatggccgggtgacagaattcaagtatggtgcaaaactcggcacagttattcgcaagtggaatggagagaagatgtcttacttaaagaactggggagaaggttggggtttcatgccttctgacagagcgcttgtctttgtggataaccatgacaatcaacgaggacatggcgctggaggagcctctatacttaccttctgggatgctaggctgtacaaaatggcagttggatttatgcttgctcatccttatggatttacacgagtaatgtcaagctaccgttggccaagatattttgaaaatggaaaagatgttaatgattgggttgggccaccaaatgataatggagtaactaaagaagttactattaatccagacactacttgtggcaatgactgggtctgtgaacatcgatggcgccaaataaggaacatggttaatttccgcaatgtagtggatggccagccttttacaaactggtatgataatgggagcaaccaagtggcttttgggagaggaaacagaggattcattgttttcaacaatgatgactggacattttctttaactttgcaaactggtcttcctgctggcacatactgtgatgtcatttctggagataaaattaatggcaactgcacaggcattaaaatctacgtttctgatgatggcaaagctcatttttctattagtaactctgctgaagatccatttattgcaattcatgctgaatctaaattgtaaaatttaaaattaaatgcaaatccgcaaagc

SEQ ID NO: 3767 - DNA, 1860 bp, Homo sapiens
ggcttggtgagtctgtgtggtcagcagtctctgatccgtgcagggtattaatgtgtcagggctgagtgttctgagatttatctagaggctgggaagggctcctgaaccagttgtttccgtcttgtcggtctgtcagggttggaaagtccaagccataggacccagtttcctttcttagcttacgttatctaccagagcaccgtgggctgttacttgccttgagttggaagcggttcgcatttataccggaatataaatagtttctggaaaggacactgacaacttcaaagcaaaatgaagctcttttggttgcttttcaccattgggttctgctgggctcagtattcctcaaatacacaacaaggacgaacatctattgttcatctgtttgaatggcgatgggttgatattgctcttgaatgtgagcgatatttagctcccaagggatttggaggggttcaggtctctccaccaaatgaaaatgttgccattcacaaccctttcagaccttggtgggaaagataccaaccagttagctataaattatgcacaagatctggaaatgaagatgaatttagaaacatggtgactagatgcaacaatgttggggttcgtatttatgtggatgctgtaattaatcatatgtgtggtaatgctgtgagtgcaggaacaagcagtacctgtggaagttacttcaaccctggaagtagggactttccagcagtcccatattctggatgggattttaatgatggtaaatgtaaaactggaagtggagatatcgagaactataatgatgctactcaggtcagagattgtcgtctgtctggtcttctcgatcttgcactggggaaggattatgtgcgttctaagattgccgaatatatgaaccatctcattgacattggtgttgcagggttcagaattgatgcttccaagcacatgtggcctggagacataaaggcaattttggacaaactgcataatctaaacagtaactggttcccggaaggtagtaaacctttcatttaccaggaggtaattgatctgggtggtgagccaattaaaagcagtgactactttggtaatggccgggtgacagaattcaagtatggtgcaaaactcggcacagttattcgcaagtggaatggagagaagatgtcttacttaaagaactggggagaaggttggggtttcatgccttctgacagagcgcttgtctttgtggataaccatgacaatcaacgaggacatggcgctggaggagcctctatacttaccttctgggatgctaggctgtacaaaatggcagttggatttatgcttgctcatccttatggatttacacgagtaatgtcaagctaccgttggccaagatattttgaaaatggaaaagatgttaatgattgggttgggccaccaaatgataatggagtaactaaagaagttactattaatccagacactacttgtggcaatgactgggtctgtgaacatcgatggcgccaaataaggaacatggttaatttccgcaatgtagtggatggccagccttttacaaactggtatgataatgggagcaaccaagtggcttttgggagaggaaacagaggattcattgttttcaacaatgatgactggacattttctttaactttgcaaactggtcttcctgctggcacatactgtgatgtcatttctggagataaaattaatggcaactgcacaggcattaaaatctacgtttctgatgatggcaaagctcatttttctattagtaactctgctgaagatccatttattgcaattcatgctgaatctaaattgtaaaatttaaaattaaatgcaaatccgcaaagc

SEQ ID NO: 3768 - DNA, 5242 bp, Homo sapiens; identical to SEQ ID NO: 617

SEQ ID NO: 3769 - DNA, 2215 bp, Homo sapiens
ggaaaataaagggttggagcctctgtgtttctttgttgaaaaatctgctactattattagatctgtgaaaacaattgaaaattcggttattatcaccttaaaagtacaaaacctatagattttgaaaatgtaattatttttctgtaggcatagttaaaaagattttgtaaatgttataaatcagtttctttataagcggtttatttagataaattttgttatactgacatgattcactaattttctaaatataaatggttcagctcttagttatttttaaactaatgacctgtgttatacttcctatttttaatgggcttttatgatgttttaggtttttttgaatcccgtgtccttcaagtgctttctaactttgagaggaagaaattgaccacctggactatggaactttggttgaatctggcgatgtggaacccatggatatggagggctgactatatacaccatgttttttcctggcacatcactcaactactattagctggcgagtcaactcacgttgttggaatgactagggacaactagacttcaagtgatctttcatcccaggaatataaatagtttctggaaaggacactgacaacttcaaagcaaaatgaagttctttctgttgcttttcaccattgggttctgctgggctcagtattccccaaatacacaacaaggacggacatctattgttcatctgtttgaatggcgatgggttgatattgctcttgaatgtgagcgatatttagctcccaagggatttggaggggttcaggtctctccaccaaatgaaaatgttgcaattcacaaccctttcagaccttggtgggaaagataccaaccagttagctataaattatgcacaagatctggaaatgaagatgaatttagaaacatggtgactagatgtaacaatgttggggttcgtatttatgtggatgctgtaattaatcatatgtctggtaatgctgtgagtgcaggaacaagcagtacctgtggaagttacttcaaccctggaagtagggactttccagcagtcccatattctggatgggattttaatgatggtaaatgtaaaactggaagtggagatatcgagaactacaatgatgctactcaggtcagagattgtcgtctggttggtcttcttgatcttgcactggagaaagattatgtgcgttccaagattgccgaatatatgaatcatctcattgacattggtgttgcagggttcagacttgatgcttccaagcacatgtggcctggagacataaaggcaattttggacaaactgcataatctaaacagtaactggttccctgcaggaagtaaacctttcatttaccaggaggtaattgatctgggtggtgagccaattaaaagcagtgactactttggaaatggccgggtgacagaattcaagtatggtgcaaaactcggcacagttattcgcaagtggaatggagagaagatgtcttacctaaagaactggggagaaggttggggtttcatgccttctgacagagcacttgtctttgtggataaccatgacaatcaacgaggacatggggctggaggagcctctattcttaccttctgggatgctaggctgtataaaatggcagttggatttatgcttgctcatccttatggttttacacgagtaatgtcaagctaccgttggccaagacagtttcaaaatggaaacgatgttaatgattgggttgggccaccaaataataatggagtaattaaagaagttactattaatccagacactacttgtggcaatgactgggtctgtgaacatcgatggcgccaaataaggaacatggttaatttccgcaatgtagtggatggccagccttttacaaactggtatgataatgggagcaaccaagtggcttttgggagaggaaacagaggattcattgttttcaacaatgatgactggacattttctttaactttgcaaactggtcttcctgctggcacatactgtgatgtcatttctggagataaaattaatggcaattgcacaggcattaaaatctacgtttctgacgatggcaaagctcatttttctattagtaactctgctgaggatccatttattgcaattcatgctgaatctaaattataaaatttaaaattaaatgcatatcctcaaaaaaaaaaaaaaaaaaaaaaaaaaaaaaaaaaaaaa

SEQ ID NO: 3770 - DNA, 2683 bp, Homo sapiens; identical to SEQ ID NO: 738

SEQ ID NO: 3771 - DNA, 3999 bp, Homo sapiens; identical to SEQ ID NO: 683

SEQ ID NO: 3772 - DNA, 4071 bp, Homo sapiens
tgattcgagcgggaagaggggggtgggtgggatcggtgggggagaccatgacctccagctacgggcacgttctggagcggcaaccggcgctgggcggccgcttggacagcccgggcaacctcgacaccctgcaggcgaaaaagaacttctccgtcagtcacctgctagacctggaggaagccggggacatggtggcggcacaggcggatgagaacgtgggcgaggctggccggagcctgctggagtcgccgggactcaccagcggcagcgacaccccgcagcaggacaatgaccagctgaactcagaagaaaaaaagaagagaaagcagcgaaggaataggacaaccttcaatagcagccagctgcaggctttggagcgtgtctttgagcggacacactatcctgatgcttttgtgcgagaagaccttgcccgccgggtgaacctcaccgaggcgagagtgcaggtgtggtttcagaaccgaagagccaagttccgcaggaatgagagagccatgctagccaataaaaacgcttccctcctcaaatcctactcaggagacgtgactgctgtggagcagcccatcgtacctcgtcctgctccgagacccaccgattatctctcctgggggacagcgtctccgtacagatcctcgtccctcccaagatgttgtttacacgaggggcttcataacggattctaacggaagacactgaaaagcgccatggctacttattctgccacatgtgccaacaatagccctgcacagggcatcaacatggccaacagcattgccaacctgagactgaaggccaaggaatatagtttacagaggaaccaggtgccaacagtcaactgaggaaaaaaaataattaaacaggcctaagaagaaatcaaaaaccataagacacctatcctgctctgttatttcttcatctgctggggggaaaaagtaaattacaaacaaacaaacaaagcagaactaaaatattgggaccatggcagagaaaagcaggagaggagcaaaatgaaaattagttaacaaatgttcctcctccctctgggataccaccaccacttgtttctgtgtgtgtttattttgtttttctttcattcatgctttgcttaatgtactccaggcttcttcagataggttcagcccacccacccccatgattgtatgaagttttaaaaaaaactacagcagccaaagaaactatatatatatatatatatatatatatccagaatgattgcctctactgtcctcattgacttgtttgaaccttagtgccttaccctgtcctcttcccagttctctttatagaagctctaggagctttcgaaaagccaaagtctttctgaagaatctgtgctggacagacataattccctttctcattgtctccatctttgttggtcatggtaaggtttttccatcagcctctgaaaaaatagttgtgcacaacatctgctcactggactgtctgatccaatgtaattggctgcgtctggctaattctaagcactaaagtctacatctaagctatagatttaagcttgaagctacagattatatcactatcaccaccacccctcaccctatgcaatcaatcaatcaatcatcttaagttaaagatatttgttgtctttgaatgatttgctgtcacagactatttggtagaagaaatatttttcacctgagagaggaagagaaatttctctagtaacacaaagagtgagttctaaaaggcatgcccacatctctttcgtgccttaaggatagtgagatgcacacttatatatatactgtatatatttatatatttatatatatatttcatatatatatataatattgcaagcttaagtttgcaatttcccaaacaatacaaaaagcaaattacacaccctcaccactgttcttatctctatagtgatgaaacattaattagggatcttgctgcttttctttttctacacgaagttttcattaaagccacagaataattgatagggcagctgtttgagaacaggtcccattttcacattagggctttaaatgaattagaaactatttgaggctataaaaatgtccttgagtttggagcctgagctctggtgaaatgctgatacatctgatctatcatgggaattgcagttagagagagtaaggaataccatttagtcatctatccgttcttcacttagcaggaatatgaaagaaaggcacatgtttaagaggaatacctaaaggtttttctaaattccaacatttaaaaggcaattgtgggctatttttattttttaatattttgaaataaagtttagtgtctagggctgggagccaggactgatcttccatttctttttctttgttcccagccatgcttttgtaacttgccaggtggacttgaccaactacattaccatgctgtgcctcagtttacccatttgtaaaatgggattaataatacttacctacctcacaggggtgttgtgaggctctattcatttgctcctttattctttcctgtattctctgtatgtccagcactttgtagccatgggaggaaagggactataaaagtgtacaatgttaatggaatgatacggtacctgaaagccttgttttctagtaagaaaatgctaccttgctgtacatacttataaccttgtatttggaaatgagaaataggtttatattttcagatctctcaaaaatcacatcatttgaccaaagaataatttaagacacatagaacagatttttttaatttatattttcatcctgaccagcttagttctaataatttttagttgtgagtgattaaaaaactttggatcaattttggtcaaacatgccaactttgtagtctgagtgacaggcaaggatttttgggtttaagatgcacttttagcacacatttgtatttcccttggcatatcagattgagctaatggtgatgttatttcaatctaacagccaccaatctgaaattgtatttcaaatgttgattctgtagttctttaaataataatgaagctcatcttatacattttgctttcaccaattgattccttcttcttttagcccactattaaaacatttcttactgaatggttcatgtaggcttgctgaacagcacgcattacttgcttcctgaagagttcccccattcatccatttgtcccattagttgctgtggattatcaagttttgaaggaactgtacatcccaacagactgaaacattctaagtgaaatgagtataatccaagtaactggtgaactttggaggtttggagcttgaagagaatggctaagaagatttgaattatagggagggaacagaaatcatacatgaaaaggttttactgagaaggggaaaaccttagatagagggacatgtgaaacaaaatcatttgaaattttgattcagacatccatttccagtggcaaacagcaaagcctgaacccataaacccaaatgataggtgaagttgggtggttttatccaatgtctcaagcaagcaatgtctgggaatatcatagagtaacaagtgctggtcagccaaagaaacattcactgctggtgaaccaataccataagcatgtattatctaagcacttgatcaagaaatatacatgttgtacaagctctcaattttgttcatttattatcaaatttttaaaatacaagtttggtatgtgatttggaaaagatgccttctggatcttaagccagttgtcagtggaggtcctcagggctgcaaatgtcaagacataaccctgttcctcaccatcatgataccagatacaggtgaatacataggaactatctgcctgtgtcctcaatctcccttcaaacaagatgctgatttgtagggtacttggcaggttaaattaaaccagaagaggtgacttaataaaaaagggaatgacatttagggtataaagatctcataagaaatgtaatatgtaaattatatcttgctttatgttgtaaaatatacattgtttgcgctagaatagaaatgatttcttttcaataaaaagaaagaaggactcta

SEQ ID NO: 3773 - DNA, 3463 bp, Homo sapiens
ataaaccaaggctcttaccatagctgaactttaaaacttagactgtcttttctgtaaacgattctgaggcaaagggaaatgactagaagaggatgagtaaacaataacctgaaatgggaaactcgagggaagcacaggttttttttgttttgttttgtttggttcgttttttgttctttggggtttttttgagacagaatttcgctctcgttgcccaagttggagtgcaatggcgcgatcttggctcactgcaacctccgcctcccgggttcaagcgattctcctgcctcagcctcccaagtagctgtgattccaggcacgtgccaccacaccagctaattttttgtattttaatagaaacagggtttcaccgtgttagccaggctggtctcaaactgacctcagatgatccgcccgccttggcctcccaaagtgctgggattacagatgtgagccaccgcgcccggccagagcactgttttttttaatggccttgcactcttcttatggacctttgctgccctcagttgaccaaacatgacatcagaaacagatacatttgtgtgttttaaaaacagctcctaatactggaacaaaaatatttaactgtcttgacaatactcatgagtatctgcatggcgacttcagagttgagtttaatcaaagagtttattcttaggtcctagtagaagagctaacctcacactcatcccattctaaactatgtgattcaacactgattttacatcccacaaagtgaaatcttgatagttgggtgtaaaaaggagagtaatggagatttcagagtagttggggttgcttacttttcatttttaattctttaggttttgtaagttacacacttcaagcattatagatgatcctctttttactactgaactaatgaagcctttttcattgcattgttctgcatttatttctacagggagaaaactggttgtcctggatgtttgaaaagttggtcgttgtcatggtgtgttacttcatcctatctatcattaactccatggcacaaagttatgccaaacgaatccagcagcggttgaactcagaggagaaaactaaataagtagagaaagttttaaactgcagaaattggagtggatgggttctgccttaaattgggaggactccaagccgggaaggaaaattcccttttccaacctgtatcaatttttacaacttttttcctgaaagcagtttagtccatactttgcactgacatactttttccttctgtgctaaggtaaggtatccaccctcgatgcaatccaccttgtgttttcttagggtggaatgtgatgttcagcagcaaacttgcaacagactggccttctgtttgttactttcaaaaggcccacatgatacaattagagaattcccaccgcacaaaaaaagttcctaagtatgttaaatatgtcaagctttttaggcttgtcacaaatgattgctttgttttcctaagtcatcaaaatgtatataaattatctagattggataacagtcttgcatgtttatcatgttacaatttaatattccatcctgcccaacccttcctctcccatcctcaaaaaagggccattttatgatgcattgcacaccctctggggaaattgatctttaaattttgagacagtataaggaaaatctggttggtgtcttacaagtgagctgacaccattttttattctgtgtatttagaatgaagtcttgaaaaaaactttataaagacatctttaatcattccaaaattgtgtccgttttcttgagcgttttgattttttacttttagcttataccagctgaatggcagccttgcctaatccacctacaacaagaatttcttaagctttcttttatttgcatgagagagccactaccaaggcatgttttgttatgctgaaactgggctgctgcatactgctaaatggcacctctgggattggcctacctggggatttcttggtttgtgaaaacaggagaggagaaatatctcatacaagtgaaaggatactggagagagaaattacccatttctaaaaaaaaaccacactctgtcgtatctgtgttaatgttttctagcatgtactctggtttcaacagacacaaatttatatgttaacccagttttcttgccgttctgtaagtgttttattcttagtgtgatttttttccattgggatgtttttgattgaacttgttcattttgttttgcttgggaggaaaataaacaattttacttttttcctttaggagcattatgagcattatgtcagaatagaatagaattggggttcgatcttaacaggccagaaatgcctgggttttttttggtttgtttttgtttttgtttttttatcaaatcctgcctgactgtctgcttgttttgcctaccatcgtgacatctccatggctgtaccaccttgtcgggtagcttatcagactgatgttgactgttgaatctcatggcaacaccagtcgatgggctgtctgacattttggtatctttcatctgaccatccatatccaatgttctcatttaaacattacccagcatcattgtttataatcagaaactctggtccttctgtctggtggcacttagagtcttttgtgccataatgcagcagtatggagggaggattttatggagaaatggggatagtcttcatgaccacaaataaataaaggaaaactaagctgcattgtgggttttgaaaaggttattatacttcttaacaattctttttttcagggacttttctagctgtatgactgttacttgaccttctttgaaaagcattcccaaaatgctctattttagatagattaacattaaccaacataattttttttagatcgagtcagcataaatttctaagtcagcctctagtcgtggttcatctctttcacctgcattttatttggtgtttgtctgaagaaaggaaagaggaaagcaaatacgaattgtactatttgtaccaaatctttgggattcattggcaaataatttcagtgtggtgtattattaaatagaaaaaaaaattttgtttcctaggttgaaggtctaattgatacgtttgacttatgatgaccatttatgcactttcaaatgaatttgctttcaaaataaatgaagagcagctgtccttctttcctcttttaagtgttcagctgtggcatgctcagaggttcctgctggattccagctggagcggtgtgatacccttctttttcagctgttcgtgccttcctttcttgtgtccaccaaagtggagacaaatacatgatctcaaagatacacagtacctacttaattccagctgatgggagaccaaagaatttgcaagtggatggtttggtatcactgtaaataaaaagagggcctgggaattcttgcgattccatctctaaaaaaaaaaaaaaaaaaaaaaaaaaaaaa

SEQ ID NO: 3774 - DNA, 1715 bp, Homo sapiens
ggagttccgctcctctctccaaccggggtccccctccagcgaccctaaagcttcccagacttccgcttcaattcctgtccgccccccacgcccacctcaacgtggagcgcagtggtctccgaggagcgccggagctgccccgcctgcccagcgggatcagcacttcgcatcaaggcccaagaaaagcaagtcctccagcgttctgagcacccgggcctgagggaaggtcctaacagcccccgggagccagtctccaacgcctcccgcagcagcccgccgctcccaggtgcccgcgtgcgccgctgccgccgcaatcccgcacgcgtcccgcgcccgccccactttgcctatccccgggactaagacgggaatcctgtgaagcagctccagctatgtgtgaagaagaggacagcactgccttggtgtgtgacaatggctctgggctctgtaaggccggctttgctggggacgatgctcccagggctgttttcccatccattgtgggacgtcccagacatcagggggtgatggtgggaatgggacaaaaagacagctacgtgggtgacgaagcacagagcaaaagaggaatcctgaccctgaagtacccgatagaacatggcatcatcaccaactgggacgacatggaaaagatctggcaccactctttctacaatgagcttcgtgttgcccctgaagagcatcccaccctgctcacggaggcacccctgaaccccaaggccaaccgggagaaaatgactcaaattatgtttgagactttcaatgtcccagccatgtatgtggctatccaggcggtgctgtctctctatgcctctggacgcacaactggcatcgtgctggactctggagatggtgtcacccacaatgtccccatctatgagggctatgccttgccccatgccatcatgcgtctggatctggctggccgagatctcactgactacctcatgaagatcctgactgagcgtggctattccttcgttactactgctgagcgtgagattgtccgggacatcaaggagaaactgtgttatgtagctctggactttgaaaatgagatggccactgccgcatcctcatcctcccttgagaagagttacgagttgcctgatgggcaagtgatcaccatcggaaatgaacgtttccgctgcccagagaccctgttccagccatccttcatcgggatggagtctgctggcatccatgaaaccacctacaacagcatcatgaagtgtgatattgacatcaggaaggacctctatgctaacaatgtcctatcagggggcaccactatgtaccctggcattgccgaccgaatgcagaaggagatcacggccctagcacccagcaccatgaagatcaagatcattgcccctccggagcgcaaatactctgtctggatcggtggctccatcctggcctctctgtccaccttccagcagatgtggatcagcaaacaggaatacgatgaagccgggccttccattgtccaccgcaaatgcttctaaaacactttcctgctcctctctgtctctagcacacaactgtgaatgtcctgtggaattatgccttcagttcttttccaaatcattcctagccaaagctctgactcgttacctatgtgttttttaataaatctgaaataggctactggtaaaaaaaaaaaaaaaaaaaaaaaaaaaaaaaaaaaaaaaaaa

SEQ ID NO: 3775 - DNA, 1912 bp, Homo sapiens; identical to SEQ ID NO: 125

SEQ ID NO: 3776 - DNA, 1691 bp, Homo sapiens
aacttcagtttgttggctgcggcagcaggtagcaaagtgacgccgagggcctgagtgctccagtagccaccgcatctggagaaccagcggttaccatggaggggatcagtatatacacttcagataactacaccgaggaaatgggctcaggggactatgactccatgaaggaaccctgtttccgtgaagaaaatgctaatttcaataaaatcttcctgcccaccatctactccatcatcttcttaactggcattgtgggcaatggattggtcatcctggtcatgggttaccagaagaaactgagaagcatgacggacaagtacaggctgcacctgtcagtggccgacctcctctttgtcatcacgcttcccttctgggcagttgatgccgtggcaaactggtactttgggaacttcctatgcaaggcagtccatgtcatctacacagtcaacctctacagcagtgtcctcatcctggccttcatcagtctggaccgctacctggccatcgtccacgccaccaacagtcagaggccaaggaagctgttggctgaaaaggtggtctatgttggcgtctggatccctgccctcctgctgactattcccgacttcatctttgccaacgtcagtgaggcagatgacagatatatctgtgaccgcttctaccccaatgacttgtgggtggttgtgttccagtttcagcacatcatggttggccttatcctgcctggtattgtcatcctgtcctgctattgcattatcatctccaagctgtcacactccaagggccaccagaagcgcaaggccctcaagaccacagtcatcctcatcctggctttcttcgcctgttggctgccttactacattgggatcagcatcgactccttcatcctcctggaaatcatcaagcaagggtgtgagtttgagaacactgtgcacaagtggatttccatcaccgaggccctagctttcttccactgttgtctgaaccccatcctctatgctttccttggagccaaatttaaaacctctgcccagcacgcactcacctctgtgagcagagggtccagcctcaagatcctctccaaaggaaagcgaggtggacattcatctgtttccactgagtctgagtcttcaagttttcactccagctaacacagatgtaaaagacttttttttatacgataaataacttttttttaagttacacatttttcagatataaaagactgaccaatattgtacagtttttattgcttgttggatttttgtcttgtgtttctttagtttttgtgaagtttaattgacttatttatataaattttttttgtttcatattgatgtgtgtctaggcaggacctgtggccaagttcttagttgctgtatgtctcgtggtaggactgtagaaaagggaactgaacattccagagcgtgtagtgaatcacgtaaagctagaaatgatccccagctgtttatgcatagataatctctccattcccgtggaacgtttttcctgttcttaagacgtgattttgctgtagaagatggcacttataaccaaagcccaaagtggtatagaaatgctggtttttcagttttcaggagtgggttgatttcagcacctacagtgtacagtcttgtattaagttgttaataaaagtacatgttaaacttaaaaaaaaaaaaaaaaaa

SEQ ID NO: 3777 - DNA, 1862 bp, Homo sapiens
tggcttggtgagtctgtgtggtcagcagtctctgatccgtgcagggtattaatgtgtcagggctgagtgttctgagatttatctagaggctgggaagggctcctgaaccagttgtttccgtcttgtcggtctgtcagggttggaaagtccaagccataggacccagtttcctttcttagcttacgttatctaccagagcaccgtgggctgttacttgccttgagttggaagcggttcgcatttataccggaatataaatagtttctggaaaggacactgacaacttcaaagcaaaatgaagctcttttggttgcttttcaccattgggttctgctgggctcagtattcctcaaatacacaacaaggacgaacatctattgttcatctgtttgaatggcgatgggttgatattgctcttgaatgtgagcgatatttagctcccaagggatttggaggggttcaggtctctccaccaaatgaaaatgttgccattcacaaccctttcagaccttggtgggaaagataccaaccagttagctataaattatgcacaagatctggaaatgaagatgaatttagaaacatggtgactagatgcaacaatgttggggttcgtatttatgtggatgctgtaattaatcatatgtgtggtaatgctgtgagtgcaggaacaagcagtacctgtggaagttacttcaaccctggaagtagggactttccagcagtcccatattctggatgggattttaatgatggtaaatgtaaaactggaagtggagatatcgagaactataatgatgctactcaggtcagagattgtcgtctgtctggtcttctcgatcttgcactggggaaggattatgtgcgttctaagattgccgaatatatgaaccatctcattgacattggtgttgcagggttcagaattgatgcttccaagcacatgtggcctggagacataaaggcaattttggacaaactgcataatctaaacagtaactggttcccggaaggtagtaaacctttcatttaccaggaggtaattgatctgggtggtgagccaattaaaagcagtgactactttggtaatggccgggtgacagaattcaagtatggtgcaaaactcggcacagttattcgcaagtggaatggagagaagatgtcttacttaaagaactggggagaaggttggggtttcatgccttctgacagagcgcttgtctttgtggataaccatgacaatcaacgaggacatggcgctggaggagcctctatacttaccttctgggatgctaggctgtacaaaatggcagttggatttatgcttgctcatccttatggatttacacgagtaatgtcaagctaccgttggccaagatattttgaaaatggaaaagatgttaatgattgggttgggccaccaaatgataatggagtaactaaagaagttactattaatccagacactacttgtggcaatgactgggtctgtgaacatcgatggcgccaaataaggaacatggttaatttccgcaatgtagtggatggccagccttttacaaactggtatgataatgggagcaaccaagtggcttttgggagaggaaacagaggattcattgttttcaacaatgatgactggacattttctttaactttgcaaactggtcttcctgctggcacatactgtgatgtcatttctggagataaaattaatggcaactgcacaggcattaaaatctacgtttctgatgatggcaaagctcatttttctattagtaactctgctgaagatccatttattgcaattcatgctgaatctaaattgtaaaatttaaaattaaatgcaaatccgcaaagca

SEQ ID NO: 3778 - DNA, 3918 bp, Homo sapiens
gtactttagccttccaggcttagggactcaggctgcccagacctgaagcggtgtgcggccatggaccgcggagctgccgcagcccagggcactgccccgcctcaggatggagagcagcccgctgagtctccagagcctccgccgccttggccgccgccgccaccaccaccggctccgccgccggctccgccgctgctctccgaggcttcgccagaacccataccagagccctgtccagagcttgctccaggtccctgtccagaggcgacctcagaatcagccacagaactgtacacagaaccgaccccagaaccagccacagagccggcctcagaaccggccccagaacctgccacagagccggccccagaacctgccacagagccggccccagaaccggccccagaacctgccacagagtctgccccagagccgactccagaacctgccctagagtcggtcccagagccggccccagagctgactccagaagttgccccagagctggccccagagccgaccccagaacctgtgacagagctggccccagagttctgccctgaggcggctccagagttccgtccaagtccagcaccatgtctattgcaatgtccggtggacactcgagagagaggtctaaagacctcgccatcgccatcgccatcgccatcgcccagaacgccaatgtcgtggtccagaataaagaaaatattgaaggaaggacctatgctgaagaactgtaactctttcaagagatggaagcttagatattttctggttcaaggacagaagctctactttgcacaccatcccgcgtttgcacactttgaaacgattgatctgtctcaagccactgtggcagaaagcagctgtagaaacctttgccacagtttttgtgttattacaccacaacgaaaaatcactctggctgcacccaaccggaaagacatggaagaatggattaacatcataaaaaccatccaacagggagaaatttataagatacctgcagcagaaaacaacccttttcttgttggaatgcattgttggtactccagttacagccaccggacccagcactgcaatgtttgtcgagagagcattcctgccttatctagagatgccatcatctgtgaagtgtgcaaagtgaaatctcacagattgtgtgctttgagagcaagcaaagactgcaagtggaatacattgtctatcactgatgacctccttctgcctgcagatgaagtaaacatgccccatcaatgggtagaaggaaacatgcctgtcagctctcagtgtgcagtgtgtcatgagagctgtggcagttatcaaagacttcaagacttccgctgcctgtggtgtaattctacggtgcatgatgactgtaggagacggttttccaaggaatgttgcttcagaagccatcgctcatcagtcattcctcccactgctctaagcgaccccaaaggcgatggccaattagtagtatcttcagacttctggaatcttgattggtcatcagcctgttcatgtcccttgctcatcttcatcaactccaaaagtggcgatcatcaggggatcgtcttcctccgaaaattcaagcaataccttaacccatctcaagtgttcgacttattgaagggtggacctgaagcagggctgtctatgttcaagaactttgctcgctttcgcattctggtttgtggtggagatggcagcgtgagctgggtcttatctctgattgatgcctttggattacatgaaaagtgtcagttggcagtcatcccacttggaaccggcaatgatctggctcgtgttctgggctggggtgcattctggaacaaaagcaagtcacctctggacatcctcaacagagtggagcaggctagtgtgaggatcctagacagatggagtgtgatgattcgtgagactcccagacaaaccccgctgctaaaaggacaggttgaaatggatgtaccacgatttgaggctgctgccatccaacacttagaatctgcagccaccgagttgaacaaaatcctgaaggccaagtaccccacagagatgatcatcgcaaccagattcttgtgttcagctgtggaagattttgtggttgatattgtaaaggcctggggtcagataaaacagaacaacactgcaatagtgtctgtgattttgaaaagtgacttaatgtatgataggctcagtgtcctgatcgatgtcctggctgaggaggcagcagctacttctgctgaaaaaagtgctacagaatatgcagacagcagcaaggcagataggaagcccttcattcctcaaatagaccacatagccaagtgcaagttggagctggctacaaaggcccagagtctccagaaatccttgaaactcatcatatttcaagttgaacaagctctggatgaggaaagcagacagacaatatctgttaagaactttagttcaactttcttcctggaagatgacccagaagatattaaccagacaagcccacgacgccgttctcgtcgtggcactttgtcttctatatcttctctcaaaagtgaggacctggacaaccttaacttggatcacttacattttacacctgaatctatacgcttcaaagaaaaatgtgtcatgaacaactacttcggaattggactggatgctaaaatttctctggacttcaacaccagaagagatgaacacccagggcaatacaatagccgccttaagaacaagatgtggtatggccttctgggaaccaaagaacttttgcagcgctcttacaggaaactggaagaacgagtgcatttggagtgtgatggagaaaccatctccttgccaaacctgcaaggcattgtagtgctcaacattaccagctatgctggaggtatcaacttctggggaagcaacacagcaaccacggaatatgaggctcctgcaatcgatgatgggaaactggaggtggtggcaatctttggttctgtgcagatggcaatgtcccgtatcatcaacctgcatcatcatcgcattgcccagtgccatgaggtgatgataaccattgatggtgaagaaggtatcccagtgcaggtggatggggaggcctggattcagagaccaggccttatcaaaattagatacaagaacgctgcccagatgctgacaagagatcgggactttgagaactcaatgaaaatgtgggaatacaagcatactgaaattcaagctgcccctcaaccccagctggacttccaggactctcaagagagcctctctgacgaggagtatgcccagatgcagcacttagctcggcttgcagaaaacctcatcagcaaacttaatgacctgagcaagatccaccagcatgtgtctgtcctcatgggttctgtgaatgccagcgctaacatcctgaatgatatattttacggccaagacagtggcaatgagatgggtgcagcttcctgtattcccattgaaactctaagcagaaatgatgccgtagatgttacatttagtcttaaaggtctctacgatgacaccacagctttcctggatgaaaagctgctgagaagtgctgaggatgagactgcactacaaagcgccctggatgccatgaataaggagttcaaaaagctatctgagattgactggatgaatccaatctttgttccagaggaaaaatcttcggacactgacagtagaagcctcaggctgaaaattaagttccccaaattgggaaagaaaaaggtagaagaggaacgcaagcctaaatcaggccagagtgtccagagttttattggcaatttatggcaccgcagacatcgtgaagatgaagcagagggtgatgatcctctaacaccatcgagatctcaactgtagcccttgaaagctggaagaactcacaacattgagaattctact

SEQ ID NO: 3779 - DNA, 2322 bp, Homo sapiens
gggagggggtgggatgggtggggggtaacgggggaaactggggaagtggggaaccgaggggcaaccaggggaagatggggtgctggaggagagcttgtgggagccaaggagcaccttggacatctggagtctggcaggagtgatgacgggtggaggggctagctcgaggcagggctggtggggcctgaggccagtgaggagtgtggagtaggcgcccaggcatcgtgcagacagggcgacatcagctggggacgatgggcctgagctagggctggaaagaagggggagccaggcattcatcccggtcacttttggttacaggacgtggcagctggttggacgaggggagctggtgggcagggtttgatcccagggcctgggcaacggaggtgtagctggcagcagcgggcaggtgaggaccccatctgccgggcaggtgagtcccttccctccccaggcctcgcttccccagccttctgaaagaaggaggtttaggggatcgagggctggcggggagaagcagacaccctcccagcagaggggcaggatgggggcaggagagttagcaaaggtgacatcttctcggggggagccgagactgcgcaaggctggggggttatgggcccgttccaggcagaaagagcaagagggcagggagggagcacaggggtggccagcgtagggtccagcacgtggggtggtaccccaggcctgggtcagacagggacatggcaggggacacaggacagaggggtccccagctgccacctcacccaccgcaattcatttagtagcaggcacaggggcagctccggcacggctttctcaggcctatgccggagcctcgagggctggagagcgggaagacaggcagtgctcggggagttgcagcaggacgtcaccaggagggcgaagcggccacgggaggggggccccgggacattgcgcagcaaggaggctgcaggggctcggcctgcgggcgccggtcccacgaggcactgcggcccagggtctggtgcggagagggcccacagtggacttggtgacgctgtatgccctcaccgctcagcccctggggctggcttggcagacagtacagcatccaggggagtcaagggcatggggcgagaccagactaggcgaggcgggcggggcggagtgaatgagctctcaggagggaggatggtgcaggcaggggtgaggagcgcagcgggcggcgagcgggaggcactggcctccagagcccgtggccaaggcgggcctcgcgggcggcgacggagccgggatcggtgcctcagcgttcgggctggagacgaggccaggtctccagctggggtggacgtgcccaccagctgccgaaggccaagacgccaggtccggtggacgtgacaagcaggacatgacatggtccggtgtgacggcgaggacagaggaggcgcgtccggccttcctgaacaccttaggctggtggggctgcggcaagaagcgggtctgtttctttacttcctccacggagtcggcacactatggctgccctctgggctcccagaacccacaacatgaaagaaatggtgctacccagctcaagcctgggcctttgaatccggacacaaaaccctctagcttggaaatgaatatgctgcactttacaaccactgcactacctgactcaggaatcggctctggaaggtgaagctagaggaaccagacctcatcagcccaacatcaaagacaccatcggaacagcagcgcccgcagcacccaccccgcaccggcgactccatcttcatggccaccccctgcggcggacggttgaccaccagccaccacatcatcccagagctgagctcctccagcgggatgacgccgtccccaccacctccctcttcttctttttcatccttctgtctctttgtttctgagctttcctgtctttccttttttctgagagattcaaagcctccacgactctgtttcccccgtcccttctgaatttaatttgcactaagtcatttgcactggttggagttgtggagacggccttgagtctcagtacgagtgtgcgtgagtgtgagccaccttggcaagtgcctgtgcagggcccggccgccctccatctgggccgggtgactgggcgccggctgtgtgcccgaggcctcaccctgccctcgcctagtctggaagctccgaccgacatcacggagcagccttcaagcattccattacgccccatctcgctctgtgcccctccccaccagggcttcagcaggagccctggactcatcatcaataaacactgttacagcaaaaaaaaaaaaaaaa

SEQ ID NO: 3780 - DNA, 1260 bp, Homo sapiens; identical to SEQ ID NO: 78

SEQ ID NO: 3781 - DNA, 6936 bp, Homo sapiens; identical to SEQ ID NO: 341

SEQ ID NO: 3782 - DNA, 1155 bp, Homo sapiens
ggagggagtgggacagattctgggagtgcagcggggaggagtcccggctgggctgagcgcagggagctgcttggcagtgccagagcccaggccccagagccctgctggagaggaggcagactgaggcagcaggccccgccagcaggcgaagcagggagatgtcagactgctacacggagctggagaaggcagtcattgtcctggtggaaaacttctacaaatatgtgtctaagtacagcctggtcaagaacaagatcagcaagagcagcttccgcgagatgctccagaaagagctgaaccacatgctgtcggacacagggaaccggaaggctgcggataagctcatccagaacctggatgccaatcatgatgggcgcatcagcttcgatgagtactggaccttgataggcggcatcaccggccccatcgccaaactcatccatgagcaggagcagcagagcagcagctagagacccctttggccacaccttccaggcactggcctgatgccccgccctggtgctctccccaggctccctcctcagcctcctgcccacccagggccctttactctcttctccctccagaccttcctctgacccttgctgaactggggtccctttgtgagtgtctcagtctagaggtacctccctccctggggggtctcagctcctggagtcgcaggcccttggggcccctctgtgagatctcaatgctgtctggggaccctaagagttttctcacctgttcagtctcatctaaccttccaatgtctgatgttcctgccaaattcctgcctgattctgggtccgtcctgacctccaaaggtcagcttggtgcttgaggtctccctgctcttggtggcagtggtagcagcaacagcagcagcagcagcagcagcagcagcagagacctctccactttcccttagcccctctgctgggtagagaggcactttcagggacttccctccagctgcctcttcatctgggaatgagctaagcaaggctgagcctcctcctgttgcttgaaataatgatgatataaaggctggatttggagtttgtatcccctggtccctctgggatgctcattaaaaccttcccactccttgaaaaaaaaaaaaaaaaaaaaaaaaaaaaaaaaaaaaaaaaa

SEQ ID NO: 3783 - DNA, 3309 bp, Homo sapiens
ggcggagagaataaagcagaaagacaggaagaggaggtggagttctacagttagtgtggttttagtttttcctaagaagtggcgtggtttggggctttatatccgggaggagcatatgtacgcaaatcctggggcgtttgcaaacccggatccggggcgtctggccccatgcccggccgggcgtttgagggctactgccacgcagcgtttctggagcctgccggctggtgccctggtggcctttatctctgtccccctttgtcctctttatctcaggctctccaggaggccggggggcccactccgcctatcgctcccctcggctacgctgccacttcaatgccccgcaggtcgcgagctgctgttctttcgaaggcgtcggagaaccaggggcgtcccgcgccacctctgactcggagcagcgccgagcactgacgctcccgcccttgggcaaggacgccagtgcgcccgcgcgcgtccctctgcgcggcagcccgtcgcgggccctcaaggggaagcccaggccaggatggccccgggtcgcgcggtggccgggctcctgttgctggcggccgccggcctcggaggagtggcggaggggccagggctagccttcagcgaggatgtgctgagcgtgttcggcgcgaatctgagcctgtcggcggcgcagctccagcacttgctggagcagatgggagccgcctcccgcgtgggcgtcccggagcctggccagctgcacttcaaccagtgtttaactgctgaagagatcttttcccttcatggcttttcaaatgctacccaaataaccagctccaaattctctgtcatctgtccagcagtcttacagcaattgaactttcacccatgtgaggatcggcccaagcacaaaacaagaccaagtcattcagaagtttggggatatggattcctgtcagtgacgattattaatctggcatctctcctcggattgattttgactccactgataaagaaatcttatttcccaaagattttgaccttttttgtggggctggctattgggactcttttttcaaatgcaattttccaacttattccagaggcatttggatttgatcccaaagtcgacagttatgttgagaaggcagttgctgtgtttggtggattttacctacttttcttttttgaaagaatgctaaagatgttattaaagacatatggtcagaatggtcatacccactttggaaatgataactttggtcctcaagaaaaaactcatcaacctaaagcattacctgccatcaatggtgtgacatgctatgcaaatcctgctgtcacagaagctaatggacatatccattttgataatgtcagtgtggtatctctacaggatggaaaaaaagagccaagttcatgtacctgtttgaaggggcccaaactgtcagaaatagggacgattgcctggatgataacgctctgcgatgccctccacaatttcatcgatggcctggcgattggggcttcctgcaccttgtctctccttcagggactcagtacttccatagcaatcctatgtgaggagtttccccacgagttaggagactttgtgatcctactcaatgcagggatgagcactcgacaagccttgctattcaacttcctttctgcatgttcctgctatgttgggctagcttttggcattttggtgggcaacaatttcgctccaaatattatatttgcacttgctggaggcatgttcctctatatttctctggcagatatgtttccagagatgaatgatatgctgagagaaaaggtaactggaagaaaaaccgatttcaccttcttcatgattcagaatgctggaatgttaactggattcacagccattctactcattaccttgtatgcaggagaaatcgaattggagtaatagaaaatggaagatggtgttgttaataaaggcatttaatagataaaaacatctccaaaaaggattttgaagctgatcctatttagttaaaaagataattttgctttcaactgtaggtccagaaaactaattattggcatcagtctgtgaaatagtccattatttgttgttaaaaatgcttcaaaaggttttcagtgtcagtctgagatgcctggtatataggagcctttgggaaatacctatttttcagtattccatgcatattagatatcaccatgaagcaagagacatgcattctataatcatgtagacactcagactcaggggaaaatacaagttatatcctgaaagcctttaaaactctatggtaggatcaaagattcaaatggtttcagagaggttttatttcaattaatttgttctagtgctttcaagagcaagtacatcaaaatgtagaaggtaaaatgtatgcaacactaatataaattattccaagtctttaaggagccaaagaaaaaaaagatttctcacagctttttgttctgttttgtatttcaattaggaacttgcagtattattttgaaaaccattctaaaataataggagttaggaaataaataaagttttgctagccctgctaagttcaggcttagaggcttatcgctaagtataaacttcaccagattccacgaaaagctggatagctttttttctgacttatgttgtggttgcacccctcacaaatggcagaacagtatgtaaagctggtaacacctcggtttcagtgcaccatgtgtttgctttgtgaaggtgaagaatatgttggtttagagaaagaaattggatgtaattttatgcaatttacttttaaagacaaacataactatttagcagagaatattttaataaatgcaaaacaacagctggactgctgtacatcaaggacagattaactggaaaacatatgttccttatgtgtgatcgagagccattcagaaaagacttcctttgtgttcagcctatacttttccatatggtataccttgaaaaaaattagcacaccatggttatttttctaccttttataaaagacagagcctgtttactcatttagaagatagagaaaattggtctaaaattgaacatcctagattcacactcccaagtcacttaaggtgatttgatggtgaggaaaatgattgacaaagcccaacaatgatctcaggaattacattttccaacagaccaaaaaatgttttcatgtagcagcaatgcagatttggtgaatatttaatatatattttagtatgtatttcactttatgactgacaattaaaaaatattgtttggccaaatagtaaacacccttttgaaaccatgaaaaaaaaaaaaaaaaa

SEQ ID NO: 3784 - DNA, 1538 bp, Homo sapiens; identical to SEQ ID NO: 695

SEQ ID NO: 3785 - DNA, 1535 bp, Homo sapiens; identical to SEQ ID NO: 3028

SEQ ID NO: 3786 - DNA, 2797 bp, Homo sapiens
cctccccagtagacgctcgggcaccagccgcggcaaggatggagctgggttgctggacgcagttggggctcacttttcttcagctccttctcatctcgtccttgccaagagagtacacagtcattaatgaagcctgccctggagcagagtggaatatcatgtgtcgggagtgctgtgaatatgatcagattgagtgcgtctgccccggaaagagggaagtcgtgggttataccatcccttgctgcaggaatgaggagaatgagtgtgactcctgcctgatccacccaggttgtaccatctttgaaaactgcaagagctgccgaaatggctcatgggggggtaccttggatgacttctatgtgaaggggttctactgtgcagagtgccgagcaggctggtacggaggagactgcatgcgatgtggccaggttctgcgagccccaaagggtcagattttgttggaaagctatcccctaaatgctcactgtgaatggaccattcatgctaaacctgggtttgtcatccaactaagatttgtcatgttgagcctggagtttgactacatgtgccagtatgactatgttgaggttcgtgatggagacaaccgcgatggccagatcatcaagcgtgtctgtggcaacgagcggccagctcctatccagagcataggatcctcactccacgtcctcttccactccgatggctccaagaattttgacggtttccatgccatttatgaggagatcacagcatgctcctcatccccttgtttccatgacggcacgtgcgtccttgacaaggctggatcttacaagtgtgcctgcttggcaggctatactgggcagcgctgtgaaaatcttctggaggctgggaagtccaagatcaaggcgtcagaagattcattgtctgtccttgaagaaagaaactgctcagaccctgggggcccagtcaatgggtaccagaaaataacagggggccctgggcttatcaacggacgccatgctaaaattggcaccgtggtgtctttcttttgtaacaactcctatgttcttagtggcaatgagaaaagaacttgccagcagaatggagagtggtcagggaaacagcccatctgcataaaagcctgccgagaaccaaagatttcagacctggtgagaaggagagttcttccgatgcaggttcagtcaagggagacaccattacaccagctatactcagcggccttcagcaagcagaaactgcagagtgcccctaccaagaagccagcccttccctttggagatctgcccatgggataccaacatctgcatacccagctccagtatgagtgcatctcacccttctaccgccgcctgggcagcagcaggaggacatgtctgaggactgggaagtggagtgggcgggcaccatcctgcatccctatctgcgggaaaattgagaacatcactgctccaaagacccaagggttgcgctggccgtggcaggcagccatctacaggaggaccagcggggtgcatgacggcagcctacacaagggagcgtggttcctagtctgcagcggtgccctggtgaatgagcgcactgtggtggtggctgcccactgtgttactgacctggggaaggtcaccatgatcaagacagcagacctgaaagttgttttggggaaattctaccgggatgatgaccgggatgagaagaccatccagagcctacagatttctgctatcattctgcatcccaactatgaccccatcctgcttgatgctgacatcgccatcctgaagctcctagacaaggcccgtatcagcacccgagtccagcccatctgcctcgctgccagtcgggatctcagcacttccttccaggagtcccacatcactgtggctggctggaatgtcctggcagacgtgaggagccctggcttcaagaacgacacactgcgctctggggtggtcagtgtggtggactcgctgctgtgtgaggagcagcatgaggaccatggcatcccagtgagtgtcactgataacatgttctgtgccagctgggaacccactgccccttctgatatctgcactgcagagacaggaggcatcgcggctgtgtccttcccgggacgagcatctcctgagccacgctggcatctgatgggactggtcagctggagctatgataaaacatgcagccacaggctctccactgccttcaccaaggtgctgccttttaaagactggattgaaagaaatatgaaatgaaccatgctcatgcactccttgagaagtgtttctgtatatccgtctgtacgtgtgtcattgcgtgaagcagtgtgggcctgaagtgtgatttggcctgtgaacttggctgtgccagggcttctgacttcagggacaaaactcagtgaagggtgagtagacctccattgctggtaggctgatgccacgtccactactaggacggccaattggaagatgccagggcttgcaagaagtaagtttcttcaaagaagaccatatacaaaacctctccactccactgacctggtggtcttccccaactttcagttatacgaatgccatcagcttgaccagggaagatctgggcttcatgaggccccttttgaggctctcaagttctagagagctgcctgtgggacagcccagggcagcagagctgggatgtggtgcatgcctttgtgtacatggccacagtacagtctggtccttttccttccccatctcttgtacacattttaataaaataagggttggcttctgaactacaaaaaaaaaaaaaaaaaaaa

SEQ ID NO: 3787 - DNA, 3350 bp, Homo sapiens
agaattgcgctgtccacttgtcgtgtggctctgtgtcgacactgtgcgccaccatggccgtgactgcctgtcagggcttggggttcgtggtttcactgattgggattgcgggcatcattgctgccacctgcatggaccagtggagcacccaagacttgtacaacaaccccgtaacagctgttttcaactaccaggggctgtggcgctcctgtgtccgagagagctctggcttcaccgagtgccggggctacttcaccctgctggggctgccagccatgctgcaggcagtgcgagccctgatgatcgtaggcatcgtcctgggtgccattggcctcctggtatccatctttgccctgaaatgcatccgcattggcagcatggaggactctgccaaagccaacatgacactgacctccgggatcatgttcattgtctcaggtctttgtgcaattgctggagtgtctgtgtttgccaacatgctggtgactaacttctggatgtccacagctaacatgtacaccggcatgggtgggatggtgcagactgttcagaccaggtacacatttggtgcggctctgttcgtgggctgggtcgctggaggcctcacactaattgggggtgtgatgatgtgcatcgcctgccggggcctggcaccagaagaaaccaactacaaagccgtttcttatcatgcctcaggccacagtgttgcctacaagcctggaggcttcaaggccagcactggctttgggtccaacaccaaaaacaagaagatatacgatggaggtgcccgcacagaggacgaggtacaatcttatccttccaagcacgactatgtgtaatgctctaagacctctcagcacgggcggaagaaactcccggagagctcacccaaaaaacaaggagatcccatctagatttcttcttgcttttgactcacagctggaagttagaaaagcctcgatttcatctttggagaggccaaatggtcttagcctcagtctctgtctctaaatattccaccataaaacagctgagttatttatgaattagaggctatagctcacattttcaatcctctatttctttttttaaatataactttctactctgatgagagaatgtggttttaatctctctctcacattttgatgatttagacagactccccctcttcctcctagtcaataaacccattgatgatctatttcccagcttatccccaagaaaacttttgaaaggaaagagtagacccaaagatgttattttctgctgtttgaattttgtctccccacccccaacttggctagtaataaacacttactgaagaagaagcaataagagaaagatatttgtaatctctccagcccatgatctcggttttcttacactgtgatcttaaaagttaccaaaccaaagtcattttcagtttgaggcaaccaaacctttctactgctgttgacatcttcttattacagcaacaccattctaggagtttcctgagctctccactggagtcctctttctgtcgcgggtcagaaattgtccctagatgaatgagaaaattattttttttaatttaagtcctaaatatagttaaaataaataatgttttagtaaaatgatacactatctctgtgaaatagcctcacccctacatgtggatagaaggaaatgaaaaaataattgctttgacattgtctatatggtactttgtaaagtcatgcttaagtacaaattccatgaaaagctcactgatcctaattctttccctttgaggtctctatggctctgattgtacatgatagtaagtgtaagccatgtaaaaagtaaataatgtctgggcacagtggctcacgcctgtaatcctagcactttgggaggctgaggaggaaggatcacttgagcccagaagttcgagactagcctgggcaacatggagaagccctgtctctacaaaatacagagagaaaaaatcagccagtcatggtggcctacacctgtagtcccagcattccgggaggctgaggtgggaggatcacttgagcccagggaggttggggctgcagtgagccatgatcacaccactgcactccagccaggtgacatagcgagatcctgtctaaaaaaataaaaaataaataatggaacacagcaagtcctaggaagtaggttaaaactaattctttaaaaaaaaaaaaaagttgagcctgaattaaatgtaatgtttccaagtgacaggtatccacatttgcatggttacaagccactgccagttagcagtagcactttcctggcactgtggtcggttttgttttgttttgctttgtttagagacggggtctcactttccaggctggcctcaaactcctgcactcaagcaattcttctaccctggcctcccaagtagctggaattacaggtgtgcgccatcacaactagctggtggtcagttttgttactctgagagctgttcacttctctgaattcacctagagtggttggaccatcagatgtttgggcaaaactgaaagctctttgcaaccacacaccttccctgagcttacatcactgcccttttgagcagaaagtctaaattccttccaagacagtagaattccatcccagtaccaaagccagataggccccctaggaaactgaggtaagagcagtctctaaaaactacccacagcagcattggtgcaggggaacttggccattaggttattatttgagaggaaagtcctcacatcaatagtacatatgaaagtgacctccaaggggattggtgaatactcataaggatcttcaggctgaacagactatgtctggggaaagaacggattatgccccattaaataacaagttgtgttcaagagtcagagcagtgagctcagaggcccttctcactgagacagcaacatttaaaccaaaccagaggaagtatttgtggaactcactgcctcagtttgggtaaaggatgagcagacaagtcaactaaagaaaaaagaaaagcaaggaggagggttgagcaatctagagcatggagtttgttaagtgctctctggatttgagttgaagagcatccatttgagttgaaggccacagggcacaatgagctctcccttctaccaccagaaagtccctggtcaggtctcaggtagtgcggtgtggctcagctgggtttttaattagcgcattctctatccaacatttaattgtttgaaagcctccatatagttagattgtgctttgtaattttgttgttgttgctctatcttattgtatatgcattgagtattaacctgaatgttttgttacttaaatattaaaaacactgttatcctacagtt

SEQ ID NO: 3788 - DNA, 3359 bp, Homo sapiens; identical to SEQ ID NO: 139

SEQ ID NO: 3789 - DNA, 2412 bp, Homo sapiens; identical to SEQ ID NO: 457

SEQ ID NO: 3790 - DNA, 4485 bp, Homo sapiens
gaaactgctcgggctgcaagcagtcttccaggctttgcggctgccaaaggaataattgagacgtctgagttgagcaggtggaatgtcagaagactgagaacattgttccttcttcatactgctgctctgttgccagagaatcccaatttacactcaaagcttctttgattaagtgctaggagataaatttgcattttctcaaggaaaaggctaaaagtggtagcaggtggcatttaccgtcatggagagcagggatcataacaacccccaggagggacccacgtcctccagcggtagaagggctgcagtggaagacaatcacttgctgattaaagctgttcaaaacgaagatgttgacctggtccagcaattgctggaaggtggagccaatgttaatttccaggaagaggaagggggctggacacctctgcataacgcagtacaaatgagcagggaggacattgtggaacttctgcttcgtcatggtgctgaccctgttctgaggaagaagaatggggccacgccttttatcctcgcagcgattgcggggagcgtgaagctgctgaaacttttcctttctaaaggagcagatgtcaatgagtgtgatttttatggcttcacagccttcatggaagccgctgtgtatggtaaggtcaaagccctaaaattcctttataagagaggagcaaatgtgaatttgaggcgaaagacaaaggaggatcaagagcggctgaggaaaggaggggccacagctctcatggacgctgctgaaaaaggacacgtagaggtcttgaagattctccttgatgagatgggggcagatgtaaacgcctgtgacaatatgggcagaaatgccttgatccatgctctcctgagctctgacgatagtgatgtggaggctattacgcatctgctgctggaccatggggctgatgtcaatgtgaggggagaaagagggaagactcccctgatcctggcagtggagaagaagcacttgggtttggtgcagaggcttctggagcaagagcacatagagattaatgacacagacagtgatggcaaaacagcactgctgcttgctgttgaactcaaactgaagaaaatcgccgagttgctgtgcaaacgtggagccagtacagattgtggggatcttgttatgacagcgaggcggaattatgaccattcccttgtgaaggttcttctctctcatggagccaaagaagattttcaccctcctgctgaagactggaagcctcagagctcacactggggggcagccctgaaggatctccacagaatataccgccctatgattggcaaactcaagttctttattgatgaaaaatacaaaattgctgatacttcagaaggaggcatctacctggggttctatgagaagcaagaagtagctgtgaagacgttctgtgagggcagcccacgtgcacagcgggaagtctcttgtctgcaaagcagccgagagaacagtcacttggtgacattctatgggagtgagagccacaggggccacttgtttgtgtgtgtcaccctctgtgagcagactctggaagcgtgtttggatgtgcacagaggggaagatgtggaaaatgaggaagatgaatttgcccgaaatgtcctgtcatctatatttaaggctgttcaagaactacacttgtcctgtggatacacccaccaggatctgcaaccacaaaacatcttaatagattctaagaaagctgctcacctggcagattttgataagagcatcaagtgggctggagatccacaggaagtcaagagagatctagaggaccttggacggctggtcctctatgtggtaaagaagggaagcatctcatttgaggatctgaaagctcaaagtaatgaagaggtggttcaactttctccagatgaggaaactaaggacctcattcatcgtctcttccatcctggggaacatgtgagggactgtctgagtgacctgctgggtcatcccttcttttggacttgggagagccgctataggacgcttcggaatgtgggaaatgaatccgacatcaaaacacgaaaatctgaaagtgagatcctcagactactgcaacctgggccttctgaacattccaaaagttttgacaagtggacgactaagatgagcaagctgaggcacagacaaataatttttccaactacacagaaccagtaaggggtgcaccaggatttgaagctgggaaggatggctgcagaggccatgtgcttaagccacaccactacacgaagctgtgatggcatcaagtctaccaactcatttactcactgaggaaattgaggctcagagaccacactcaaattactcatgctggacagtcagagattggcagacctggaaagagattaatgaatgtgttatgaaaaaaatgaataagttttatgaaaaaagaggcaatttctaccagaacactgtgggtgatctgctaaagttcatccggaatttgggagaacacattgatgaagaaaagcataaaaagatgaaattaaaaattggagacccttccctgtattttcagaagacatttccagatctggtgatctatgtctacacaaaactacagaacacagaatatagaaagcatttcccccaaacccacagtccaaacaagcctcagtgtgatggagctggtggggccagtgggttggccagccctgggtgctgatggactgatttgctggagttcagggaactacttattagctgtagagtccttggcaaatcacaacattctgggccttttaactcaccaggttgcttgtgagggatgagttgcatagctgatatgtcagtccctggcatcgtgtattccatatgtctataacaaaagcaatatatacccagactacactagtccataagctttacccactaactgggaggacattctgctaagattccttttgtcaattgcaccaaaagaatgagtgccttgacccctaatgctgcatatgttacaattctctcacttaattttcccaatgatcttgcaaaacagggattatcatccccatttaagaactgaggaacctgagactcagagagtgtgagctactggcccaagattattcaatttatacctagcactttataaatttatgtggtgttattggtacctctcatttgggcaccttaaaacttaactatccttccagggctcttccagatgaggcccaaaacatatataggggttccaggaatctcattcattcattcagtatttattgagcatctagtataagtctgggcactggatgcatgaattccactccttccagaaccaactgcattggttttccatgaccttaaggcagtagttctcaactggggggcaattttgcactgaagagagcatttggcagagtctgaagaagtttttggtgtcacagctttgtggggagcatgctatggcatttagtgggtaaagaccagggatgctgccaaacctgccttgcacaggacagcccctgcaacaaagaattatccagacaaaaatatcaatggtgctgaggttgagaaaacctgacttaaggggctgggatgcttttgaactagcttaaggcccaggactgtggagtgtgtggaccaccccacagaggagggactcagatttatttactcttgctggatctgtagtgatggagttccttctggtgtcagccccacaggaggctcccaggcctccctcacttcccatacccagtctaggagctccttctggctcccaagcacccagagctttcctccgccttttagttttggttcctccactggaatgtaggctcctcacgggcgatggctgtcttttcttgactttgtatcttcactgccaagcaaaaagtctgccaagtgggaatgtttaataaatattcattgaataatgaatgaaccatcttcgtacatgaataataatactgtcttacgtttttctggtgctttataatgtatacattacatctgagtattttattttatttaattttcaaaacaatcctttaaggtcaacattgttatccttattttgctgatgaggaaactaaggttagaaacattttgatttcctctaggacgtatagctaggaagtgttactatcttgatttgaacaaattttctggtgctaagtctgatgttctttccatgaatcattgtggtggttgagatggagctttgtaatgggaataaaacagtaccttaggttctttctgaaaaggaggtatctagcaatggataaatagataccactgaatgaaattaaatgttgattaggaacaaatttaaggcttaaaaaatactttatgagcagcaagattgctttaacttttaaaatgaagctttggttctctgatttgtaatgagcacctggatatgtcaattaaaatgcccatttgtgaagcttactcaataaaactttaaattgtcaaaaaaaaaaaaaaaaaaaaaa

SEQ ID NO: 3791 - DNA, 1068 bp, Homo sapiens
atgaccggctccgcggccgacactcaccgctgcccccaccccaaaggcgccaaaggcacccggtcccggagcagccacgcgcggcccgtgagcctcgccaccagcgggggctcagaggaggaggacaaagacggcggggtgctgttccacgtcaacaagagcggcttccccatcgacagccacacctgggagcgcatgtggatgcacgtggccaaggtgcaccctaaggggggagaaatggtgggcgccatcaggaacgccgccttcttggcaaagccttcaataccccaggtcccaaactacaggctgtcgatgacgatcccagactggctccaggcgatccagaattacatgaagaccctacaatataatcacacagggacccagttctttgaaattaggaaaatgagaccgctgagtgggttaatggaaacagcaaaagaaatgacccgagagtccttgcctatcaaatgccttgaagctgtcatcctgggcatctacttaaccaatgggcagccttccattgagcggttccccatcagctttaaaacctacttctcaggaaactactttcaccacgttgtgctggggatttactgcaatggccgctatggctcattgggcatgagccgcagggctgagctgatggacaagccattgacttttcggactctgagtgacctcatctttgactttgaggactcttacaagaaatacctgcacacagtcaagaaggtcaagattgggctgtacgtcccccatgagcctcatagcttccagcccattgagtggaagcagctggtcctcaacgtctcaaagatgctgagggctgacataaggaaggagctggagaaatatgccagggacatgagaatgaagatcctgaaacctgcaagtgcccactctccgacccaagtgagaagccggggaaaatccctgtcccccagaaggagacaggcaagccccccgaggaggctcggccggcgagagaagtcgcctgcactgcctgaaaagaaggtggctgatctgagcactctgaatgaagtgggctatcaaatccgaatttag

SEQ ID NO: 3792 - DNA, 1972 bp, Homo sapiens
agtctgggtctggagcctgagccctgcggaacctcggcgctcggccccaccccgcccgtacctgcacttatttattgttgttatttcttaccgcggagccccgcagtcgggtcctcccgcccgctcccgcgcagcgctagcattctccagtccctcagtcccttcccgcgcggtgcgccgcagccgaggcgatgcgcctcattcagaacatgtgcaccatcgccgagtaccccgcgccgggcaacgccgcggcctccgactgctgtgtgggcgccgccggccgccgcctggtcaagatcgccgtggtgggcgccagcggcgtgggcaagaccgcactggtggtccggttcctcaccaaacgattcatcggtgactatgaaagaaatgcaggtaatctctatactagacaagttcagatagaaggtgaaaccctggctcttcaggttcaagacactccaggtattcaggtccatgagaacagcctgagctgcagtgaacagctgaataggtgcattcgctgggcagatgctgtggtgatcgttttctccatcactgactacaagagctatgaactcatcagccagctccaccagcacgtgcagcagctacacctgggcacccggctgcctgtggtggtcgtggccaacaaagctgacctgttgcacatcaaacaggttgaccctcagcttggactgcagctagccagcatgctaggctgctcattctatgaagtgtctgtcagtgaaaattataatgatgtctacagcgccttccacgtcctctgtaaagaggtcagtcacaaacagcagcctagcagtacacccgagaagcgaagaacctccctcattcccaggcccaagtcacccaacatgcaggacctgaagaggaggtttaagcaagccctctctgccaaagtgaggactgtcacctccgtctgaagcaggaggagcactcaagggggtttggtcttcccaggaagagggcctgaggttctcctagtgcaggaacgttgaatattggcaatgattcctggttccagaaagggctggagcagaagggccaagagggcctgtggaactgctacagaaaaggaagtgttgttctgagcagggggacaggattgatgaggcttgaaagagcccactgagccactctctgaatatgtgaaatgtactctgtgtcttttcctttagagtggggagggggcataatcgtttcggtttctgcattcaactaccttgtaaatggtggtccgttgcagtttcaccaaatgtattgatgtgatttacagtgggaatgaaagaacagattaagcattgataggctttcttttttcccccttttttcttttttctcttttcttctttcttttcctctttttccccaagaggaagaattgcttttctcttaccagtatgatttgtaactctggaacactattcttacagaatgcctttctaacctgaaggatacccagatttctttctttatgtacaagatggaaaatcccctacccctcaaaaacaggttgagtttatgggccagaatattttgtataccagacattggtaagctctcatggtttacaggaaggctctggttccccctcacaggatgagcatgctcagttgggcgtgtgtggaggagctgtgaacttcacgctcttcaaccccagactttgactgtatagttttttgtttttttaactgttccatcaggaaaaaaatgtgtcagttgattttggtgtgacttgtgtaaatggttcatggcaatgacgttgggttgcttcctaggcctggctgagttgtgcctaagggtggctgaaatactaaaacacttatcttacagcaagtgaacaggggctacctgccacatcccctccacagatgcactttaaaaagccactcatgctttggcttaaactgtaattaatttattttatgtacaataaatcgcatttgaaaaaaaaaaa

SEQ ID NO: 3793 - DNA, 3897 bp, Homo sapiens; identical to SEQ ID NO: 549

SEQ ID NO: 3794 - DNA, 5361 bp, Homo sapiens; identical to SEQ ID NO: 758

SEQ ID NO: 3795 - DNA, 5603 bp, Homo sapiens; identical to SEQ ID NO: 2535

SEQ ID NO: 3796 - DNA, 1815 bp, Homo sapiens; identical to SEQ ID NO: 544

SEQ ID NO: 3797 - DNA, 2681 bp, Homo sapiens; identical to SEQ ID NO: 104

SEQ ID NO: 3798 - DNA, 2116 bp, Homo sapiens; identical to SEQ ID NO: 451

SEQ ID NO: 3799 - DNA, 1527 bp, Homo sapiens; identical to SEQ ID NO: 2478

SEQ ID NO: 3800 - DNA, 1527 bp, Homo sapiens
aggacgttccagaagcatctggggacagaaccagcctcttccagggaggcctgggagctgggggtgtgtgtctggcagtccctgcagccctgggctctgcggcccctgcgtcctccgcttggctctgccactgcatctgagtgtcttctctcctcacggctccccgcatttctaactctttctgcctcctcgtctcaaagctgttccttcccccgactcaagaatccccggaggcccggaggcctgcagcaggagcggccatgaagaagctgatggtggtgctgagtctgattgctgcagcctgggcagaggagcagaataagttggtgcatggcggaccctgcgacaagacatctcacccctaccaagctgccctctacacctcgggccacttgctctgtggtggggtccttatccatccactgtgggtcctcacagctgcccactgcaaaaaaccgaatcttcaggtcttcctggggaagcataaccttcggcaaagggagagttcccaggagcagagttctgttgtccgggctgtgatccaccctgactatgatgccgccagccatgaccaggacatcatgctgttgcgcctggcacgcccagccaaactctctgaactcatccagccccttcccctggagagggactgctcagccaacaccaccagctgccacatcctgggctggggcaagacagcagatggtgatttccctgacaccatccagtgtgcatacatccacctggtgtcccgtgaggagtgtgagcatgcctaccctggccagatcacccagaacatgttgtgtgctggggatgagaagtacgggaaggattcctgccagggtgattctgggggtccgctggtatgtggagaccacctccgaggccttgtgtcatggggtaacatcccctgtggatcaaaggagaagccaggagtctacaccaacgtctgcagatacacgaactggatccaaaaaaccattcaggccaagtgaccctgacatgtgacatctacctcccgacctaccaccccactggctggttccagaacgtctctcacctagaccttgcctcccctcctctcctgcccagctctgaccctgatgcttaataaacgcagcgacgtgagggtcctgattctccctggttttaccccagctccatccttgcatcactggggaggacgtgatgagtgaggacttgggtcctcggtcttacccccaccactaagagaatacaggaaaatcccttctaggcatctcctctccccaacccttccacacgtttgatttcttcctgcagaggcccagccacgtgtctggaatcccagctccgctgcttactgtcggtgtccccttgggatgtacctttcttcactgcagatttctcacctgtaagatgaagataaggatgatacagtctccataaggcagtggctgttggaaagatttaaggtttcacacctatgacatacatggaatagcacctgggccaccatgcactcaataaagaatgaattttattatg

SEQ ID NO: 3801 - DNA, 1495 bp, Homo sapiens
aggacgttccagaagcatctggggacagaaccagcctcttccagggaggcctgggagctgggggtgtgtgtctggcagtccctgcagccctgggctctgcggcccctgcgtcctccgcttggctctgccactgcatctgagtgtcttctctcctcacggctccccgcatttctaactctttctgcctcctcgtctcaaagctgttccttcccccgactcaagaatccccggaggcccggaggcctgcagcagcctgggcagaggagcagaataagttggtgcatggcggaccctgcgacaagacatctcacccctaccaagctgccctctacacctcgggccacttgctctgtggtggggtccttatccatccactgtgggtcctcacagctgcccactgcaaaaaaccgaatcttcaggtcttcctggggaagcataaccttcggcaaagggagagttcccaggagcagagttctgttgtccgggctgtgatccaccctgactatgatgccgccagccatgaccaggacatcatgctgttgcgcctggcacgcccagccaaactctctgaactcatccagccccttcccctggagagggactgctcagccaacaccaccagctgccacatcctgggctggggcaagacagcagatggtgatttccctgacaccatccagtgtgcatacatccacctggtgtcccgtgaggagtgtgagcatgcctaccctggccagatcacccagaacatgttgtgtgctggggatgagaagtacgggaaggattcctgccagggtgattctgggggtccgctggtatgtggagaccacctccgaggccttgtgtcatggggtaacatcccctgtggatcaaaggagaagccaggagtctacaccaacgtctgcagatacacgaactggatccaaaaaaccattcaggccaagtgaccctgacatgtgacatctacctcccgacctaccaccccactggctggttccagaacgtctctcacctagaccttgcctcccctcctctcctgcccagctctgaccctgatgcttaataaacgcagcgacgtgagggtcctgattctccctggttttaccccagctccatccttgcatcactggggaggacgtgatgagtgaggacttgggtcctcggtcttacccccaccactaagagaatacaggaaaatcccttctaggcatctcctctccccaacccttccacacgtttgatttcttcctgcagaggcccagccacgtgtctggaatcccagctccgctgcttactgtcggtgtccccttgggatgtacctttcttcactgcagatttctcacctgtaagatgaagataaggatgatacagtctccataaggcagtggctgttggaaagatttaaggtttcacacctatgacatacatggaatagcacctgggccaccatgcactcaataaagaatgaattttattatgaaaaaaaaaaaaaaaa

SEQ ID NO: 3802 - DNA, 7189 bp, Homo sapiens
cttggggacttttcttttctgctttgcaggcccaggctcaaggcaaattataagtagggaaccaatttgagggaaagacatgtgaacagagttaaggtaccacgtcctgggagcgaccagcagccccacctgaagtccgcatgcaactctgacaagctcaggtgcttgttttaaggaaaggggctactagagtcttaccaacagcgagcccaggtgggagatgaaacaggtactccccaaaataggtcatccgagggaggaaactgatggagagcacaatgtgctctgagcgtttttaatgtttttaagcttttaaatgatttcttcaaggccgagcagcagcagcaaaggtgtggcttaaaggattaagggggtttctgctggcacctagaatgaagttactctattactaatcaagccgagaggaggcccactatgcccccgtttatcatcctttcccagttcctttttgctggtcacaaaacgatgctcatcaatcccacctaaagcaggaggccaggagcccagcctcttgtagaaacagcgagggtataactgccctcccgttctgcccccaagacgaaggaggactctcggaagccaagaaaggtttaagaagtctttctggatagagagcagtgcccaggcaggaagcctttcgccggcagagcggggtccgaggacgagctggagaggacagaggcgcgatgggcctgctgcagggcctgctccgagtccggaagctgctgctggtcgtctgcgtcccgctcctgctgctgcctctgcccgtcctccaccccagcagcgaggcctcgtgtgcttacgtgctgatcgtgactgctgtgtactgggtgtcggaggcagtgcctctgggagctgcagccctggtgccggccttcctctacccgttcttcggagtcctccggtccaatgaggtggcggcggagtacttcaagaacaccacgctgctgctggtgggggtcatctgcgtggcggctgccgtggagaagtggaacctgcataagcgcattgctctgcgcatggtcttgatggccggggccaagccgggcatgctgctgctctgcttcatgtgctgtaccacgttgctgtccatgtggctgtccaacacctccaccaccgccatggtgatgcccatcgtggaggccgtgctgcaggagctggtcagtgctgaggacgagcagctcgtggcgggcaactccaacaccgaagaggccgaacccatcagtacagtttgctggagttcatctctcctttgctcctccaacctcccctggggtcctcctgcctggctcctctagggagactgcccaactttgtgcccaccccaggaccccctcagccatgcccccacattccccttcctcttccctctctcctctttcccatcccagctcttggactctgaagcttccctgaactccctgttctggctcttccttcctccttcacttctgggctcttttcccccaaatgctcaagggtacacactgctctttgcccccaaatgctcaaggatcactgcaaaaccctggggccagtctgcatccatgagccccattctatttacagagcaaagggaaggagaaatgtcacccactccatatggcccacctccgccctaagcccttgagctatgctccaacccacagggtcagccccagcctccacctctcacatactgcttttctttgctactcataggtctggatgtaaagaacagccaaccttctctggaactcatctttgtcaatgaagagtgagtatgactgccctctcccagacagcgcctctcagagtccataggggaggtcagaaaagaggggacctagacccataaacagctctttgagatgtaccacccaagctcaccaccttgccacaccacccccccaccccgcccaacctcccccatttcctctccatacctaggagtgacctgtcaggacctggagagtcactcccttaaccacagtgttgcagtgatgaggaagaaataaaaaggccacactgaatctcagtggatatatgaactgtccacacagccaccatgcagaatctcttctaaattcatgtcccttttaggaaaatagtatgtttaatttgttaacggaaaaccgttcacatctcgatgccactgcagattcttggagaatcatgaaatattttctagatattagataaggtcttggtagatttggtcttgttagatatggcaaagaaaacttaggtgacaggtaggggatgaggggacaggaggtgagagggccttgtgatgatgggaagcagagctggaaaaggagaagcagcctcagacattcctggaggaagctctattaacagctgattccatttggagattctatttcaaaatgtggcccacaggcatgccacaatgaatagtccacatttaaaagctggatttgtaatacagctcagctctgtcatttgcccttgttgtaaaaaaggagaacgcacattgggtgaaatcagcattcacagtgggacagacgtggaagggtgccatcaggaaatcgctttatttttctccaccactatcttcaatcatagcatattggatttcttgatgacatcacccttgatgatatcccaggcaaatcccgtagctctcctggttcctttcaggtattataacaatctcatgttcagacatttgggagactagtccaaattcaaatcaaaacttcaacttctcagccaaagcttctcccatacccacccacccctcaccctaggcctgcagaagaaagaaggtgaaagtaagtcgggggagggagttgagcttctttctgtcttcctccacctccctcttctcctcctcccctaaccgcaccctcactctgctgcttctgacttttctgggcttaggacagcagctctagggtacaggaaagataaatgggtgagaagggtctggatgggggctattgaggtctggggttggtgccctctctgagatttcagtccctggctctttcatctgtggggcaactgccttcagggtctttggagcatcccattatggcgccctctgcagggcctcaggcctgatggcagggccttgctctgggattaacactcacgccaccctccagggcctgtgctctggtggttaactcccccacaacccctgtattggggctgcctctgcctctgggcaggcctgtcccaggtgacccaggaaaaggccatcctcactgtggccttttctcctccctgtggcctctctggcatcaccctactggcttcttgcctttgctcttttccacacaaaaatgtatccccaaactccaaaagaaaagcctgagttgtccctagaactctaagcatcttttgtgctggtgggaactgggtcatttgctgggtgtgcagacagcactcttgcggccaccacctcccatgctacctgaggatcctcgcctaccctcctcacccagtttgggaagaagggaagggaaacatcacagcacattctcctcccaggctaagaactcactccaaagaacacttccctctgcacgcctgtcagcttcttatccttccctgacagagcctgaagagggaccatggccgcaggacccacatcccgcatgtgtgtgcccaatacgctctctgtcttcacagtggctgagctggtggctcccactgtcctcgcaactaagacaaactggaaacattcactgatcactcagtgtgtcagttacactgatggctaagttctcatcttcttctgtcctcaaggcaaaggttggggaccagcaggggtgggagagactcaccccctgaggtgtacttgctgatcagaagtcctccccctccgccaccctctccctctcccttgactttccctgagtacaatccaggccctccctgctcctgtcacctccgatacgcatatcacaagttcccctttctagatagtggtcttcccagagtcagtcagtgagaacatgagagtcagccagtgagaacatgagagtcagccagtgagaacatggtcagggggcataggctttccagagagacagactcctggactcctaccctcctctgccacttagcatccccgtgctaagtactggtgtaaatggaggtatgaatgccaggaccatagatctgtgatgaggattaacaatgtctgggggttaaagcccatatatgtgcactctgtatctaatatccactccacatctgctgttaggacgattgttaatatcaaaggaaagtgctgcccctgccctcagaaggaagcaggcccctggccccactaatccttacagcatctcagaaggcaaggaagacaagggagagattagtcttctctggagactagaaaactggaatccagagagtttaagtcccttacaccaaacgcctgatgcagggggacctcccctcccaagagtcggcctcactgacgtggcttctgtgtcctctgcttggttccagcaggtccaacgcagacctcaccactctgatgcacaacgaggtatggccttggggtttttctgtgctttggaatcacttgaaaatccctcagcacttcttcatggaaacccaagattcagaaccagattttcaacagccacagatccaccttagagttcccttcagtgaggattccattgacaaaatgttattattaaaaaggacacattggctgggcgtggtggctcatgcctgtactcccagcactttgggaggccacagcaggaggaccacttgaggccaggagttcaagaccagcctggccaacatggtgaaaccccgcctgtactaaaaatacaaaaattagctgggagtggtgatgggcaccggtaatccccactacttgggaggctgaggcgggagaatcacttgaacctgggaggcagaggttgcagtgagcccagatcgtgccactgcacttcagcctgggcaacagagcgagacccccatctcaaaaaataaaaataaataaaaataaaaagaacacatttacaggggaaagcagagtttacctgcacacagttactcgaacttatttcacctcccccaaatctggttatacatcttttcatgagaagtataaaaggccaattaaacattggacttcagctgggtacaatgatgtgcacgtgtacttccagctactggggaggctgaggcaggaggatcgctgtggcccaggagtttgaccccagcctggacaacacagtgagaccctgtctctaaaacaaacaaaaaactgtggacttgcttgtgattattttttttttttttattttcttttttttcatcttatatataaagggttcttcattagctaataaagtcccagaaaggctggctctcctgtaagggcagagccatgttctgcctagtttcaaagcctcttcaagtggagagcttgacaccaggctgggcggggcaggcctggctgaggtgccctggtgtatatgctccccctggcttctggcctctggttcccacagtgctgaggcatggggtggccctgggatgactaggtggtccttctcgaggcacctggctcaccacttcctcttcctaatagtgagatggcctttgtcccaacagaacctgaatggtgtgccctcgatcaccaaccccatcaaaactgcaaaccaacaccagggcaagaagcaacacccatcccaggaaaagccacaagtcctgacccccagccccaggaagcagaagctgaacagaaagtacaggtcccaccatgaccagatgatctgcaagtgcctctccctgagcatatcctactccgctaccattggcggcctgaccaccatcatcggcacctccaccagcctcatcttcctggaacacttcaacaaccagtatccagccgcagaggtggtgaactttggcacctggttcctcttcagcttccccatatccctcatcatgctggtggtcagctggttctggatgcactggctgttcctgggctgcaattttaaagagacctgctctctgagcaagaagaagaagaccaaaagggaacagttgtcagagaagaggatccaagaagaatatgaaaaactgggagacattagctacccagaaatggtgactggatttttcttcatcctgatgaccgtactgtggtttacccgggagcctggctttgtccctggctgggattctttctttgaaaagaaaggctaccgtactgatgccacagtctctgtcttccttggcttcctcctcttcctcattccagcgaagaagccctgctttgggaaaaagaatgatggagagaaccaggagcactcactggggaccgagcccatcatcacgtggaaggacttccagaagaccatgccctgggagattgtcattttggttgggggaggctatgctctggcttctggtagcaagagctctggcctctctacatggattgggaaccagatgttgtccctgagcagcctcccaccgtgggctgtcaccctgctggcatgcatcctcgtgtccattgtcactgagtttgtgagcaacccagcaaccatcaccatcttcctgcccatcctgtgcagcctgtctgaaacgctgcacattaaccccctctacaccctgatcccagtcaccatgtgcatctcctttgcagtgatgctgcctgtgggcaatccccctaatgccatcgtcttcagctatgggcactgccagatcaaagatatggtgaaagctggcctgggagtcaacgttattggactggtgatagtaatggtggccatcaacacctggggagttagcctcttccacctggacacttacccagcatgggcgagggtcagcaacatcactgatcaagcctaacgccaagtgtacaaactggcccaaccacaggagctgccagtatccagcagtatctggaccacaggcaaagaaaaccactaggaccaccaggagcacacaaccccagacccacgccggagggcatccctccaccagaagattccgccacctcaagtgaactgcaggaatcctccaacaaccacaaacacatgcttcgctgttagtgtcttcttcctgccctcagcaccacagctcaagaaaacctaaagtttcaatacaagccataggctcacagaaaaagaaaaagaaaataaaaattaaattaaaaaaaaagaagacaaag

SEQ ID NO: 3803 - DNA, 5802 bp, Homo sapiens
ggattctcagacaaggcttgcaaatgccccgcagccatcatttaactgcacccgcagaatagttacggtttgtcacccgaccctcccggatcgcctaatttgtccctagtgagaccccgaggctctgcccgcgcctggcttcttcgtagctggatgcatatcgtgctccgggcagcgcgggcgcagggcacgcgttcgcgcacaccctagcacacatgaacacgcgcaagagctgaaccaagcacggtttccatttcaaaaagggagacagcctctaccgcgattgtagaagagactgtggtgtgaattagggaccgggaggcgtcgaacggaggaacggttcatcttagagactaattttctggagtttctgcccctgctctgcgtcagccctcacgtcacttcgccagcagtagcagaggcggcggcggcggctcccggaattgggttggagcaggagcctcgctggctgcttcgctcgcgctctacgcgctcagtccccggcggtagcaggagcctggacccaggcgccgccggcgggcgtgaggcgccggagcccggcctcgaggtgcataccggacccccattcgcatctaacaaggaatctgcgccccagagagtcccgggagcgccgccggtcggtgcccggcgcgccgggccatgcagcgacggccgccgcggagctccgagcagcggtagcgcccccctgtaaagcggttcgctatgccggggccactgtgaaccctgccgcctgccggaacactcttcgctccggaccagctcagcctctgataagctggactcggcacgcccgcaacaagcaccgaggagttaagagagccgcaagcgcagggaaggcctccccgcacgggtgggggaaagcggccggtgcagcgcggggacaggcactcgggctggcactggctgctagggatgtcgtcctggataaggtggcatggacccgccatggcgcggctctggggcttctgctggctggttgtgggcttctggagggccgctttcgcctgtcccacgtcctgcaaatgcagtgcctctcggatctggtgcagcgacccttctcctggcatcgtggcatttccgagattggagcctaacagtgtagatcctgagaacatcaccgaaattttcatcgcaaaccagaaaaggttagaaatcatcaacgaagatgatgttgaagcttatgtgggactgagaaatctgacaattgtggattctggattaaaatttgtggctcataaagcatttctgaaaaacagcaacctgcagcacatcaattttacccgaaacaaactgacgagtttgtctaggaaacatttccgtcaccttgacttgtctgaactgatcctggtgggcaatccatttacatgctcctgtgacattatgtggatcaagactctccaagaggctaaatccagtccagacactcaggatttgtactgcctgaatgaaagcagcaagaatattcccctggcaaacctgcagatacccaattgtggtttgccatctgcaaatctggccgcacctaacctcactgtggaggaaggaaagtctatcacattatcctgtagtgtggcaggtgatccggttcctaatatgtattgggatgttggtaacctggtttccaaacatatgaatgaaacaagccacacacagggctccttaaggataactaacatttcatccgatgacagtgggaagcagatctcttgtgtggcggaaaatcttgtaggagaagatcaagattctgtcaacctcactgtgcattttgcaccaactatcacatttctcgaatctccaacctcagaccaccactggtgcattccattcactgtgaaaggcaaccccaaaccagcgcttcagtggttctataacggggcaatattgaatgagtccaaatacatctgtactaaaatacatgttaccaatcacacggagtaccacggctgcctccagctggataatcccactcacatgaacaatggggactacactctaatagccaagaatgagtatgggaaggatgagaaacagatttctgctcacttcatgggctggcctggaattgacgatggtgcaaacccaaattatcctgatgtaatttatgaagattatggaactgcagcgaatgacatcggggacaccacgaacagaagtaatgaaatcccttccacagacgtcactgataaaaccggtcgggaacatctctcggtctatgctgtggtggtgattgcgtctgtggtgggattttgccttttggtaatgctgtttctgcttaagttggcaagacactccaagtttggcatgaaaggcccagcctccgttatcagcaatgatgatgactctgccagcccactccatcacatctccaatgggagtaacactccatcttcttcggaaggtggcccagatgctgtcattattggaatgaccaagatccctgtcattgaaaatccccagtactttggcatcaccaacagtcagctcaagccagacacatttgttcagcacatcaagcgacataacattgttctgaaaagggagctaggcgaaggagcctttggaaaagtgttcctagctgaatgctataacctctgtcctgagcaggacaagatcttggtggcagtgaagaccctgaaggatgccagtgacaatgcacgcaaggacttccaccgtgaggccgagctcctgaccaacctccagcatgagcacatcgtcaagttctatggcgtctgcgtggagggcgaccccctcatcatggtctttgagtacatgaagcatggggacctcaacaagttcctcagggcacacggccctgatgccgtgctgatggctgagggcaacccgcccacggaactgacgcagtcgcagatgctgcatatagcccagcagatcgccgcgggcatggtctacctggcgtcccagcacttcgtgcaccgcgatttggccaccaggaactgcctggtcggggagaacttgctggtgaaaatcggggactttgggatgtcccgggacgtgtacagcactgactactacagggtgagtagctgtgcagatcagagaccccagggacctctttccctgcgggacccctgctgtatttgtttgctgaggctgtcataacaaaatatcatgactgggtggcttaaacgacagacatgtgtttctcatggctctggaggctggaagtccaagctcaaggtgtgagtgggattggttcctcctgaggcctcgctccttggcttgcgggtggctgccttctcactatgccctcacattgggatggtgacaacccaatccttccctttaggcctaaatttcttcttttaaggacaccagtcagattggattgcatcccaccctaatggtctttttaacttaatcacctacttagagtcttgtctccaaatacagtcacattttgaggccctggaggtgaggttatcaacgtatagattttggggggacgcaggtcagcccatagcacccaccctgctcttggcactccagcgtggtggatgagatctccaagagtgaagtcctcagtgtgagaatccttccagagaaaactgagggcctgggggaattcctggtgaggttaaaggatgctgaggtttggctttgattctgtgaaagtatgcctggagcctttgtttgagatttgaacaaaagtgaacttgttcacataaataatagtacaccggactttggaagttccctccaagcgccatcttggttgaaagcggtttagcttggtgagatggaagaagttttatcctgcctgttcctagacacttccacacagcttgtctggtgtttccaccactgaaatcactgagaggcagagttacagacagtgactcagatccactgatgacctagaactggcccccgggatatgttaactttgttaactgagattttggaactcggacatgagagaaaagggaatttctggaaatgttgaagttgtgatatttagagtgaagattcggggtggtgttctaccactttgattttctaccaaccctcaatttgattttcttgtgtgttttgctgtttttcaaggagagaggaaggaaaaaggaaggaagggaataaatgtgctggtgtctatagcttaacagcataaagcacagaactggctacctttcataatagggtagggcaggtgaagatgctggctttgctcttctcattgttatttatttttgaggaggcaccttctcagtttatttcctgttccccttcctgcagtcttgctcacctctatggcctctgcgttttagtggggtgaactttgctataattagtgtaagaaaattaatctattgtcgtgctccattattcttcatttgactgttttgtggtgtttttttttttcttggtcaccttgataagcatcatttacattttgtgtggcaaaaaggaatagagaccacatggaaaaagattctcttgggtgtatttgcaggagatgggggcacactcttaacttcaggtgttcaaaatgtagcttaaaagcagtgactagtttgttcaagatatttaaaacgtggggagactttacctaccagagatggtctcctctgctagttctacaccttaatgaaagttctcccttccttgatgggggcagggaaacacatggatgattctccgaagaaaagctttgctgatcttggtgagcacccaagggagggacatgtggcccaggcaaaggctttctctctgcagtattagtaaagggttcaacgtgcctggcacaaaaagtgagtgcttgttaagtttttccacctaattattacccaaatcaatagacatacacttcatctccaaagctaggacttaactggatggaacctggcatcctcctctctaggaatctccaaaaataatttaaagaaaaatacctaaaatctcaacaataaaaagataaatcactcaattcgaaagtaggagaaggttctgaatagacatttctccaaagacaacatccacatggtcaataagcacatgaaaagatgggtgacatcattagtctttagggaaaatgcaaagaaaactcacaataagacaccatttcacaccccctgagatgactacaatagcaagtgttagccaggctgcagaaaaattgaaactctggtactctcctggtgggaatgtgaaatggtgcagctgctttggaaaaccgtttggtagttcctcaaaatgttcaacatagagttaccatgtaattcagtaattctactgctaggcatgtacccaagagaactgaaataatatgttcccacaaaaacttgaacacaaatgtgcatggtagtattactattaatagctaaaaagtggaaacaagtttattgtccatcaactgattaatgaataaacaaaatgcggtaatccatacaatggaatattattcagcagtacaaaagaataaagtactgattcatgctgcaacacagataaacctctaaaacagtgtgctaagtgaaagaagtcagacacaaaaggccacataccatatgattccatttatatgaaatgtccagaataggcaaatccatagagacaggaagtagattaatggttaccgggagatgggggcagggaagaatgggaattgactgctactgcgtacagggtttcttttgggggtgatgaaaatgtgctagaactatatacagtggtggcaattgtacaacattaatcatatacaaaaaaaaaacactgaatcattcactttaaaggctaaatattttggtacctgaattatatctc

SEQ ID NO: 3804 - DNA, 4356 bp, Homo sapiens
accgatggcaactttcaaataattggatgttagaaatggaactctcaaaagatttcctcctccccacgaatgtaccctttgcctaggatgggaggctgtcacctggagtagcaacccaaggccctcgaccgcaggggtcctagcaagccttgcctttgtgcatctgctctgggagccagagaagttgaaagcggcctcactcgggatttttgaagaggttgtatttcccgacagtcctggataaaagacacggcaggcagtctgactgtcaggggagtcccttctgggtctgtatttatatatccctaggaatcctctcctgcgggctcttaaatggcaaagcacccctgagtcctgcaattacggccttcccacccccaagctgaaaaacctgattttcttcaggagaagagaaacctcatcccgggagcggaatttgtgaagaaaatgtgagtgggaaacatgaagagtgatgaaatgaacaagttgagtgactcccaccctgttgaagagattgaacttcatccccagttcctgtgaagctttctggatctcgtcttccaaggtgaagtggaggttctggatccgaacgaccctttaggaccccttgatgggcaggacggcccgattccaactctgaaaggttactttctgaattttctggagccagtaaacaatatcaccattgtccaaggccagacggcaattctgcactgcaaggtggcaggaaacccaccccctaacgtgcggtggctaaagaatgatgccccggtggtgcaggagccgcggcggatcatcatccggaagacagaatatggttcacgactgcgaatccaggacctggacacgacagacactggctactaccagtgcgtggccaccaacgggatgaagaccattaccgccactggcgtcctgtttgtgcggctgggtccaacgcacagcccaaatcataactttcaggatgattaccacgaggatgggttctgccagccttaccggggaattgcctgtgcacgcttcattggcaaccggaccatttatgtggactcgcttcagatgcagggggagattgaaaaccgaatcacagcggccttcaccatgatcggcacgtctacgcacctgtcggaccagtgctcacagttcgccatcccatccttctgccacttcgtgtttcctctgtgcgacgcgcgctcccgggcacccaagccgcgtgagctgtgccgcgacgagtgcgaggtgctggagagcgacctgtgccgccaggagtacaccatcgcccgctccaacccgctcatcctcatgcggcttcagctgcccaagtgtgaggcgctgcccatgcctgagagccccgacgctgccaactgcatgcgcattggcatcccagccgagaggctgggccgctaccatcagtgctataacggctcaggcatggattacagaggaacggcaagcaccaccaagtcaggccaccagtgccagccgtgggccctgcagcacccccacagccaccacctgtccagcacagacttccctgagcttggaggggggcacgcctactgccggaaccccggaggccagatggagggcccctggtgctttacgcagaataaaaacgtacgcatggaactgtgtgacgtaccctcgtgtagtccccgagacagcagcaagatggggattctgtacatcttggtccccagcatcgcaattccactggtcatcgcttgccttttcttcttggtttgcatgtgccggaataagcagaaggcatctgcgtccacaccgcagcggcgacagctgatggcctcgcccagccaagacatggaaatgcccctcattaaccagcacaaacaggccaaactcaaagagatcagcctgtctgcggtgaggttcatggaggagctgggagaggaccggtttgggaaagtctacaaaggtcacctgttcggccctgccccgggggagcagacccaggctgtggccatcaaaacgctgaaggacaaagcggaggggcccctgcgggaggagttccggcatgaggctatgctgcgagcacggctgcaacaccccaacgtcgtctgcctgctgggcgtggtgaccaaggaccagcccctgagcatgatcttcagctactgttcgcacggcgacctccacgaattcctggtcatgcgctcgccgcactcggacgtgggcagcaccgatgatgaccgcacggtgaagtccgccctggagccccccgacttcgtgcaccttgtggcacagatcgcggcggggatggagtacctatccagccaccacgtggttcacaaggacctggccacccgcaatgtgctagtgtacgacaagctgaacgtgaagatctcagacttgggcctcttccgagaggtgtatgccgccgattactacaagctgctggggaactcgctgctgcctatccgctggatggccccagaggccatcatgtacggcaagttctccatcgactcagacatctggtcctacggtgtggtcctgtgggaggtcttcagctacggcctgcagccctactgcgggtattccaaccaggatgtggtggagatgatccggaaccggcaggtgctgccttgccccgatgactgtcccgcctgggtgtatgccctcatgatcgagtgctggaacgagttccccagccggcggccccgcttcaaggacatccacagccggctccgagcctggggcaacctttccaactacaacagctcggcgcagacctcgggggccagcaacaccacgcagaccagctccctgagcaccagcccagtgagcaatgtgagcaacgcccgctacgtggggcccaagcagaaggccccgcccttcccacagccccagttcatccccatgaagggccagatcagacccatggtgcccccgccgcagctctacatccccgtcaacggctaccagccggtgccggcctatggggcctacctgcccaacttctacccggtgcagatcccaatgcagatggccccgcagcaggtgcctcctcagatggtccccaagcccagctcacaccacagtggcagtggctccaccagcacaggctacgtcaccacggccccctccaacacatccatggcagacagggcagccctgctctcagagggcgctgatgacacacagaacgccccagaagatggggcccagagcaccgtgcaggaagcagaggaggaggaggaaggctctgtcccagagactgagctgctgggggactgtgacactctgcaggtggacgaggcccaagtccagctggaagcttgagtggcaccagggcccagggttcggggatagaagccccgccgagaccccacagggacctcagtcacctttgagaagacaccatactcagcaatcacaagagcccgccggccagtgggcttgtttgcagactgggtgaggtggagccctgctcctctctgtcctctgacacagctgccctgcctaggagcacccaagccaggcagggggtctggcagcacggcgtcctggggagcaggacacatggtcatccccagggctgtatacattgattctggtggtagactggtagtgagcagcaaatgcctttcaagaaaataggtggcagcttcactccatgtcatatatggagtgaatatttcaaaacgttgggaataagggcctgcaaaaggcagcgaggaggcacctcgggtcttgaggttcctgacaaccgatctggtctgttggtttgaggatgaaggggctccatttctgctgcctccctgctgagaatattctccctttagcagccaaagattcgctggaacggaggctgccctctgctgcctgttggggtcggaagacaaggggcttctgaaatgggagttcctgagatacaacaaaatgtgtgccttcaaagaaactgacagctttgtatttggtgaaatggttttaattatactccatgtgtattttgcccactttttttgggaattcaagggaaagtgtttcttgggtttggaatgttcagaggaagcagtattgtacagaacacggtattgttatttttgttaagaatcatgtacagagcttaaatgtaatttatatgtttttaatatgccattttcattgaagtattttggtcttaagatgactttagtaatttaactgtttatgttacccacgttgggatccagttggtcttggtttgcttctctctgtaccacgtgcacatgaggtccattcattttacagcccctgttacacacagacccacaggcagccgtctgtgccccgcacacattgttggtcctatttgtaaatcccacacccggtgtatccaataaagtgaaacaaagc

SEQ ID NO: 3805 - DNA, 6174 bp, Homo sapiens
gattagtgggtttgaaaagggaaccgtggctcggcctcatttcccgctctggttcaggcgcaggaggaagtgttttgctggaggatgatgacagaggaatctgagaattgctctcacacaccaacccagcaacatccgtggagaaaactctcaccagcaactcctttaaaacaccgtcatttcaaaccattgtggtcttcaagcaacaacagcagcacaaaaaaccccaaccaaacaaaactcttgacagaagctgtgacaaccagaaaggatgcctcataaagggggaagactttaactaggggcgcgcagatgtgtgaggccttttattgtgagagtggacagacatccgagatttcagagccccatattcgagccccgtggaatcccgcggcccccagccagagccagcatgcagaacagtaagtgcctctggtctttctgggacttcgggctcggggtgcgcggacccgagggtcaggggaggacacagggactcgcgacgcccgcgctggcccggccgccgaccgactgaggcccggggacctgcggcggctgctccccgctccgcgcccggcagcccgggaggggagggcgtttgcttggctcttctcgatactggagaagcaggggctgggcccttaagaacagcccgcccgagttttcgaagctgcggtagagaaaccccatcccccccaaatcctgtaactcacaccccctcccgcccctgcccgggctctgaccccggagagaggggctgggctgatcagggcggggcgaagtcttctcctagttgagcgagaaggaggcccctttgggcttagccaagactgaaagtctccaccaacccggcggggttgggggcttctctccccaagtcactctcagggcagctcctcccctcctcaccccacctacgggcctagaagggatggggagaggagcccccaggcctgcagcagggtaggggtggtaaactcgctgttacagggcgcgggagagagcacggtttactgggtctggtaaggaggtgcccaggaattggaaaatccctgccctggcaactgcaattgcttgggtcctgatagtcccaggcccagagcgcttttgatacttatggcccttgtacctccctgctttcctctgcccagaccccgtggggtcccacccaccttcctgttcgtggtgggtgctggtacgcggcagggctagtctagagctccgacctgggagcctggaggcccagcgaaaccaggcccggtttgaggttacggttgaggcacacggcgtcggggctcaactgaactcaaagtgtggaaaggcccgggtcttccagcagcctgccctggccgaaccacacaggcttaaggagggtccccagcaccttatccatctgttttggaaacgccggtcgccccctggtgcttccggggctggtaagcgcgtagctgaggaaagggcacaaaggtggcgagctttgcgggagtagttgtgcagaacctgccggaccccagggcttggccggtaggctcgccttcggcggctgggctctccccttggagctcagactccccagccgcaggctgtctctcgggcgggccccagccagggcgcgcagccctgagcgtttgtcgctgcggcccggctggcaggccccgaggggcgcggggtcgcgggccggccggcagggctttgtgccgctcgttcccgggtgtgcgcgaggcgcggagcatccaaattgacaccatatgttttcctattagttgcttcgcggtcgagttctaggcgcataatcatcgccagtgggcgagagcgccagcagtccctagggaagggacacaatgattgaggcttaacctctgaaggggaatttggagctgcgctttctctctgccatttcgatgctgggagtggcgctctggccctggcgtctcctgggcaagcaccagccggcggtatctgcggaggtggctggcacgttgttattttttgaaatgagtgaggagggaggtctagatttaggcggccttacgcgcccgccttggcattagcagactgggaattgccgtggctatgcccgaagtttggaaagtctctctcggtctctttctgggacagcctttctttttccgggaagcttcctgtgcctagaggtggggctctgtagctggaggggtagatggaacttgcgaagcaaaggaaggcaataaaaggaagttaggagaaaccggaaacgtgggccaggccttgctctgttggagaagcggtgtccccgcaaagtccctgcttgcgctggtcccggccggagcccagatcccccaaacgcctgtcacttctcatcgagttgaggctccggcccccacccgcgccttggtgagggccccccctcagccccaagccttcggctaccctgaaaacgcggctcccctcgaaggggaaacaagtgcagttcaatctcgtctgagtgatctacaaataaggacggaaagggtcgttttatcacggtcccgtttgtcgtgacgatgcaatttcccggagcggagcactgtcacaaagtgacaaggctgccacaagcgccccgactgatcttttcaattagccttccatgcatgatccggagcgacttccgcctatttccagaaattaagctcaaacttgacgtgcagctagttttattttaaagacaaatgtcagagaggctcatcatattttcccccctcttctatatttggagcttatttattgctaagaagctcaggctcctggcgtcaatttatcagtaggctccaaggagaagagaggagaggagaggagagctgaacagggagccacgtcttttcctgggagggctgctatctaagtcggggctgcaggttggagatttttaaggaagtggaaattggcaattggctttgtgtgtctgtggtttttggggagggggactacaaagaggggctaactccctctccctattctctaaggttggaccacagggatgaggttgtgagatacaaagataaaggagggatggggaacactatgatgtggtatttttcttttctgttttttctttttgataatatctatccttggctaaggggagggcggagttcagcggcggaaataaagcgagcagtggctggtgcgaaccgactcccggctctaagccttacttgcggtggccggacttgtctgtggctgaagccgagcccgggctctgactctcacgtctgcactggaggtgcggaaacctggactggggttcaccagccacatactggctgctctggttgttctctcctcttccttcttctattctaaccaaacaaaacccaactcgatgcttgtgccaggccttggccagtttggacggtgatggaaacatttctggattttagcgtctaagggagcactcaagggctgtaaggtttgctatcactgtcccaacactgcagagaccttgaaggttcagtgtgggatctgtagaacccatggtttgcggtgacattcagaggggatctttgggagatttatagagccggttcttagcgctttgtgggttcagaggctggctgcagtgtttatgaagaggggcagtgggctggggacactgctggggttatggctgtagtgaggtccatgtgtacttgttccttggcatgtgtctgactctgtgttgctgctgcagtacagtgggcaggggcacggttgcttggactgggctgcccgatgtctggcatggctggtggtcctgttgtcctttatttgatcgatagcagggaactgaccgccgaggttggcacaggttggcagggggatgaggatgcattgtggttgtctcctcctcctctccttcttcctcttccccttcctcctctcctttctgttcttgttctccctcatcttcctcttccttcttctccctcttcttcctcttcactctgctctcttctcttcttttcccctttcctctcctctccctttcctcaggtcacagcggagtgaatcagctcggtggtgtctttgtcaacgggcggccactgccggactccacccggcagaagattgtagagctagctcacagcggggcccggccgtgcgacatttcccgaattctgcaggtgatcctcccggcgccgccccactcgccgcccccgcggccctccactctcaacgccctctcttcatttcttactgtaaacgatgctaattatggacccccccaccctcacccaccccagtccccagtccccccacccactcccctgccttcccactttcccctctccttccaccatccttccctatctctttcaacctgggtcagttacataagataactcatctgcttcagaaaaatattgtgtgcggatttttttaaaaaaatctttctctttttatttggtaaagacattcattgtgggaacagtttatgaaccgtaataagctgagttatataaaccggcataatttcattctgctctccccagcccatgcttacctcagcttttgaggtatttgtttattcttcatgtttatgaataatatatattgattttaaaaggcaaatgctatttactcctccctaactcacatttactcaattgagtattttttaaagaagaagaagtaaaaaaatcagtttattttttacctttgttctttaaaacataacgccactttaagcaaggtcagcacaaaaataaatttatctacttcgttttgatgcatcttcaggcagtgtttaagaaaagttttttttttaaaaaaagcttttaaattcgttttttagttcaaattgtttgaaagtatcatcatatttgtagtttttagggctacaaatgtaattttaagaaaaaaagctctctacagtaagttctcataccattgaaggtatatttttgtgttatagacccatgcagatgcaaaagtccaagtgctggacaatcaaaacgtaagcttgtcattgtttaatgcatacttaaacaattttatttttgtcttgaaattattaataatgtggttttctgtccacttcccctatgcaggtgtccaacggatgtgtgagtaaaattctgggcaggtattacgagactggctccatcagacccagggcaatcggtggtagtaaaccgagagtagcgactccagaagttgtaagcaaaatagcccagtataagcgggagtgcccgtccatctttgcttgggaaatccgagacagattactgtccgagggggtctgtaccaacgataacataccaagcgtgtcatcaataaacagagttcttcgcaacctggctagcgaaaagcaacagatgggcgcagacggcatgtatgataaactaaggatgttgaacgggcagaccggaagctggggcacccgccctggttggtatccggggacttcggtgccagggcaacctacgcaagatggctgccagcaacaggaaggagggggagagaataccaactccatcagttccaacggagaagattcagatgaggctcaaatgcgacttcagctgaagcggaagctgcaaagaaatagaacatcctttacccaagagcaaattgaggccctggagaaagagtttgagagaacccattatccagatgtgtttgcccgagaaagactagcagccaaaatagatctacctgaagcaagaatacaggtatggttttctaatcgaagggccaaatggagaagagaagaaaaactgaggaatcagagaagacaggccagcaacacacctagtcatattcctatcagcagtagtttcagcaccagtgtctaccaaccaattccacaacccaccacaccggtttcctccttcacatctggctccatgttgggccgaacagacacagccctcacaaacacctacagcgctctgccgcctatgcccagcttcaccatggcaaataacctgcctatgcaacccccagtccccagccagacctcctcatactcctgcatgctgcccaccagcccttcggtgaatgggcggagttatgatacctacacccccccacatatgcagacacacatgaacagtcagccaatgggcacctcgggcaccacttcaacaggactcatttcccctggtgtgtcagttccagttcaagttcccggaagtgaacctgatatgtctcaatactggccaagattacagt

SEQ ID NO: 3806 - DNA, 5234 bp, Homo sapiens
caggaagggagcagaggcgagagccagcctccggcaggagggcgtagaccccggtgccagccagaacggctccagccttcccgcggccagagagccagcggcgggaggggacgggcgggacctccgcggacagccccgggtgcggaccagcgggcagcggccggcgagaccctccctggatccgcccagagcttaccggaccctgcgcgcccccgtcccggctcccggccggctcgggggagaaggcgcccgaggggaggcgccggacagatcgcgtttcggaggcggcgcaggtgctgtaaactgcaaaccataatcctgtcttaatactgcaaacaaatcatagtggaactaaggggaacttaatttactgtttccaggttaactaaggtctcagctgtaaaccaaaagtgagaggagacattaagattttcattcttaccgggttgtcttcttcctgaagagcaatggagccgcttttacttggaagaggactaatcgtatatctaatgttcctcctgttaaaattctcaaaagcaattgaaataccatcttcagttcaacaggttccaacaatcataaaacagtcaaaagtccaagttgcctttcccttcgatgagtattttcaaattgaatgtgaagctaaaggaaatccagaaccaacattttcgtggactaaggatggcaaccctttttatttcactgaccatcggataattccatcgaacaattcaggaacattcaggatcccaaacgaggggcacatatctcactttcaagggaaataccgctgctttgcttcaaataaactgggaatcgctatgtcagaagaaatagaatttatagttccaagtgttccaaaattcccaaaagaaaaaattgaccctcttgaagtggaggagggagatccaattgtcctcccatgcaatcctcccaaaggcctcccacctttacacatttattggatgaatattgaattagaacacatcgaacaagatgaaagagtatacatgagccaaaagggagatctatacttcgcaaacgtggaagaaaaggacagtcgcaatgactactgttgctttgctgcatttccaagattaaggactattgtacagaaaatgccaatgaaactaacagttaacagttcaaattccatcaagcaaagaaaacccaaactgctgttgcctcccactgagagtggcagtgagtcttcaattaccatcctcaaaggggaaatcttgctgcttgagtgttttgctgaaggcttgccaactccacaggttgattggaacaaaattggtggtgacttaccaaaggggagagaagcaaaagaaaattatggcaagactttgaagatagagaatgtctcctaccaggacaaaggaaattatcgctgcacagccagcaatttcttgggaacagccactcacgattttcacgttatagtagaagagcctcctcgctggacaaagaagcctcagagtgctgtgtatagcaccggaagcaatggcatcttgttatgtgaggctgaaggagaacctcaacccacaatcaagtggagagtcaatggctccccagttgacaatcatccatttgctggtgatgttgtcttccccagggaaatcagttttaccaaccttcaaccaaatcatactgctgtgtaccagtgtgaagcctcaaatgtccatggaactatccttgccaatgccaatattgatgttgtggatgtccgtccattgatacaaaccaaagatggagaaaattacgctacagtggttgggtacagtgctttcttacattgcgagttctttgcttcacctgaggcagtcgtgtcctggcagaaggtggaagaagtgaaacccctggagggcaggcggtatcatatctatgaaaatggcacattgcagatcaacagaaccaccgaagaagatgctgggtcttactcatgttgggtagaaaatgctataggaaaaactgcagtcacagccaatttggatattagaaatgctacaaaacttagagtttctcctaagaatcctcgtatccccaaattgcatatgcttgaattacattgtgaaagcaaatgtgactcacatttgaaacacagtttgaagttgtcctggagtaaagatggagaagcctttgaaattaatggcacagaagatggcaggataattattgatggagctaatttgaccatatctaatgtaactttagaggaccaaggtatttactgctgttcagctcatactgctctagacagtgctgccgatataactcaagtaactgttcttgatgttccggatccaccagaaaaccttcacttgtctgaaagacagaacaggagtgttcggctgacctgggaagctggagctgaccacaacagcaatattagcgagtatattgttgaatttgaaggaaacaaagaagagcctggaaggtgggaggaactgaccagagtccaaggaaagaaaaccacagttatcttacctttggctccatttgtgagataccagttcagggtcatagccgtgaacgaagtagggagaagtcagcctagccagccgtcagaccatcatgaaacaccaccagcagctccagataggaatccacaaaacataagggttcaagcctctcaacccaaggaaatgattataaagtgggagcctttgaaatccatggagcagaatggaccaggcctagagtacagagtgacctggaagccacagggagccccagtggagtgggaagaagaaacagtcacaaaccacacattgcgggtgatgacgcctgctgtctatgccccttatgatgtcaaggtccaggctatcaatcaactaggatctgggcctgaccctcagtcagtgactctctattctggagaagactatcctgatacagctccagtgatccatggggtggacgttataaacagtacattagttaaagttacctggtcaacagttccaaaggacagagtacatggacgtctgaaaggctatcagataaattggtggaaaacaaaaagtctgttggatggaagaacacatcccaaagaagtgaacattctaagattttcaggacaaagaaactctggaatggttccttccttagatgcctttagtgaatttcatttaacagtcttagcctataactctaaaggagctggtcctgaaagtgagccttatatatttcaaacaccagaaggagtacctgaacagccaacttttctaaaggtcatcaaagttgataaagacactgccactttatcttggggactacctaagaaattaaatggaaacttaactggctatcttttgcaatatcagataataaatgacacctacgagattggagaattaaatgatattaacattacaactccatcaaagcccagctggcacctctcaaacctgaatgcaactaccaagtacaaattctacttgagggcttgcacttcacagggctgtggaaaaccgatcacggaggaaagctccaccttaggagaagggagtaaaggtatcgggaagatatcaggagtaaatcttactcaaaagactcacccagtagaggtatttgagccgggagctgaacatatagttcgcctaatgactaagaattggggcgataacgatagcatttttcaagatgtaattgagacaagagggagagaatatgctggtttatatgatgacatctccactcaaggctggtttattggactgatgtgtgcgattgctcttctcacactactattattaactgtttgctttgtgaagaggaatagaggtggaaagtactcagttaaagaaaaggaagatttgcatccagacccagaaattcagtcagtaaaagatgaaacctttggtgaatacagtgacagtgatgaaaagcctctcaaaggaagccttcggtcccttaatagggatatgcagcctactgaaagtgctgacagcttagtcgaatacggagagggagaccatggtctcttcagtgaagatggatcatttattggtgcctacgctggatctaaggagaagggatctgttgaaagcaatggaagttctacagcaacttttccccttcgggcataaacacaacatatgtaagcaacgctactggttcaccccaaccttccatatttatctgttcaaaggagcaagaactttcatataggaatagaaacatgctggccgaagatttcatccagaagtcaacatcctgcaattatgttgaaaagagtagtactttcttcaaaatataaaatgccaagcacttcaggcctatgttttgcttatattgttttcaggtgctcaaaatgcaaaacacaaaacaaatcctgcatttagatacacctcaactaaatccaaagtccccattcagtatattccatatttgcctgattttactatttggtgtgtttgcatagatgttgctacttggtgggtttttctccgtatgcacattggtatacagtctctgagaactggcttggtgactttgcttcactacaggttaaaagaccataagcaaactggttatttaaaatgtaaaaaggaatatgaaagtcttattaaaacacttcattgaaaatatacagtctaaatttattatttaaattttactagcaaaagtcttaggtgaacaatcaactagtatttgttgagctcctatttgcccagagatggtcatatttaaacagaagtatacgtttttcagtttcaacatgaatttttttatttctgtcagttatgacatccacgagcatcactttttgtgtctgtttttttttttttcttggactaaattcaactgcatggaagcggtggtcagaaggttgttttatacgagaacaggcagaaagtgcccattgttcaggattctaatagctacatctacttaatatcttcatttctaaattgactgcttttacctttttctcatgtttatataatggtatgcttgcatatatttcatgaatacattgtacatattatgttaatatttacacaatttaaaatatagatgtgttttattttgaagtgagaaaatgaacattaacaggcatgtttgtacagctagaatatattagtaagatactgtttttcgtcattccagagctacaactaataacacgaggttccaaagctgaagactttgtataaagtatttgggttttgttcttgtattgctttctttcaacagtttcaaaataaaatatcatacaaatattg

SEQ ID NO: 3807 - DNA, 4676 bp, Homo sapiens
cggtgcccgccgtggacttcggcaacgcgcaggaggcgtaccgcagccggcgaacctgggagctggcgcggagcctgctggtgctgcgcttgtgcgcctggcccgcgctgctggcgcgccacgagcagctgctgtatgtttccaggaaacttctaggacagaggctattcaacaagctcatgaagatgaccttctatgggcattttgtagccggggaggaccaggagtccatccagcccctgcttcggcactacagggccttcggtgtcagcgccatcctggactatggagtggaggaggacctgagccccgaggaggcagagcacaaggagatggagtcctgcacctcagctgcggagagggatggcagtggcacgaataagcgggacaagcaataccaggcccaccgggccttcggggaccgcaggaatggtgtcatcagtgcccgcacctacttctacgccaatgaggccaagtgcgacagccacatggagacattcttgcgctgcatcgaagcctcaggtagagtcagcgatgacggcttcatagccattaagctcacagcactggggagaccccagtttctggtaagtgctagaaccttccacctgcagagtctggtgctgtgcgagatctcagggcagctgtgggcatccaccaaaaacacagatgcccatgccttagaggcctgagctggccacaggggctgtgtgggggactggggtgggcaggggcgtgtgcagatggcattcaggcctgcgttgcagctgcagttctcagaggtgctggccaagtggaggtgcttctttcaccaaatggctgtggagcaagggcaggcgggcctggctgccatggacaacaagctggaggtggcggtgctgcaggaaagtgtcgcaaagttgggcatcgcatccagggctgagattgaggactggttcacggcagagaccctgggagtgtctgggtgagagcagcccccaggctgagaggacacgagcatcagccatggttccagccaagccccagtgacgtctcccagtcctggctgccctgcctgagagggtgggccctgggatgacagtgctgaaggaactgcttttcacacagcaggacttgatggcttcaggagtccctgaggctggggctgggctgggcaggggagacacagggccagcacagaccccatagagggctctttatagaattatctgggtctagagcaaaggtggcactctcagccctccctggagtccacgccggcaggtgaaggatcagagccccatgccccatccttggggccaggggctgggacccaggtcaccaggagcctccagttgaagtggggaggtgactggggtggtgcagtagtgagccatcccctcacacactgccagccttgcccactgtgtcctccctggccgcccggagctgtgtccgcctcctgcctggctgcctgtgctcggcccctccacaagcccaaaacagccctagggtactcagtgttttcagagccgcctagatgcaggactgtttgtgttttggttttaaatttatttaattaatttattttttatagagaccaggtctcaccatgttgcccaggctggtttcaaacccctgggctcaagtgacctgcccgccgcagcccccaaagtgctgggattataagtttgagcccccgcatgccactggttttaaatttttaaacagaaaacaatatttatatttcctctgtcttttaaaactgaacaccgaggtgggttttgtggtgggtggtgaacggacaggtttgggcctcgatcccccacccgaccctagcacccacaggtgggggtgccccctctgctgatgcgcctcctccctcagcaccatggacctgctggactggagcagcctcatcgacagcaggaccaagctgtccaagcacttggtagtccccaacgcacaggtaacacctccgctcctcagtgaggcccagctcagcagggcgctgcgctaagaagggaattcagcctgccacgtgtgtctcttgttgcctaccctgggaacttaacatgaccaaaatcactgcacactatggccccacagaccccctgtggtccagggggaagaagacaagcccactagtgtccacagagtgcttggcgggacagagacccacgcggagccttaagacaccacaaggagagggggtctgggggccttccccaagtcatctgtcttgtgcatcaggtcaccccaaacttcagaggcctgaaacggcagcagccactctgcttctgcctcatggttctggggttgacagggctcagctgggcagtcctcccctggggtctcctgggtagctgtactcacagagtggtggcgctgggacctgggggaggcacccattcacatgtctgggagttggtgctggctgtggcttgggctttttcccaacatggcagctgggctctaagggccagtgtcccctgagacgtgagagccaggcagaagctgggtgaccttttcctgcctcgcctcagaagtcacacggtgtcttttctggcaagttctgtttgttagaagcatgtcaccaggccagcctgtatacagcggggagaggaatgagactcatctgcctgtgggaggggggcccaggacctggcagactgcttgaaaccacagcttaaactgggattcaaagaaagaacagaagcaccttcagaaaacatcctgcagaggcagctttccatgacacatctagccccagtccactaagggcccagcctcaaacttagagcccccgacccagagcctcggggcgcagtgcgtacagtgtggctgtgcaccaaggccaccagctgttggagactttagcatggtgtagcaagggatagagtggtactgtttgtgcccagtgaggcaaggctgctggggccagcaaaggggtgagcgggaggccctgcgggatgggtccccacggcctctgagcaccagcaacttgaaggcctcatcctggtggttgccctggtccctggctacgtgtcagcacgtgctgcacaactgccctgtctgcctgtagccaggggtcttcctcctgggccctctgcctgctccgggtggagcccttctgtttgacgattgggtgatcagtgttcacttgttcaatgtcacatgggagttgcagggggctctcccacaacggtggggcctctgtgggaactggggagtacacacttcggagtgcaggcctggactgagcctggggcccactgacatgggcactgagctccctcgtggtacccctaggccccgcatagggcagtgcactggctgcgttggaggttcaggggcactgtgctgcttgtccaggtggccctccctcccagccctgcacagacgggtgagagggttcctgtgggctgggaatactgagagaggtttagcctgggcctcagggtggcactttcccgcccttgctgtggcctgaccgcgtgttgcacccccagacaggacagctggagcccctgctgtcccggttcactgaggaggaggagctacagatgaccaggatgctacagcggatggatgtcctggccaagaaagccacagagatgggcgtgcggctgatggtggatgccgagcagacctacttccagccggccatcagccgcctgacgctggagatgcagcggaagttcaatgtggagaagccgctcatcttcaacacataccagtgctacctcaaggatgcctatgacaatgtgaccctggacgtggagctggctcgccgtgagggctggtgttttggggccaagctggtgcggggcgcatacctggcccaggagcgagcccgtgcggcagagatcggctatgaggaccccatcaaccccacgtacgaggccaccaacgccatgtaccacaggtgcctggactacgtgttggaggagctgaagcacaacgccaaggccaaggtgatggtggcctcccacaatgaggacacagtgcgcttcgcactgcgcaggatggaggagctgggcctgcatcctgctgaccaccaggtgtactttggacagctgctaggcatgtgtgaccagatcagcttcccgctgggccaggccggctaccccgtgtacaagtacgtgccctatggccccgtgatggaggtgctgccctacttgtcccgccgtgccctggagaacagcagcttcatgaagggcacccatcgggagcggcagttgctgtggctggagctcttgaggcggctccgaactggcaacctcttccatcgccctgcctagcacccgccagcacaccctcagcctccagcaccccccgcccccgcccaggccatcaccacagctgcagccaaccccatcctcacacagattcaccttttttcaccccacacttgcagagctgctggaggtgaggtcaggtgcctcccagccctgcccagagtatgggcactcaggtgtgggccgaacctgatacctgcctgggacagccactggaaacttttgggaactctcctcgaatgtgtgggcccaaggcccccacctctgtgacccccatgtccttggacctagaggattgtccaccttctgccaaggccagcccacacagcccgagccccttggggagcagtggccgggctggggaggcctgcctggtcaataaaccactgttcctgc

SEQ ID NO: 3808 - DNA, 12171 bp, Homo sapiens
cttggctgtctctgggagcagggctggggtacctgagtggggtgcatttggggtgtgtgggaaggagagggaaagaaagatggacagtgggactctcccctagcagggtctggtgttccgtaggctagagtgcccctctgctctgcgagtgctgggcgggaggggagttggtgagagctggagacccccaggaagggctggcagaagcctttccttttgggtgctgtcaggtccgcatgtcttggcgtgttgaccttcacagcttctggcgaggggaggaatgatctgatgcgggtggggagggttagaggaggcctcaggcctaaggtggtgcagggggccccctaggggctgggcagtgccaaggcataaaagccttccctggtccctggtggcatttgaaggtgcccaggtgagaggggcttggcacctcctcaccctgggagggagaagaaaccagggaacaggtaggagtgggagacaggtgaggctttggaaatctattgaggctctggagagatttgtgtagagaggaaaatgtggttctcccccagggtctcctcctgggtttttaccctctaagcaacctgtgggcatgctgggttattcctaaggactagaagagcttggatgggggagggtggttggtgcccttcggtcctcggcacccccctccgtctccaacaccagctcaccctggtatttgtcatgtcagcaggagaaggtcaccatgttgtttttctcgcccctagtccttccttcctgccccagtccaaatttgtcctcctatttgaccttaatacttaccatggctttggaccagggaactagggggatagtgagagcagggagagggaagtgtggggaaggtacaggggacctcgacagtgaagcattctggggttttcctcctgcatttcgagctccccagcccccaacatctggttagtctttaacttcctcgggttcataaccatagcagtccaggagtggtgggcatattctgtgcccgtggggacccccggttgtgtcctgttcgactcagaagacttggagaagccagaggctgttggtgggagggaagtgaggagggaggaggggctgggtggctgggcctgtgcaccccagcccctgcccatgcccatgccttgctctctttctgtcctcagtggtcccaggctgcacccatggcagaaggaggagggcagaatcatcacgaaggtgagtccccctggctgttggatggggttccctgtcctctcaggggatgggtggatggcctaattcctttttcttcagaactgtggggaggaaggggaaggggcacaggaatataaggatcaagaaagaaagagctgggcaccacgaggttcaccctcagtttcgtgaggactctccgctgttcaggtctctgctagaagtaggacttgttgcctttttcttctgctctttccagtaaaattttatttggagaaggagtcgtgcgcacagagcaggaagacagtgttcacggatcctaggtgttgggggaagtgtcccttgtttcccctagctcccaggggagagtggacatttagtgtcatttcctatatagacatgtcccatttgtgggaactgtaacccttcctgtgtgagctggaggcacagagggctcagcctaatgggatctcccctcccttccctggtttgcattcctttgggggtggagaaaaccccacttgactatgttcgggtgctgtgaacttccctcccaggccagcagagggctggctgtagctcccaggcgccccgcccccctgcccaaccccgagtccgcctgccttttgttccgttgtggtttggatcctcccatttctctggggacaccctggctctccccaccactgactgtggcctgtgctctccacctctggggagggaaggccctggggtcttccttcccgcgagtttccctgacctaaatctggcgtggctgggtagtggccagcagtggtgatgcccagcctgttctgcctcctccttccccaccccaggagccctttccttggcctaggacctggcttctcagccactgaccggccccctgcttccagtgcgccacttaccccttccagcttcccagtggtctctggtctgggagaggcaggacaaatggtctttgtttgctggagaaaaggttgtctgcgataaataaggaaaaccacgaaagcctggttgttggagtgtacgtgtgtgctcccccaggcagtggaggccagccctccttggaggggcggctgcctgatgaaggatgcgggtgaggttccccgcctccacctcccatgggacttggggattcattccaaggggaagctttttgggggaattcctaccccaggtctttttaccctcagttaccaaccccttgcccaggccagaccttcctgctatcccctcctgggccacaagcctggccctcctctgtcccaattgtgatgaaggggcagttcaaaacttcttgattagtcatcttctcccctatcgacttggctttaaaaaatgaccttttcagacttctagtctcgttcactctttttgatgatgctttgccgtaacccttcgtgggtagagaaggattctgtgcccattggtggtctggataaaagaaatagagacctcacaggaagcagtggactggcctgtttccccactgttctttctgttttcacacctgtggccttctccccaccttcttcccaatcaacctattgtgtacatagcccccctcattgtcctttattcttctggaaagcagaccttggagggaggagtgagggggaggctcagctgtggtctctggggggtgggggttgggagctggggtggaagtccacgaagcatacacttaagatgctttggtgaagttctaaacttcatattacccaggctgaaaaaagagcacttgttcctagggctggaaatggaagccaaaacaccacctttttcagcctgtttcagcatctttagagatcagcccaacccacttacacagttgagcagagttggaggcctagagaggggagggactggcccaaggtcataccaactcatggccagagcctgggcctcctcactggccaggtgttatttcttccctctgggtagggaacctatttcagggacaggattgctatgtggtagtggtggtggggtgcgataggcgtggcaggctgggccacaatttggagtagtcatgccagagtcctgcatttatttattctcaagggccccgcctctgtggcccagaattaccccttcatgctccagtgcaccccaggcttcgtggccagcctgggaaactgtctctaccctggtctcccttcagatcagcttctagaaatgtttcgtggctacagtggcagcactgttttttccatgatgcaagcagtttgccctcttgggcggggttatcagtggctggcagggctggcacagcgtgtccgcccactgccacctgtgggttccaggagggcccagcccctgtgctgatgcccaccaccttctcagctcatgtctggggaagaggactggcagggggaaaggtgcctcctcctgaaaggtgcctcctctgtttttgcctaatataggcttgggaacactttgatgtcagctaattctgactcctttacttactagctgtgcggccttggggcaacttacttagcctctttgagtctcctgttccccatctgtaaaatggaatctcaatagtgtctaatagtaccatgtggagaaacttgtgtgaaatgatagctgtggactactgtacacagtactcaggatgtagtaagtgctcaataaacagctgttggtatggttgacgttatggtagtggttgtggggaggacgtaggaaactggagactagcttggcaaagctggctcttcctccttttagggaaagcttagagcatccccatggggtatacccatactcagactgtcctctggcatcgaggttggcccaggattcagttcagctgtcacagtgaggtggcgggatcagatgtggcaggccatgtcccttggaacttgagtacatcgtgtgatctctggaatgaaaacaggccttcaccagtgttgatggtggaaagcttagggaagtgcttcaaacacagtaggagggacttacgttagattttggaaggacttgcctgattcagaagctccaaagagtggcattacagagctgggtggagagaggggctagccatcttttgtgtcgcccaccgggctcatgtgtcatcgcctctcatgcagtggtgaagttcatggatgtctatcagcgcagctactgccatccaatcgagaccctggtggacatcttccaggagtaccctgatgagatcgagtacatcttcaagccatcctgtgtgcccctgatgcgatgcgggggctgctgcaatgacgagggcctggagtgtgtgcccactgaggagtccaacatcaccatgcagattatgcggatcaaacctcaccaaggccagcacataggagagatgagcttcctacagcacaacaaatgtgaatgcagaccaaagaaagatagagcaagacaagaaaagtaagtggccctgactttagcacttctccctctccatggccggttgtcttggtttggggctcttggctacctctgttgggggctcccatagcctccctgggtcagggacttggtcttgtgggggacttgtggtggcagcaacaatgggatggagccaactccaggatgatggctctagggctagtgagaaaacatagccaggagcctggcacttcctttggaagggacaatgccttctgggtctccagatcattcctgaccaggacttgctgtttcggtgtgtcagggggcactgtggacactggctcactggcttgctctaggacacccacagtggggagagggagtgggtggcagagaggccagcttttgtgtgtcagaggaaatggcctcttttggtggctgctgtgacggtgcagttggatgcgaggccggctggagggtggtttctcagtgcatgccctcctgtaggcggcaggcggcagacacacagccctcttggccagggagaaaaagttgaatgttggtcattttcagaggcttgtgagtgctccgtgttaaggggcaggtaggatggggtgggggacaaggtttggcggcagtaacccttcaagacagggtgggcggctggcatcagcaagagcttgcagggaaagagagactgagagagagcacctgtgccctgccctttcccccacaccatcttgtctgcctccagtgctgtgcggacattgaagcccccaccaggcctcaaccccttgcctcttccctcagctcccagcttccagagcgaggggatgcggaaaccttccttccaccctttggtgctttctcctaagggggacagacttgccctctctggtcccttctccccctcctttcttccctgtgacagacatcctgaggtgtgttctcttgggcttggcaggcatggagagctctggttctcttgaaggggacaggctacagcctgccccccttcctgtttccccaaatgactgctctgccatggggagagtagggggctcgcctgggctcggaagagtgtctggtgagatggtgtagcaggctttgacaggctggggagagaactccctgccaagtaccgcccaagcctctcctccccagacctccttaactcccaccccatcctgctgcctgcccagggctccaggacacccagccctgcctcccagtccaggtcgtgctgagcaggctggtgttgctcttggttccgtgccagctcccaaggtagccgcttcccccacaccgggattcccagaggttctgtcgcagttgcaaatgaaggcacaaggtgcctgatacacagccctccctcccactcctgctccccatccaggcaggtctctgaccttctccccaaagtctggcctaccttttatcacccccggaccttcagggtcagacttggacagggctgctgggcaaagagccttccctcaggctttgccccctgccggggactgggagccactgtgagtgtggagacctttgggtcctgtgccctccacccagtctcggcttcccaccaaagccttgtcaggggctgggtttgccatcccatggtgggcagcgtgaggagaagaaagagccatcgagtgcttgctgcccagacacgcctgtgtgcgcccgcgcatgcctccccagagaccacctgcctcctgacacttcctccgggaagcggccctgtgtggctttgctttggtcgttcccccatccctgcccaccttaccacttcttttactccccccaccgcccccgctctctctctgtctctgtttttttattttccagaaaatcagttcgaggaaagggaaaggggcaaaaacgaaagcgcaagaaatcccggtataagtcctggagcgtgtacgttggtgcccgctgctgtctaatgccctggagcctccctggcccccagtacaacctccgcctgccattccctgtaaccctgcctccctcccctggtccctccctggctctcatcctcctggcccgtgtctctctctcactctctcactccactaattggcaccaacgggtagatttggtggtggcattgctggtccagggttggggtgaatgggggtgccgacttggcctggaggattaagggaggggaccctggcttggctgggcaccgattttctctcacccactgggcactggtggcgggcccatgttggcacaggtgcctgctcacccaactggtttccattgctctaggcttctgcactcgtctggaagctgagggtggtggggagggcagacatggcccaagaagggctgtgaatgactggaggcagcttgctgaatgactccttggctgaaggaggagcttgggtgggatcagacaccatgtggcggcctcccttcatctggtggaagtgccctggctcctcacggaggtggggcctctggaggggagccccctattctggcccaacccatggcacccacagaggcctccttgcagggcagcctcttcctccgggtcggaggctgtggtgggccctgccctgggccctctggccaccagcggcctggcctggggacactgcctccgggcttagcctcccatcacaccctactttagcccaccttggtggaagggcctggacatgagccttgcacggggagaaggtggcccctgattgccatccccagcaggtgaagagtcaaggcgtgctccgatgggggcaacagcagttgggtccctgtggcctgagactcacccttgtctcccagagacacagcattgccccttatggcagcctctccctgcactctctgcccgtctgtgcccgcctcttcctgcggcaggtgtcctagccagtgctgcctctttccgccgctctctctgtcttttgctgtagcgctcggatccttccagggcctgggggctgaccggctgggtgggggtgcagctgcggacatgttagggggtgttgcatggtgattttttttctctctctctgctgatgctctagcttagatgtctttccttttgcctttttgcagtccctgtgggccttgctcagagcggagaaagcatttgtttgtacaagatccgcagacgtgtaaatgttcctgcaaaaacacagactcgcgttgcaaggcgaggcagcttgagttaaacgaacgtacttgcaggttggttcccagagggcaagcaagtcagagaggggcatcacacagagatggggagagagagagagaaagagagtgagcgagcgagcgagcgggagagcgcctgagaggggccagctgcttgctcagtttctagctgcctgcctggtgactgctgccttctctgcttttaaggcccctgtggtgggctgcaggcactggtccagcctggcggggcctgttccgaggttgccctggttgcctgagtggtaggctggtgtggcttagtgtagtggtgtggacgcaagctgtgtgttgtgtcctgtggtccttctgctcatagtggctgttggtcctgatgttattactacctctggtagtaatgctgagaagctgaaagccgattccaggtgtggacaatgtcaacaaagcacagatgctctcgctggggccttgcctcggccctttgaagtctgcatggctgggcttctcactcactcagtgtttcttgctgggggaaggaattgagtctcccacttcagactgggcctccctgaggaaagggttgtgtctccccactcagactgaggttccctgagggtagggctgtgtctctcccctccgacctgggctccctgatagggctgtctccccgctcagactgaggctccctcaggccagggctatgtctccctcctcagactggggctctgagggcaaggggtctggctgttcgtttaggatggggcacttttgcctacacactgaaggagctgtagcatccaagaatactagatacctttaatcctccaccagtcatggtgacaaccccaagcagcccacacattttcaagtgcccccaggatgcgtggagggaggggtctgtgcccattctcctgacattagcctgtgagctccgtaagcccgggcctcgtttacgtacctttgtgagccccgggcatctgtacctctttcctttgcccatactggggaccaaggaagtgtcaagtgcatgagtgaatgtgtgactcagttcagagggtgaggtcaggagcacagggtcgggacaggtggctggcatcttttaatgccttagcttatgttctttataccaacttggcctgtgctcagagtgagggaggccctgggggtcagggtaagcgtcagtcagggaggcaagactttgtggggatttcctagacagggccaaggcacccccagctcaccccgaggctgcgttagggaagtccttggagtgtctcccctcccccagcaatgttcttgtggcttgtgtgtgctcaggggatgctgggaaccaggcctgggtagttggtgtggggtgctgtctgtcttggccctatgtgaaaccaagagggcgtatattagtgctggggtgggggctctgcctaacttcagggctggatgaggggagtctcagttccccaggggtccttgggaaagataagggacttgacattttagggtttttaggtgattattctgctgatgggggtttgtgtgaagtgacctgggagctaactgaagttactctaacctcccaatacctttacccaacccccaagctggctgtatctgggaatatcagtttccaaaattggaggcttaggactccgtttcggggctccccagaagggtagggcctgttctgcctccttctcacaatcacccaggggcaggggcatgctgagaaagttcttggaggccccctttgcttcagctggagtagtgaagccgccgaattgtctctccccatcctaagtgaagcagcatatttgaaaggaaagacaacctgttacctgggcctgcaacctccaggcagctcaagagagatgaggcctacagccacactgggaggggacatggggaatggagatggtccctcaccttcctggggcctcctgctctacgctaccccctcgggagcctcctgtccccagggcaggcccttgccattgttggtcacccggccaagcctctctgcctcaggcgttctcccagaagatctgcccactctcttccccacaccagcccctagagactgaactgaaaaccctcctcagcagggagcctcttctgattaacttcatccagctctggtcacccatcagctcttaaaatgtcaagtggggactgttctttggtatccgttcatttgttgctttgtaaagtgttcccatgtccttgtcttgtctcaagtagattgcaagctcaggagggtagactgggagcccctgagtggagctgctgctcaggccggggctccctgagggcagggctggggctgttctcatactggggctttctgccccaggaccacaccttcctgtcctctctgctcttatggtgccggaggctgcagtgacccaggggcccccaggaatggggaggccgcctgcctcatcgccaggcctcctcacttggccctaaccccagcctttgttttccatttccctcagatgtgacaagccgaggcggtgagccgggcaggaggaaggagcctccctcagggtttcgggaaccagatctctcaccaggaaagactgatacagaacgatcgatacagaaaccacgctgccgccaccacaccatcaccatcgacagaacagtccttaatccagaaacctgaaatgaaggaagaggagactctgcgcagagcactttgggtccggagggcgagactccggcggaagcattcccgggcgggtgacccagcacggtccctcttggaattggattcgccattttatttttcttgctgctaaatcaccgagcccggaagattagagagttttatttctgggattcctgtagacacacccacccacatacatacatttatatatatatatattatatatatataaaaataaatatctctattttatatatataaaatatatatattctttttttaaattaacagtgctaatgttattggtgtcttcactggatgtatttgactgctgtggacttgagttgggaggggaatgttcccactcagatcctgacagggaagaggaggagatgagagactctggcatgatcttttttttgtcccacttggtggggccagggtcctctcccctgcccaggaatgtgcaaggccagggcatgggggcaaatatgacccagttttgggaacaccgacaaacccagccctggcgctgagcctctctaccccaggtcagacggacagaaagacagatcacaggtacagggatgaggacaccggctctgaccaggagtttggggagcttcaggacattgctgtgctttggggattccctccacatgctgcacgcgcatctcgcccccaggggcactgcctggaagattcaggagcctgggcggccttcgcttactctcacctgcttctgagttgcccaggagaccactggcagatgtcccggcgaagagaagagacacattgttggaagaagcagcccatgacagctccccttcctgggactcgccctcatcctcttcctgctccccttcctgggatgcagcctaaaaggacctatgtcctcacaccattgaaaccactagttctgtccccccaggagacctggttgtgtgtgtgtgagtggttgaccttcctccatcccctggtccttcccttcccttcccgaggcacagagagacagggcaggatccacgtgcccattgtggaggcagagaaaagagaaagtgttttatatacggtacttatttaatatccctttttaattagaaattaaaacagttaatttaattaaagagtagggttttttttcagtattcttggttaatatttaatttcaactatttatgagatgtatcttttgctctctcttgctctcttatttgtaccggtttttgtatataaaattcatgtttccaatctctctctccctgatcggtgacagtcactagcttatcttgaacagatatttaattttgctaacactcagctctgccctccccgatcccctggctccccagcacacattcctttgaaataaggtttcaatatacatctacatactatatatatatttggcaacttgtatttgtgtgtatatatatatatatatgtttatgtatatatgtgattctgataaaatagacattgctattctgttttttatatgtaaaaacaaaacaagaaaaaatagagaattctacatactaaatctctctccttttttaattttaatatttgttatcatttatttattggtgctactgtttatccgtaataattgtggggaaaagatattaacatcacgtctttgtctctagtgcagtttttcgagatattccgtagtacatatttatttttaaacaacgacaaagaaatacagatatatcttaaaaaaaaaaaaagcattttgtattaaagaatttaattctgatctc

SEQ ID NO: 3809 - DNA, 4415 bp, Homo sapiens
gggtgcgccttcccggcgtctaggggagcgaaggctgaggtggcagcggcaggagagtccggccgcgacaggacgaactcccccactggaaaggattctgaaagaaatgaagtcagccctcagaaatgaagttgactgcctgctggctttctgttgactggcctggagctgtactgcaagacccttgtgagctttcctagtctaagagtaggatgtctgctgaagtcatccatcaggttgaagaagcacttgatacagatgagaaggagatgctgctctttttgtgccgggatgttgctatagatgtggttccacctaatgtcagggaccttctggatattttacgggaaagaggtaagctgtctgtcggggacttggctgaactgctctacagagtgaggcgatttgacctgctcaaacgtatcttgaagatggacagaaaagctgtggagacccacctgctcaggaaccctcaccttgtttcggactatagagtgctgatggcagagattggtgaggatttggataaatctgatgtgtcctcattaattttcctcatgaaggattacatgggccgaggcaagataagcaaggagaagagtttcttggaccttgtggttgagttggagaaactaaatctggttgccccagatcaactggatttattagaaaaatgcctaaagaacatccacagaatagacctgaagacaaaaatccagaagtacaagcagtctggtggatggaatggaacctggatgaccaaagcctcctttagcttgtggctagaaatcgcgtccctttatattcttcatatcccagatctgccaactccattgccctgtatattcatgatctctgcaaaatgctgccaagcagttcttaacatttcagtcttcaagaaagaatctgggatctgcacaggctggcagagctatggacattcaggggttttgcatgtatgctgaaccctactgccttgctctggtatttggcctcacaaccactgtccaacttcgggtgatgtcacttgggtctcataccttccttgcatgtgtcccaagtttcacaaaacctccttatggaaaagagcacattcgatttcttccttgataaaagggaccagattcacattggccttctgctttacttgcattcctcattgtcttttagactcagcctcagcttgggctttgttagcaagttcactgccaccatagcatcacagcctaaagggcatggctgagactcattgatctatagagcactcttttaccccaacatactctaaatgactgatcaaagatcaaaaacagaagagcatttatactccattcttgttttttgagacctgcttgatttattccgattatttaacacacagggacgcaacagtgatcccaaagtgtgtaaagttaaagccttcaactgcagctgaggagagggcaggaatggggacggtggtgagtcaggaatgacaggcaggcagccatgaccagggcagcctcctccccagggccagggactggggagtggcctaaggagcaggacctaagggtagcccagagctggggaagggggcagagacctccccttggcctaggtctggagctcagaagtgccacatgcctgagggggcagcggcctgggaagggccagaggcagggtcaggagagcaccatttcctggggggctggggacagggaggtgccctataggagaagccaggaggggccgtctgcccctgaggtgggggctgggctggagcaggctgcagcaagaaagacctgaggcaggcacagggcctgagagcccagctgcctgggttcaggggggctcccagggcagcctggcccagggagcagtcctgactctgcaggggatgcccagcaaggggggctgcagacccctcagagcctcccctcctctctccctggaaaggagctggggaacccatagtgcaaatctgtggaccactcagttatggagggaggctgtgcctgaaggtggacactggggtgcactccctccaccatctcgccctgcaccgctgtcctcagtacagccacttctcgtaagagtgcaggccatggatgccaccgtcgatctgggctgacatggtctgcttctcaaacttgagctcccctgagtacatcatggaccgaaggacagacaggctgtgggccccgatatcctggcagccatgctggatgcccactatgaggtagggcacgaacttctgaatggaccctttgtcctggatggagcccaagacatcctgcgtgatcttcgccttatccccgtcgttgaagtattgtttctggctgctgctgctcttctccatggcatccagtgagcccatgccctggtacttcttgagctgcattccgtctgagaagaagcactcgccgggggcctccatggtggcggccagcagggagcccatcatcactgtggaggctcctagggccagggccttgaccacatgccccatggtctggatgccaccatcggctatgatgggcacaccaaagttctgggtatgcttggccaccttgtacacagcagtgccctggggctgactgcaggctatcacttcctggttgatgtagatggagccgcgcagtccatgcccctgcccagcccatccacaccagcgtcaatcaggttgttggcctgggctgctgtcaccacgttccccccaatcacctggaggtggggttacttttgtttgatgtaatgcaccatggcgatctgatacaccgagttcccttgggacgagtccaagcctatgacattgacgcctacctgggtgagcaggtccaggcggtatttgtcatcctcatgggtacccacagctgccccgcccagcagctgctcatgggaatccttggaggccacagggtagtctcggttcttcagcgcggtgcaggtgataatggccaccagctcatcgcgatcattgacgataggcagcttcctttcttgctaagctgcaggatctcatttgcctctttcaacctcacactgctggagccaccactagcttgatccttggcatcatcacctcactgaggagggtggtgtggtccttctcagcaagaaagtcgatgtctcgggaggtgacgatgcccaccagcttgctgcccatggtacccgtctcagtgatggggatgccagagaagccatgacgcatcttggcctccaacacatcacccacagtgtgcaaggggctcagcaccacggggtgtgtgataaagcccggttcaaacttcttgaccttctgcacctcactggcctggaactctggggtgcagttgtggtgaatgaaaccagtacctcccatcagagccatcacgatggccaggtcggcctctgtcacagtgtccatgggggaggagatcagcggcgtcttcagagtgaccattgggtcagggctgaggtcaggtccacctcatcagctatgaagtctatgaatcctgggagaatcaagaagtcgttgtaggtgagtccctggtcactggcgaagagctgctgcacggtgtggggaaaagaaagagagatcagattgttactgggtctgtatagaaagaagtagacataggagactccattttgttctgtactaagaaaaattcttctgcctcgagatgctgttaatctgtaaccttacccccaaccctgtgctccctgaaacatgtgctatgtcaactcagggttaagtggattaagggctgtgcaagatgtgctttgttaaacagatgcttgaaggcagcgtgctcgttaagagtcatcaccactccctaatctcaagtacccagggacacaaacactgcggaaggccgcagggacctctgcctaggaaagccaggtattgtccaaggtttctccccatgtgatagtctgaaatatggcctcatgggaagggaaagacctgaccgtcccccagcccgacacccataaagggtctgtgctgaggaggattagtaaaagaggaaggaacgcctctttgcagttgagagaagaggaaggcatctgtctcctgccagtccctgggcaatggaatgtctcggtgtaaaacctgattgtatgttccatctgctgagataggggaaaaccgccttagggctggaggtgggacatgcgggcagcactactgctctttaagtcattgagatgtttatgtgtatgcatatctgaagcacagcacttaattctttaccttgttcttgatgcagagacctttgttcacgtgtttatctgctgaccttctctccactattattctatgaccctgccacacccccctctccgagaaacacctaaaaatgatcaataaatactaagggaactaagaggccggcgggatcctccgtatgctgaacgccggtcccctgggcccccttttttctttctct

SEQ ID NO: 3810 - DNA, 5450 bp, Homo sapiens
caactgctgaggctgccttgggaagaggatgatcctaaacaaagctctgctgctgggggccctcgctctgaccaccgtgatgagcccctgtggaggtgaagacattgtggctgaccacgttgcctcttgtggtgtaaacttgtaccagttttacggtccctctggccagtacacccatgaatttgatggagatgagcagttctacgtggacctggagaggaaggagactgcctggcggtggcctgagttcagcaaatttggaggttttgacccgcagggtgcactgagaaacatggctgtggcaaaacacaacttgaacatcatgattaaacgctacaactctaccgctgctaccaatgaggttcctgaggtcacagtgttttccaagtctcccgtgacactgggtcagcccaacaccctcatttgtcttgtggacaacatctttcctcctgtggtcaacatcacatggctgagcaatgggcagtcagtcacagaaggtgtttctgagaccagcttcctctccaagagtgatcattccttcttcaagatcagttacctcaccttcctcccttctgctgatgagatttatgactgcaaggtggagcactggggcctggaccagcctcttctgaaacactggggtaaggatgagtttcatcattttttgattctttcttgtctgtcaagttcagaacttcctgccttttactcctatatccaaaaacttgttttccacacttcatgggtttcttttctgtctctcttttttttttgaaagaataaagcaaaaaaagcagagatttattgaaaatgaaagtacactctacaggatgggagtgggcctgccacttcatggttttctaatgatagacttcactcttctccctaagcctggggccttgagtctttgcagagccaaccctctaccccatcccatcccacacacatgcacatgagcacactctgcattctgacctcaacaacttcacttccacagagcctgagattccagcccctatgtcagagctcacagagactgtggtctgtgccctggggttgtctgtgggcctcatgggcattgtggtgggcactgtcttcatcatccaaggcctgcgttcagttggtgcttccagacaccaagggccattgtgaatcccatcctggaagggaaggtaagattgagactggttacagttgaagcggcagtatgaaaggaaggaaagtgggagggcgttgtggacatgaatgtggttgaaagttgtaggggaattgggaagtggcatgatgatgacacaggagccccctcggacccattgatctcatgtctgccctgttgcaggtgcatcgccatctacaggagcagaagaatggacttgctaaatgacctagcactattctctggcccgatttatcatatcccttttctcctccaaatatttctcctctcaccttttctctgggacttaagctgctatatcccctcagagctcacaaatgcctttacattctttccctgacctcctgattttttttttcttttctcaaatgttacctacaaagacatgcctggggtaagccacccggctacctaattcctcagtaacctccatctaaaatctccaaggaagcaataaattccttttatgagatctatgtcaaatttttccatctttcatccagggctgactgaaactatggctaataattggggtactcttatgtttcaatccaatttaacctcatttcccagatcatttttcatgtccagtaacacagaagccaccaagtacagtatagcctgataatatgttgatttcttagctgacattaatatttcttgcttccttgtgttcccacccttggcactgccacccacccctcaattcaggcaacaatgaaattaatggataccgtctgcccttggcccagaattgttatagcaaaaattttagaaccaaaaaataagtctgtactaatttcaatgtggcttttaaaagtatgacagagaaataagttaggataaaggaaatttgaatctcaaaaatatcaaaagtaaaaatgtattctcaaaactttaaatttatgaagaatgatgacagtagaagccttcctcttcccttgtcaccttgagataaaaattctttaggcaggaaaagaaatggaagtcagaaaaacattagaataagacaataatgtgggtgtctgaaaaggaacaaatacttattcctcacatagggttagtgacaatgggaaaagggacgggagtagaagccacagacatatctaggagccctgaatagaggcgcagtctgcctcacctcctgaatgaagctgtactagataaccatgtagctttccctgtgccactctggcatgaaggagacagtatagtgaatatggctacaggatgtttcttggaaacatgccaatatcttcagaaatccccagccctttcccctaacccctcctgactaaggaaagcatgagcttatgagagaaaccctaggaagaacaacacagttgagacaatgtagcagcagcagtgggtgctgtgtcctccactggattcgccatctccgaggagaaactctcacagaggaaatgggtcagcagcgacctcatggctctaaacagctatgaaatccatgaggatatttctaaccatgctacctgcatcagtgagtttaaattttaattggagaaaaaatacaaaacattaatgcaataattgatacagtatagtttggtgcaaagaaccctaaatccaaatccaggactcagtactttgaagctagtattttaaactttataaatgtgtgaagtctctaacatttctggccttacttttctcatccacaatgtaggagtaataatactttccttgcagagttattgataaaatttgaataattttgatatttagtcaatgccttacacatagtacatgaacacataagaaaacattgtggttatatttataattaatttatttaaaagaatggatcatattatatgaaaagcacttttgtttttctcagcctcttaatgatttaggagattcaaatgtagagctatgggtgaatttcttttcatatgataattgaaggatatttttctttttccagaatgagagaggctgagattggattggtaagagaactcttagcactagaagttgtaatatttgactttggttttcaactctctaagagggaatatattccctccttatggcccataagtgtttattcaaggtatatcatatacaacagatctttatgcctgtttactttggggaagaagtgaagatagttcaaggagaaaataatttaaaacacagactgggaatcagtaagcacaggaaatctgaaccagtgatgatcatgaaaatgtccatcacagagcacagatgattttcagggcaataaaactattctgtttgataccacaatggtgaaaaatgtcattatacatttgctcaaatccacagaatatataacaccaagagttagacttaatgtaaactatggactttgggtgataatgatgtgccaatgtaagttcataaattatagcaaatgtaccactcagatgggagatgttgctaatgggggaggctatgcatgtgtgggagcagagtgtatctggcagcagtccccagcctttttggcagcagggaccagttttatggaagacaatttttccacagatagttgggggaatgggggtatgatctggggatgaaactgtgaaactattccacctcagatcaacaagcattagttagattctcataaggaacatgcaacctagatctcttgcatgcacagttaaaaatagggttcgcactcctatgagaatctaatgccaccactgatctgacggaaggcggggctcagttggtaatgctggctcacccactgcgtggtccagtttctaacaggccaccaactggtactggtccatggcccgggggttggggacctctgggatacctctgcaccttctgctcagtttttctgtgaacctacaaccgctttaaaataaggtctatttttaaaaaggaaaagagaaggtaaccaattatgatcctaaatgtgtaaaataaaaattttagtatgaaaaacagtcacattaaaatgcacaacgtgctaagaagcttttagcaatagggtttcaaatatatttcatatacatttcaatgattcgtgaggcaagaacccagcattttggagttgtgtgcatttgtgtgtgtgtgtgtgtgtgtgtgtgtgtgtctgtaatataaggggtatactgaatggcataatgaccagagtcatgcagaaatctacaaatgctgcccaactcagactccttcctcaagcagcactgtggaaagcaaatttaatgatagcagtattttattaaaaggatgtattcaaaaaatatttacgtaatgttaaaatagcagaattaaaactaattctaaaaaataagagtaaatagttctttttatcagctaaaaatgtagggcctactatcaatagggttacagatctacctgcctgatttaaaatcatgcaattcttaaacaattatttgagctatttgaattatttcagattacacacataaagtgtgacttcattaatacttaatatcacactatttaaaatttacaaaattagtgggtcacagaggctcgtgcttgtgatcttagcactttggaggccaataggggaggattgcttgaagccaggagttcaacagctgcctgggcaacaaagcaagaccttgtctctacaacacaaaaataaattaatgcatggcggcactcctgtagtcccagctactctagaggctgaggcaagaggagtgcttgagcccaggagttcaatacttcagtgggctaagattgtgccactgtgctcactccagcctaggcagcagagcaggactccatctctaaaagtaaataaataaataaaacttacaaaattttaaaaatcaaatgaaatatgtcaggtttgtacctaccacatttaaactagggacttgaagaattaaacattttattacaaatgaagcacttcatgcacagactggcacatagtaagtagtcgataggtgttaacaatttgtgttattgttattttctggagtccaactaacaaatcccacagtgaatgacatcacagggatgcaaccaacaagatccagaatatggaaacttctactagataaacaactccatttcttcagcaacaattcaagagagagagagaagagaagctatacattttaaaaggctgaagaaatatatgaaccaaatttgtatgaggcaatcagaaaaactgacaccgactgtattaaggaattatctaattttagtgtggtaatgagattgctgttatgttttctaaaaagtcattatactttagattttcataataaaataattatgaatg

SEQ ID NO: 3811 - DNA, 4290 bp, Homo sapiens
gaaaaaaggaacccaaggagataggagagctgttaatttcactcgggacatttcctcgaggctagtttactcggaaagcctcaatgttccctggtagctgcaggatctactttgggggctgccaagtttcctctctcattctttctcctgccccaagagcaggcaggaaggaaagttcctggactgatactcgtctgtttagtaggcgtgggtcctggttgaagtctgtctaggaaaactcctaagtgtagaaatcttcttcgtattaccactgtctctgcactgagatttgggctgctttgcttccagcgtcacacatcataactgagaaagataaaaactctccagatgtcttccagtaatgtcgaagtttttatcccagtgtcacaaggaaacaccaatggcttccccgcgacagcttccaatgacctgaaggcatttactgaaggagctgtgttaagttttcataacatctgctatcgagtaaaactgaagagtggctttctaccttgtcgaaaaccagttgagaaagaaatattatcgaatatcaatgggatcatgaaacctggtctcaacgccatcctgggacccacaggtggaggcaaatcttcgttattagatgtcttagctgcaaggaaagatccaagtggattatctggagatgttctgataaatggagcaccgcgacctgccaatttcaaatgtaattcaggttacgtggtacaagatgatgttgtgatgggcactctgacggtgagagaaaacttaaagttctcagcagctcttcggcttgcaacaactatgacgaatcatgaaaaaaacgaacggattaacagggtcattcaagagttaggtctggataaagtggcagactccaaggttggaactcagtttatccgtggtgtgtctggaggagaaagaaaaaggactagtataggaatggagcttatcactgatccttccatcttgttcttggatgagcctacaactggcttagactcaagcacagcaaatgctgtccttttgctcctgaaaaggatgtctaagcagggacgaacaatcatcttctccattcatcagcctcgatattccatcttcaagttgtttgatagcctcaccttattggcctcaggaagacttatgttccacgggcctgctcaggaggccttgggatactttgaatcagctggttatcactgtgaggcctataataaccctgcagacttcttcttggacatcattaatggagattccactgctgtggcattaaacagagaagaagactttaaagccacagagatcatagagccttccaagcaggataagccactcatagaaaaattagcggagatttatgtcaactcctccttctacaaagagacaaaagctgaattacatcaactttccgggggtgagaagaagaagaagatcacagtcttcaaggagatcagctacaccacctccttctgtcatcaactcagatgggtttccaagcgttcattcaaaaacttgctggttaatccccaggcctctatagctcagatcattgtcacagtcgtactgggactggttataggtgccatttactttgggctaaaaaatgattctactggaatccagaacagagctggggttctcttcttcctgacgaccaaccagtgtttcagcagtgtttcagccgtggaactctttgtggtagagaagaagctcttcatacatgaatacatcagcggatactacagagtgtcatcttatttccttggaaaactgttatctgatttattacccatgaggatgttaccaagtattatatttacctgtatagtgtacttcatgttaggattgaagccaaaggcagatgccttcttcgttatgatgtttacccttatgatggtggcttattcagccagttccatggcactggccatagcagcaggtcagagtgtggtttctgtagcaacacttctcatgaccatctgttttgtgtttatgatggtctgttggtcaatctcacaaccattgcatcttggctgtcatggcttcagtacttcagcattccacgatatggatttacggctttgcagcataatgaatttttgggacaaaacttctgcccaggactcaatgcaacaggaaacaatccttgtaactatgcaacatgtactggcgaagaatatttggtaaagcagggcatcgatctctcaccctggggcttgtggaagaatcacgtggccttggcttgtatgattgttattttcctcacaattgcctacctgaaattgttatttcttaaaaaatattcttaaatttccccttaattcagtatgatttatcctcacataaaaaagaagcactttgattgaagtattcaatcaagtttttttgttgttttctgttcccttgccatcacactgttgcacagcagcaattgttttaaagagatacatttttagaaatcacaacaaactgaattaaacatgaaagaacccaagacatcatgtatcgcatattagttaatctcctcagacagtaaccatggggaagaaatctggtctaatttattaatctaaaaaaggagaattgaattctggaaactcctgacaagttattactgtctctggcatttgtttcctcatctttaaaatgaataggtaggttagtagcccttcagtcttaatactttatgatgctatggtttgccattatttaataaatgacaaatgtattaatgctatactggaaatgtaaaattgaaaatatgttggaaaaaagattctgtcttatagggtaaaaaaagccaccgtgatagaaaaaaaatctttttgataagcacattaaagttaatagaacttactgatattcctgtctagtggtataatatctcaggaatcttggctgagggtttggaactgtgggtagagtagagggccaggagtccagtaatagaattcttgcaccatttctggaacattctagctctgggaggtcacgtaaccttcttggggtagttcagtggtttagtggtttataatccaggtgtgcgtcagaatcatctgaggaactttgctaaaatacaaaaatctggcctaagtagctccagatctaccttcataaaggaatctgaccactcctggatttggtaatttccaagttctgaaaattttacttaggatttaataactattaacatctgtccctacataggttttctttcctacttatataccttatgttctcttcattctaaccttcatcagtaatagggaaatgttttaattttatttttttagttgaagggtaatgtaccaaaaaatatagttcagtgaattaaaatgaacacacatgtgcaaccatcaattcaggtcaagaaatagaagattgtagcacacaaaagcctactcagccattctcccagtcactacttccttccttacccctgggttatttttgaaatgacacttgatgtatttccctctgttgctgttatgagaacattgctacagccaagtgttgtgtttctgtgtgcataggttgatacttaattatctccccactttttaataaacttttaatttggaaataattttagattgacagaaaagttgcaaagatagtgaggaaagttcctgtctactctttgctcagcttcccttaatgttaacattttatatagcaagatgcatttgtcaaagctaacaagttaacattggtacaatcactgttaattaaactgcacacaatattcagatttcaccacttttccactaatattctttcattgttctaggattcaattcaggagaccacatttcatctagccctcttttttaaaagtaaatacttttcagcacttacaggagttaactgagctggggcatcatggtgtatagacgccctgacactggtcatcttggaattcatttagtttgtcagtgggtgccctgacattctgtcacaacatcaatttgggaacatggcattatatttttatctttgaacttttttctttttggatgacatttgattaatgcgtcatcttggaacacattatcttttttcttggttatgtgatcaggaagattaatcagtttttcctgttcttggtataattcctgcttttcacatacctgtcccttacagttctctatatatacccttcccttattacacagagagaaatatctatctatactttttacacaaaatatacttcaaaagaaacaaaacagccacaattattaactttttaaataaatgagaatttaattatatcctaaaaaaaaaaaaaaa

SEQ ID NO: 3812 - DNA, 1375 bp, Homo sapiens
aacaccacccagtgtggagcagcccagccaagcactgtcaggaatcctgtgaagcagctccagctatgtgtgaagaagaggacagcactgccttggtgtgtgacaatggctctgggctctgtaaggccggctttgctggggacgatgctcccagggctgttttcccatccattgtgggacgtcccagacatcagggggtgatggtgggaatgggacaaaaagacagctacgtgggtgacgaagcacagagcaaaagaggaatcctgaccctgaagtacccgatagaacatggcatcatcaccaactgggacgacatggaaaagatctggcaccactctttctacaatgagcttcgtgttgcccctgaagagcatcccaccctgctcacggaggcacccctgaaccccaaggccaaccgggagaaaatgactcaaattatgtttgagactttcaatgtcccagccatgtatgtggctatccaggcggtgctgtctctctatgcctctggacgcacaactggcatcgtgctggactctggagatggtgtcacccacaatgtccccatctatgagggctatgccttgccccatgccatcatgcgtctggatctggctggccgagatctcactgactacctcatgaagatcctgactgagcgtggctattccttcgttactactgctgagcgtgagattgtccgggacatcaaggagaaactgtgttatgtagctctggactttgaaaatgagatggccactgccgcatcctcatcctcccttgagaagagttacgagttgcctgatgggcaagtgatcaccatcggaaatgaacgtttccgctgcccagagaccctgttccagccatccttcatcgggatggagtctgctggcatccatgaaaccacctacaacagcatcatgaagtgtgatattgacatcaggaaggacctctatgctaacaatgtcctatcagggggcaccactatgtaccctggcattgccgaccgaatgcagaaggagatcacggccctagcacccagcaccatgaagatcaagatcattgcccctccggagcgcaaatactctgtctggatcggtggctccatcctggcctctctgtccaccttccagcagatgtggatcagcaaacaggaatacgatgaagccgggccttccattgtccaccgcaaatgcttctaaaacactttcctgctcctctctgtctctagcacacaactgtgaatgtcctgtggaattatgccttcagttcttttccaaatcattcctagccaaagctctgactcgttacctatgtgttttttaataaatctgaaataggctactggcaaaaaaaaaaaaaaaaaaaaaaaaaaaaa

SEQ ID NO: 3813 - DNA, 1224 bp, Homo sapiens
agttcgcccgttcctggcctgacccccaccaaggcccataccgcagtaggctcctcgggctgcccctcggttgacaatggtctccaggatggtctctaccatgctatctggcctactgttttggctggcatctggatggactccagcatttgcttacagcccccggacccctgaccgggtctcagaagcagatatccagaggctgcttcatggtgttatggagcaattgggcattgccaggccccgagtggaatatccagctcaccaggccatgaatcttgtgggcccccagagcattgaaggtggagctcatgaaggacttcagcatttgggtccttttggcaacatccccaacatcgtggcagagttgactggagacaacattcctaaggactttagtgaggatcaggggtacccagaccctccaaatccctgtcctgttggaaaaacagatgatggatgtctagaaaacacccctgacactgcagagttcagtcgagagttccagttgcaccagcatctctttgatccggaacatgactatccaggcttgggcaagtggaacaagaaactcctttacgagaagatgaagggaggagagagacgaaagcggaggagtgtcaatccatatctacaaggacagagactggataatgttgttgcaaagaagtctgtcccccatttttcagatgaggataaggatccagagtaaagagaagatgctagacgaaaacccacattacctgttaggcctcagcatggcttatgtgcacgtgtaaatggagtccctgtgaatgacagcatgtttcttacatagataattatggatacaaagcagctgtatgtagatagtgtattgtcttcacaccgatgattctgctttttgctaaattagaataagagcttttttgtttcttgggtttttaaaatgtgaatctgcaatgatcataaaaattaaaatgtgaatgtcaacaataaaaagcaagactatgaaaggctcagatttcttgcagtttaaaatggtgtctgaggttgtactattttggccaagtctgtagaaagctgtcatttgattttgattatgtagttcatccagcccttgggcattgttatacaccagtaaagaaggctgtactcaagaggaggagctgacacatttcacttggctgcgtcttaataaacatgaatgcaagcaaaaaaaaaaaaaaaaaaaaaaaaaaaaaa

SEQ ID NO: 3814 - DNA, 1782 bp, Homo sapiens
aaaccagttgtttccgtcttgtcggtctgtcagggttggaaagtccaagccataggacccagtttcctttcttagcttacgttatctaccagagcaccgtgggctgttacttgccttgagttggaagcggttcgcatttataccggaatataaatagtttctggaaaggacactgacaacttcaaagcaaaatgaagctcttttggttgcttttcaccattgggttctgctgggctcagtattcctcaaatacacaacaaggacgaacatctattgttcatctgtttgaatggcgatgggttgatattgctcttgaatgtgagcgatatttagctcccaagggatttggaggggttcaggtctctccaccaaatgaaaatgttgccattcacaaccctttcagaccttggtgggaaagataccaaccagttagctataaattatgcacaagatctggaaatgaagatgaatttagaaacatggtgactagatgcaacaatgttggggttcgtatttatgtggatgctgtaattaatcatatgtgtggtaatgctgtgagtgcaggaacaagcagtacctgtggaagttacttcaaccctggaagtagggactttccagcagtcccatattctggatgggattttaatgatggtaaatgtaaaactggaagtggagatatcgagaactataatgatgctactcaggtcagagattgtcgtctgtctggtcttctcgatcttgcactggggaaggattatgtgcgttctaagattgccgaatatatgaaccatctcattgacattggtgttgcagggttcagaattgatgcttccaagcacatgtggcctggagacataaaggcaattttggacaaactgcataatctaaacagtaactggttcccggaaggtagtaaacctttcatttaccaggaggtaattgatctgggtggtgagccaattaaaagcagtgactactttggtaatggccgggtgacagaattcaagtatggtgcaaaactcggcacagttattcgcaagtggaatggagagaagatgtcttacttaaagaactggggagaaggttggggtttcatgccttctgacagagcgcttgtctttgtggataaccatgacaatcaacgagggcatggcgctggaggagcctctatacttaccttctgggatgctaggctgtacaaaatggcagttggatttatgcttgctcatccttatggatttacacgagtaatgtcaagctaccgttggccaagatattttgaaaatggaaaagatgttaatgattgggttgggccaccaaatgataatggagtaactaaagaagttactattaatccagacactacttgtggcaatgactgggtctgtgaacatcgatggcgccaaataaggaacatggttaatttccgcaatgtagtggatggccagccttttacaaactggtatgataatgggagcaaccaagtggcttttgggagaggaaacagaggattcattgttttcaacaatgatgactggacattttctttaactttgcaaactggtcttcctgctggcacatactgtgatgtcatttctggagataaaattaatggcaactgcacaggcattaaaatctacgtttctgatgatggcaaagctcatttttctattagtaactctgctgaagatccatttattgcaattcatgctgaatctaaattgtaaaatttaaaattaaatgcaaatccacaaaaaaaaaaaaaaaaaaaaaaaaaaaaaa

SEQ ID NO: 3815 - DNA, 1363 bp, Homo sapiens
gtaggagcctctctccctactgctgctacacaagaccctgagactgacctgcaggacgaaaccatgaagagcctgatccttcttgccatcctggccgccttagcggtagtaactttgtgttgtgaatcacatgaaagcatggaatcttatgaacttaatcccttcattaacaggagaaatgcaaataccttcatatcccctcagcagagatggagagctaaagtccaagagaggatccgagaacgctctaagcctgtccacgagctcaatagggaagcctgtgatgactacagactttgcgaacgctacgccatggtttatggatacaatgctgcctataatcgctacttcaggaagcgccgagggaccaaatgagactgagggaagaaaaaaaatctctttttttctggaggctggcacctgattttgtatccccctgtagcagcattactgaaatacataggcttatatacaatgcttctttcctgtatattctcttgtctggctgcacccctttttcccgcccccagattgataagtaatgaaagtgcactgcagtgagggtcaaaggagagtcaacatatgtgattgttccataataaacttctggtgtgatactttcatcttgtaaatctgctttcttttgggaagatattgagatatttaaatcatggcccaccttacccaaaataggagattctgttcatctcatatctagtattaattagaaaaataactacataaaaagaaggaagctaagaaggcactcactcagccataaattctctaaaccctctctaccttggaatccgtgaatggaatctggtatgttttttgcaggattttcctattgtaaattgtggcaaatacagggctcccttcatttgcttttcatctcttatgcatcaaagtcaaaaacatttctgaatcaagataatctagaagagaaaaaaggaggaaaaggaaaagagaaagcagaagggacaaataaaagcaattggcaaaaactgtcaataatagtttatacacttaactatatcaataatcacattatatgtaaatagtctaaacaatccaattattttttacttctacttatgttatatttttacttctacatttgttaaaggttccacgctacatttttactattcttgctttaaataattttaataatttcttttaaagtttagataataagaaaatatcccgggccaggcacagtggccacacctgtaatctcagtagccatgaccataccaatgcactccagcctgtgaaacagagtgagactctgtctctacagaaaaataaaaaagaaaagaaagaaaaggaaaaaaaaaaaaaaaaaaaaaaaaaaaaa

SEQ ID NO: 3816 - DNA, 7185 bp, Homo sapiens; identical to SEQ ID NO: 160

SEQ ID NO: 3817 - DNA, 1247 bp, Homo sapiens
gaccagcctacagccgcctgcatctgtatccagcgccaggtcccgccagtcccagctgcgcgcgccccccagtcccgcacccgttcggcccaggctaagttagccctcaccatgccggtcaaaggaggcaccaagtgcatcaaatacctgctgttcggatttaacttcatcttctggcttgccgggattgctgtccttgccattggactatggctccgattcgactctcagaccaagagcatcttcgagcaagaaactaataataataattccagcttctacacaggagtctatattctgatcggagccggcgccctcatgatgctggtgggcttcctgggctgctgcggggctgtgcaggagtcccagtgcatgctgggactgttcttcggcttcctcttggtgatattcgccattgaaatagctgcggccatctggggatattcccacaaggatgaggtgattaaggaagtccaggagttttacaaggacacctacaacaagctgaaaaccaaggatgagccccagcgggaaacgctgaaagccatccactatgcgttgaacttgctgtggtttggctgggggcgtggaacagtttatctcagacatctgccccaagaaggacgtactcgaaaccttcaccgtgaagtcctgtcctgatgccatcaaagaggtcttcgacaataaattccacatcatcggcgcagtgggcatcggcattgccgtggtcatgatatttggcatgatcttcagtatgatcttgtgctgtgctatccgcaggaaccgcgagatggtctagagtcagcttacatccctgagcaggaaagtttacccatgaagattggtgggattttttgtttgtttgttttgttttgtttgttgtttgttgtttgtttttttgccactaattttagtattcattctgcattgctagataaaagctgaagttactttatgtttgtcttttaatgcttcattcaatattgacatttgtagttgagcggggggtttggtttgctttggtttatattttttcagttgtttgtttttgcttgttatattaagcagaaatcctgcaatgaaaggtactatatttgctagactctagacaagatattgtacataaaagaatttttttgtctttaaatagatacaaatgtctatcaactttaatcaagttgtaacttatattgaagacaatttgatacataataaaaaattatgacaatgtcaaaaaaaaaaaaaaa

SEQ ID NO: 3818 - DNA, 2934 bp, Homo sapiens; identical to SEQ ID NO: 1717

SEQ ID NO: 3819 - DNA, 4445 bp, Homo sapiens; identical to SEQ ID NO: 1548

SEQ ID NO: 3820 - DNA, 2164 bp, Homo sapiens
ataaatatcagagtgtgctgctgtggctttgtggagctgccagagtaaagcaaagagaaaggaagcaggcccgttggaagtggttgtgacaaccccagcaatgtggagaagcctggggcttgccctggctctctgtctcctcccatcgggaggaacagagagccaggaccaaagctccttatgtaagcaacccccagcctggagcataagagatcaagatccaatgctaaactccaatggttcagtgactgtggttgctcttcttcaagccagctgatacctgtgcatactgcaggcatctaaattagaagacctgcgagtaaaactgaagaaagaaggatattctaatatttcttatattgttgttaatcatcaaggaatctcttctcgattaaaatacacacatcttaagaataaggtttcagagcatattcctgtttatcaacaagaagaaaaccaaacagatgtctggactcttttaaatggaagcaaagatgacttcctcatatatgatagatgtggccgtcttgtatatcatcttggtttgcctttttccttcctaactttcccatatgtagaagaagccattaagattgcttactgtgaaaagaaatgtggaaactgctctctcacgactctcaaagatgaagacttttgtaaacgtgtatctttggctactgtggataaaacagttgaaactccatcgcctcattaccatcatgagcatcatcacaatcatggacatcagcaccttggcagcagtgagctttcagagaatcagcaaccaggagcaccaaatgctcctactcatcctgctcctccaggccttcatcaccaccataagcacaagggtcagcataggcagggtcacccagagaaccgagatatgccagcaagtgaagatttacaagatttacaaaagaagctctgtcgaaagagatgtataaatcaattactctgtaaattgcccacagattcagagttggctcctaggagctgatgctgccattgtcgacatctgatatttgaaaaaacagggtctgcaatcacctgacagtgtaaagaaaacctcccatctttatgtagctgacagggacttcgggcagaggagaacataactgaatcttgtcagtgacgtttgcctccagctgcctgacaaataagtcagcagcttatacccacagaagccagtgccagttgacgctgaaagaatcaggcaaaaaagtgagaatgaccttcaaactaaatatttaaaataggacatactccccaatttagtctagacacaatttcatttccagcatttttataaactaccaaattagtgaaccaaaaatagaaattagatttgtgcaaacatggagaaatctactgaattggcttccagattttaaattttatgtcatagaaatattgactcaaaccatattttttatgatggagcaactgaaaggtgattgcagcttttggttaatatgtctttttttttctttttccagtgttctatttgctttaatgagaatagaaacgtaaactatgacctaggggtttctgttggataattagcagtttagaatggaggaagaacaacaaagacatgctttccatttttttctttacttatctctcaaaacaatattactttgtcttttcaatcttctacttttaactaataaaataagtggattttgtattttaagatccagaaatacttaacacgtgaatattttgctaaaaaagcatatataactattttaaatatccatttatcttttgtatatctaagactcatcctgatttttactatcacacatgaataaagcctttgtatctttctttctctaatgttgtatcatactcttctaaaacttgagtggctgtcttaaaagatataaggggaaagataatattgtctgtctctatattgcttagtaagtatttccatagtcaatgatggtttaataggtaaaccaaaccctataaacctgacctcctttatggttaatactattaagcaagaatgcagtacagaattggatacagtacggatttgtccaaataaattcaataaaaaccttaaagctgaaaaaaaaaaaaaaaaaaaaaaaaaaaaaaaaaaaaaaaaaaaaaaaaaaaaaaaaaaaaaaaaaaaaaaaaaaaaaaa

SEQ ID NO: 3821 - DNA, 2560 bp, Homo sapiens
ctcaaaaggggccggatttccttctcctggaggcagatgttgcctctctctctcgctcggattggttcagtgcactctagaaacactgctgtggtggagaaactggaccccaggtctggagcgaattccagcctgcagggctgataagcgaggcattagtgagattgagagagactttaccccgccgtggtggttggagggcgcgcagtagagcagcagcacaggcgcgggtcccgggaggccggctctgctcgcgccgagatgtggaatctccttcacgaaaccgactcggctgtggccaccgcgcgccgcccgcgctggctgtgcgctggggcgctggtgctggcgggtggcttctttctcctcggcttcctcttcgggtggtttataaaatcctccaatgaagctactaacattactccaaagcataatatgaaagcatttttggatgaattgaaagctgagaacatcaagaagttcttatataattttacacagataccacatttagcaggaacagaacaaaactttcagcttgcaaagcaaattcaatcccagtggaaagaatttggcctggattctgttgagctagcacattatgatgtcctgttgtcctacccaaataagactcatcccaactacatctcaataattaatgaagatggaaatgagattttcaacacatcattatttgaaccacctcctccaggatatgaaaatgtttcggatattgtaccacctttcagtgctttctctcctcaaggaatgccagagggcgatctagtgtatgttaactatgcacgaactgaagacttctttaaattggaacgggacatgaaaatcaattgctctgggaaaattgtaattgccagatatgggaaagttttcagaggaaataaggttaaaaatgcccagctggcaggggccaaaggagtcattctctactccgaccctgctgactactttgctcctggggtgaagtcctatccagatggttggaatcttcctggaggtggtgtccagcgtggaaatatcctaaatctgaatggtgcaggagaccctctcacaccaggttacccagcaaatgaatatgcttataggcgtggaattgcagaggctgttggtcttccaagtattcctgttcatccaattggatactatgatgcacagaagctcctagaaaaaatgggtggctcagcaccaccagatagcagctggagaggaagtctcaaagtgccctacaatgttggacctggctttactggaaacttttctacacaaaaagtcaagatgcacatccactctaccaatgaagtgacaagaatttacaatgtgataggtactctcagaggagcagtggaaccagacagatatgtcattctgggaggtcaccgggactcatgggtgtttggtggtattgaccctcagagtggagcagctgttgttcatgaaattgtgaggagctttggaacactgaaaaaggaagggtggagacctagaagaacaattttgtttgcaagctgggatgcagaagaatttggtcttcttggttctactgagtgggcagaggagaattcaagactccttcaagagcgtggcgtggcttatattaatgctgactcatctatagaaggaaactacactctgagagttgattgtacaccgctgatgtacagcttggtacacaacctaacaaaagagctgaaaagccctgatgaaggctttgaaggcaaatctctttatgaaagttggactaaaaaaagtccttccccagagttcagtggcatgcccaggataagcaaattgggatctggaaatgattttgaggtgttcttccaacgacttggaattgcttcaggcagagcacggtatactaaaaattgggaaacaaacaaattcagcggctatccactgtatcacagtgtctatgaaacatatgagttggtggaaaagttttatgatccaatgtttaaatatcacctcactgtggcccaggttcgaggagggatggtgtttgagctagccaattccatagtgctcccttttgattgtcgagattatgctgtagttttaagaaagtatgctgacaaaatctacagtatttctatgaaacatccacaggaaatgaagacatacagtgtatcatttgattcacttttttctgcagtaaagaattttacagaaattgcttccaagttcagtgagagactccaggactttgacaaaagcaagcatgtcatctatgctccaagcagccacaacaagtatgcaggggagtcattcccaggaatttatgatgctctgtttgatattgaaagcaaagtggacccttccaaggcctggggagaagtgaagagacagatttatgttgcagccttcacagtgcaggcagctgcagagactttgagtgaagtagcctaagaggattctttagagaatccgtattgaatttgtgtggtatgtcactcagaaagaatcgtaatgggtatattgataaattttaaaattggtatatttgaaataaagttgaatattatatataaaaaaaaaaaaaaaaaaa

SEQ ID NO: 3822 - DNA, 5984 bp, Homo sapiens
caaacttggtggcaacttgcctcccggtgcgggcgtctctcccccaccgtctcaacatgcttaggggtccggggcccgggctgctgctgctggccgtccagtgcctggggacagcggtgccctccacgggagcctcgaagagcaagaggcaggctcagcaaatggttcagccccagtccccggtggctgtcagtcaaagcaagcccggttgttatgacaatggaaaacactatcagataaatcaacagtgggagcggacctacctaggcaatgcgttggtttgtacttgttatggaggaagccgaggttttaactgcgagagtaaacctgaagctgaagagacttgctttgacaagtacactgggaacacttaccgagtgggtgacacttatgagcgtcctaaagactccatgatctgggactgtacctgcatcggggctgggcgagggagaataagctgtaccatcgcaaaccgctgccatgaagggggtcagtcctacaagattggtgacacctggaggagaccacatgagactggtggttacatgttagagtgtgtgtgtcttggtaatggaaaaggagaatggacctgcaagcccatagctgagaagtgttttgatcatgctgctgggacttcctatgtggtcggagaaacgtgggagaagccctaccaaggctggatgatggtagattgtacttgcctgggagaaggcagcggacgcatcacttgcacttctagaaatagatgcaacgatcaggacacaaggacatcctatagaattggagacacctggcgcaagaaggataatcgaggaaacctgctccagtgcatctgcacaggcaacggccgaggagagtggaagtgtgagaggcacacctctgtgcagaccacatcgagcggatctggccccttcaccgatgttcgtgcagctgtttaccaaccgcagcctcacccccagcctcctccctatggccactgtgtcacagacagtggtgtggtctactctgtggggatgcagtggctgaagacacaaggaaataagcaaatgctttgcacgtgcctgggcaacggagtcagctgccaagagacagctgtaacccagacttacggtggcaactcaaatggagagccatgtgtcttaccattcacctacaatggcaggacgttctactcctgcaccacagaagggcgacaggacggacatctttggtgcagcacaacttcgaattatgagcaggaccagaaatactctttctgcacagaccacactgttttggttcagactcgaggaggaaattccaatggtgccttgtgccacttccccttcctatacaacaaccacaattacactgattgcacttctgagggcagaagagacaacatgaagtggtgtgggaccacacagaactatgatgccgaccagaagtttgggttctgccccatggctgcccacgaggaaatctgcacaaccaatgaaggggtcatgtaccgcattggagatcagtgggataagcagcatgacatgggtcacatgatgaggtgcacgtgtgttgggaatggtcgtggggaatggacatgcattgcctactcgcagcttcgagatcagtgcattgttgatgacatcacttacaatgtgaacgacacattccacaagcgtcatgaagaggggcacatgctgaactgtacatgcttcggtcagggtcggggcaggtggaagtgtgatcccgtcgaccaatgccaggattcagagactgggacgttttatcaaattggagattcatgggagaagtatgtgcatggtgtcagataccagtgctactgctatggccgtggcattggggagtggcattgccaacctttacagacctatccaagctcaagtggtcctgtcgaagtatttatcactgagactccgagtcagcccaactcccaccccatccagtggaatgcaccacagccatctcacatttccaagtacattctcaggtggagacctgtgagtatcccacccagaaaccttggatactgagtctcctaatcttatcaattctgatggtttctttttttcccagcttttgagccaacaactctgattaactattcctatagcatttactatatttgtttagtgaacaaacaatatgtggtcaattaaattgacttgtagactgaggggattttggttttggttttgggttttgtttttttgcggtgggggggctggtatttggaagaatttagctctttatgttacagaaatcttttttgcaaggacttagaaatgataatgcttaagattgttcttgcccaatgtgggaagagaatctaaggtttttatatgtcttgcaacctcatcaaaggaaaattactggcatcattttcataatttgaaaaaaaaagccaaattaatatatttcttttttgattcactttttaagtgatcatttttaaaactttacttttgacccactgaatttatttagatagaaggaaaagagatgatgggagggaagtttagataaaggatggaagttggttttatttaaacaatagccctgtgatttcctaatgagaagtgactagaaattgaagaaaccaaataaggaggatattggtcaatttagctttagtttctcttactctctcaagcctgccctgtttaactccaaagttcatggctcataatttgagaaacactgttttaaacacaggagaaaaaaatgtccattttaaatcatagctattgaattctacaattacaaagaaacaaacaaacaaaatttgaccaacccaggcggttaaatttaaactcttcaggaaaaatttaagctgttaaaattattctttttctaaatttctaaagtggagggacagaatttttcagatttaaaagggcctcctaggtgcccagaaaattagtggaaagaaccacgtctagacgcatctttgatgtgtcagagttccaaggataaaaagaaacttttaaagtcttctatactcagccaggttatcaatcaaatatgagggcaaaataatattttcagacagattttaggcagtttatcttccatatatccttttctttaagggtatttgtagatacactccagaaaaacaagagtgaaatatgaaggaagttgtggggtccagcaaacagtgcttccaaatcagacccctgatagaggtggaaaactttgcaatgcaacaactgcgtagctggcttagaggacagccaatacagatggaacagaaagatgaggatgggattgagggatcagggattgaggtctccaagaataaaaagggacttcatggaaaaagtaggcttgtggataattaatcacaggggcaaataatgcagttaaaataacaacatgacaatcaggtggaggaatgtataataaacccaaatgtggctgggtagagtggctcacacctgtaatcccagcactttgggaggccaagccgggcagattacctgaggtcaggagttcgagaccagcttggccaacatggcgaaaccccgtctctactaaaaatacaaaaattagccaggcttgggggcgcacgcctgtagtcccagctcctcaggagctgaggtaggagaatcacttgaacccaggaggcaaaggttgcagggagttgagccaagatcgcgccattgcaccctagcctgggcaacagagcgagattctgtttcaaaaaacccccaagtgtattataaggcaataattcctatacgaagcaaactaaaatgcagcaatattaaggtataaaaacaaagaggaataattccattgaaccttgattctggaaactttgatccacccagcagtcatgatgttagactcattgaaaagaatgtatttctaatgcatgatgcgatcggtctatagatgtgtcatggaaacttggttgcaacttcaagacaaaataaaaagtaaacatttacatgaaaaatggtggatatggaaggtggagaagagaggagataacagctttatctttcaaaatagagaattgagagatggtaccaaaagctgatgaagtaaaaaaaaaaaaaaaaaaaaaagatacttaatataatactttaaattacaaatataaacacaagaagaacaaatataatgatacaaatgtcagacactgggaatgtccaagattctggaaggaaagggtggtattattgagctaaatcctcaactttgtctgggcacagtggctaaaaattagccgggcatggtagcatgcacctgtagtcccagctacttgggaggctgaggcggaaggatcgcttgagcttgagaggcggaagttgcagtgagccaagatggcactactgcactccagcctgggagacagagaaagaccctgtgtcaacataaataaatatataaataaatcatcaagtctcatattaaagactctgtaaatatgacttattgttgacaaatgaaacaaatagaggtgtaagcatgttgtctacatggaggcaagaccagaataatagaaaatggaaacagattcccttaaagaggggaatcgtgtctttctcattggctcagtgtagtctccgtagagtctagaatgcttcagcacctggcacactgcttaacaaatggtgaatgaaaaaaaaaaaaagaaaagtcattctttttcttctttcaccctatgtccataatctggccatttgcagaacttgatgtccagtgatcgaaatcaacagcatcagtgcatccaatatcttctagtctctcatcttcttattacatcattaattttatttactttaaaattaaggatatccaaagtattatgtgagaccattgcaatgggagacttaaaagtggtataaaatgtactttgggccaggcgcagtggctcacgcctgtaatcccagcactttgggaggccaaggtgggcggatcacgaggtcaagagatcgagagcatcctggccaacatggtgaaaccccgtctctattaaaaatacaaaaaaattagctgggcatggtggcgcatacctgtaatcccagctactcgggaagctgaggcaggagaatcgcttgaaaccagaaggcggaggttgcagtgagccaggatcacgccactgcactccagcctgggcaacaagagcgaaactccatctcaaaaaaaaaaaaaaaaaagtacattgaattggaaagtcttcaaaaagcagcagtgatgaattttttgagatttttaacaattacaaaaattcagggttttttctaatggatgccacctgagactttattttctgttattttcttgtaataactaaccaaacaagctcatgttgaaaaatgattactaaatttgagctaattgcaatgactggtttcaaaattttccacagtgtatttgagttaaaatttcactgtgaagagtactacgatcactctcgcttattccaaaaatataaatggacacttgagtatttgaattattgaggaaatggttgactgggtaatttttaaaaatcactgggcacaaaaaatatattttgacttatattagtttagagtatttacacttgaaagagtctcatcttttctgaagggtgtttctttcatacacattttattgcactgagttttgtgacccatggcatattaatgaagctgaacaggatgtgaaatataaactggaagcaaaagattaaataaaccaaaattgcattttttctgtagtcttgtccaaaattgggtaaccacttctgatggggtagctcatatccaagaatgagtcacaaaaccagactcgttgaacctggtatatgatgagtcacaaagcaacattctgcctttgttttttcaggacaagaaacttgaattgtatcccactgagttaaaagataaaatatatggcattggcatttctgtacttcagagaggaatatatctgtttgtggtaggaataaaaaataagtgagagaggcaaagaaaaaaaaaaaaaaaaaa

SEQ ID NO: 3823 - DNA, 4072 bp, Homo sapiens; identical to SEQ ID NO: 628

SEQ ID NO: 3824 - DNA, 4009 bp, Homo sapiens
acaccgccctcccgccagactcccggcggctcctcctccctctcccaaacccactcccaaagctaagtgcaggcttccccgttccagccagaagcgctgcgtgagcctccacacgtagccgcaggcagctccttaaatagcgtccgcgctgagcaaacagtccagacgtggggcccaggagggcgagctgaggcgaccgcaccgggcgcgcagcggcggcgggtcagccggcggccaatagccagggcgcggcccgccccgtcgcctcccctcggggagcctataaggcctccgcagcgccccgggcgcctgctgctccgtgcctccaccgacgacctcactcagctgcgttacgcgccgctccggctgccggccgcgcgccttgcccgccggctcccgcccgcaatcggcggctcagggcggacccgggtctctgcgttctcgcgagaagcgcggcgctgcggggccgtgggcgcctgagcccgcgcggccctcgagggccgaatatggggggatgcacggtgaagcctcagctgctgctcctggcgctcgtcctccacccctggaatccctgtctgggtgcggactcggagaagccctcgagcatccccacagataaattattagtcataactgtagcaacaaaagaaagtgatggattccatcgatttatgcagtcagccaaatatttcaattatactgtgaaggtccttggtcaaggagaagaatggagaggtggtgatggaattaatagtattggagggggccagaaagtgagattaatgaaagaagtcatggaacactatgctgatcaagatgatctggttgtcatgtttactgaatgctttgatgtcatatttgctggtggtccagaagaagttctaaaaaaattccaaaaggcaaaccacaaagtggtctttgcagcagatggaattttgtggccagataaaagactagcagacaagtatcctgttgtgcacattgggaaacgctatctgaattcaggaggatttattggctatgctccatatgtcaaccgtatagttcaacaatggaatctccaggataatgatgatgatcagctcttttacactaaagtttacattgatccactgaaaagggaagctattaacatcacattggatcacaaatgcaaaattttccagaccttaaatggagctgtagatgaagttgttttaaaatttgaaaatggcaaagccagagctaagaatacattttatgaaacattaccagtggcaattaatggaaatggacccaccaagattctcctgaattattttggaaactatgtacccaattcatggacacaggataatggctgcactctttgtgaattcgatacagtcgacttgtctgcagtagatgtccatccaaacgtatcaataggtgtttttattgagcaaccaaccccttttctacctcggtttctggacatattgttgacactggattacccaaaagaagcacttaaactttttattcataacaaagaagtttatcatgaaaaggacatcaaggtattttttgataaagctaagcatgaaatcaaaactataaaaatagtaggaccagaagaaaatctaagtcaagcggaagccagaaacatgggaatggacttttgccgtcaggatgaaaagtgtgattattactttagtgtggatgcagatgttgttttgacaaatccaaggactttaaaaattttgattgaacaaaacagaaagatcattgctcctcttgtaactcgtcatggaaagctgtggtccaatttctggggagcattgagtcctgatggatactatgcacgatctgaagattatgtggatattgttcaagggaatagagtaggagtatggaatgtcccatatatggctaatgtgtacttaattaaaggaaagacactccgatcagagatgaatgaaaggaactattttgttcgtgataaactggatcctgatatggctctttgccgaaatgctagagaaatgggtgtatttatgtacatttctaatagacatgaatttggaaggctattatccactgctaattacaatacttcccattataacaatgacctctggcagatttttgaaaatcctgtggactggaaggaaaagtatataaaccgtgattattcaaagattttcactgaaaatatagttgaacagccctgtccagatgtcttttggttccccatattttctgaaaaagcctgtgatgaattggtagaagaaatggaacattacggcaaatggtctgggggaaaacatcatgatagccgtatatctggtggttatgaaaatgtcccaactgatgatatccacatgaagcaagttgatctggagaatgtatggcttcattttatccgggagttcattgcaccagttacactgaaggtctttgcaggctattatacgaagggatttgcactactgaattttgtagtaaaatactcccctgaacgacagcgttctcttcgtcctcatcatgatgcttctacatttaccataaacattgcacttaataacgtgggagaagactttcagggaggtggttgcaaatttctaaggtacaattgctctattgagtcaccacgaaaaggctggagcttcatgcatcctgggagactcacacatttgcatgaaggacttcctgttaaaaatggaacaagatacattgcagtgtcatttatagatccctaagttatttacttttcattgaattgaaatttattttggatgaatgactggcatgaacacgtctttgaagttgtggctgagaagatgagaggaatatttaaataacatcaacagaacaacttcactttgggccaaacatttgaaaaactttttataaaaaattgtttgatatttcttaatgtctgctctgagccttaaaacacagattgaagaagaaaagaaagaaaaaacttaaatatttatttctatgctttgttgcctctgagaataatgacaatttatgaatttgtgtttcaaattgataaaatatttaggtacaaataacaagactaataatattttcttatttaaaaaaagcatgggaagatttttatttatcaaaatatagaggaaatgtagacaaaatggatataaatgaaaattaccatgttgtaaaaccttgaaaatcagattctaactggatttgtatgcaactaagtatttttctgaacacctatgcaggtcttatttacagtagttactaagggaacacacaaagaattacacaacgttttcctcaagaaaatggtacaaaacacaaccgaggagcgtatacagttgaaaacatttttgttttgattggaaggcagattattttatattagtattaaaaatcaaaccctatgtttctttcagatgaatcttccaaagtggattatattaagcaggtattagatttaggaaaacctttccatttcttaaagtattatcaagtgtcaagatcagcaagtgtccttaagtcaaacaggttttttttgttgttgtttttgctttgtttccttttttagaaagttctagaaaataggaaaacgaaaaatttcattgagatgagtagtgcatttaattattttttaaaaaactttttaagtacttgaattttatatcaggaaaacaaagttgttgagccttgcttcttccgttttgccctttgtctcgctccttattctttttttggggggagggttatttgcttttttatcttcctggcataatttccattttattcttctgagtgtctatgttaacttccctctatcccgcttataaaaaaattctccaacaaaaatacttgttgacttgatgttttatcacttctctaagtaaggttgaaatatccttattgtagctactgtttttaatgtaaaggttaaacttgaaaagaaattcttaatcacggtgccaaaattcattttctaacaccatgtgttagaaaattataaaaaataaaataattttagaaaaaaaaaaaaaaa

SEQ ID NO: 3825 - DNA, 425 bp, Homo sapiens
tcagtctccaaaaaggtccgcataattgatatataaggggcttcagtgtgtagcaaagttgcaaaagttaagagttgttgtttgtcttcgatcatgtctggtagaggcaaaggtggtaaaggtttaggaaagggaggcgccaagcgccatcgcaaagtgctgcgtgacaacatacagggcatcacgaagcccgccatccgtcgcttggcccgacgcggcggcgtgaaacgcatttcgggcctcatttatgaggagacccgcggtgttcttaaggtgttcctggagaatgtgatacgggacgccgtaacctacacggagcacgccaagcgtaagacagtcactgcaatggatgttgtctacgcgctcaagcgccagggacgcactctgtacggctttggtggctgagcctcaccccggctttttat

SEQ ID NO: 3826 - DNA, 1714 bp, Homo sapiens
gcaaggaagaagacagtgaacccaaaagaattgaaaacaggatgctgcccatcacagaccgcctgctgcacctcctggggctggagaagacggcgttccgcatatacgcggtgtccacccttctcctcttcctgctcttcttcctgttccgcctgctgctgcggttcctgaggctctgcaggagcttctacatcacctgccgccggctgcgctgcttcccccagcctccccggcgcaactggctgctgggccacctgggcatgtaccttccaaatgaggcgggccttcaagatgagaagaaggtactggacaacatgcaccatgtactcttggtatggatgggacctgtcctgccgctgttggttctggtgcaccctgattacatcaaaccccttttgggagcctcagctgccatcgcccccaaggatgacctcttctatggcttcctaaaaccttggctaggggatgggctgctgctcagcaaaggtgacaagtggagccggcaccgtcgcctgctgacacccgccttccactttgacatcctgaagccttacatgaagatcttcaaccagagcgctgacattatgcatgctaaatggcggcatctggcagagggctcagcggtctcccttgatatgtttgagcatatcagcctcatgaccctggacagtcttcagaaatgtgtcttcagctacaacagcaactgccaagagaagatgagtgattatatctccgctatcattgaactgagcgctctgtctgtccggcgccagtatcgcttgcaccactacctcgacttcatttactaccgctcggcggatgggcggaggttccggcaggcctgtgacatggtgcaccacttcaccactgaagtcatccaggaacggcggcgggcactgcgtcagcagggggccgaggcctggcttaaggccaagcaggggaagaccttggactttattgatgtgctgctcctggccagggatgaagatggaaaggaactgtcagacgaggatatccgagccgaagcagacaccttcatgtttgagggtcacgacacaacatccagtgggatctcttggatgctgttcaatttggcaaagtatccggaataccaggagaaatgccgagaagagattcaggaagtcatgaaaggccgggagctggaggagctggagtgggacgatctgactcagctgccctttacaactatgtgcattaaggagagcctgcgccagtacccacctgtcactcttgtctctcgccaatgcacggaggacatcaagctcccagatgggcgcatcatccccaaaggaatcatctgcttggtcagcatctatggaacccaccacaaccccacagtgtggcctgactccaaggtgtacaacccctaccgctttgacccggacaacccacagcagcgctctccactggcctatgtgcccttctctgcaggacccaggaattgcatcggacagagcttcgccatggccgagttgcgcgtggttgtggcactaacactgctacgtttccgcctgagcgtggaccgaacgcgcaaggtgcggcggaagccggagctcatactgcgcacggagaacgggctctggctcaaggtggagccgctgcctccgcgggcctgagcgtgggcgcgcccctgcggctcccgagggtccaggccccgcccccaaaggaccaggactcgccccaaagatcccga

SEQ ID NO: 3827 - DNA, 1007 bp, Homo sapiens
tgctgcatggggtcaagcactctggtcggtcccatggagctctgcactgtagcttcccttccacaggccccgcagggcgccccctgcctctgaggatgagtcactgcagcagccgcgccctgaccctgctgagcagcgtgtttggtgcgtgtggcctgctcctggtaggcatcgcggtcagcactgactactggctgtacatggaagaaggcacagtgctaccgcagaaccagaccaccgaggtcaagatggccctgcacgccggcctctggcgagtctgcttctttgcaggtcgggagaaaggtcgctgtgtggcctcagaatattttcttgaaccggagatcaatttggtgacggaaaacacggagaatattctgaagacagtgcgcacggccacccccttccccatggtcagcctcttcctcgtgttcacggccttcgtcatcagcaacatcggccacatccgcccgcagaggaccattctggcttttgtctctggcatcttcttcatactatcgggcctctccttggtggtgggcttggttctttacatctccagcatcaacgacgaggtcatgaacaggcccagcagctctgagcagtattttcattatcgctacgggtggtcttttgccttcgccgcttcctccttcctactcaaagagggggccggcgtgatgtccgtgtacctgttcaccaagcgctacgcggaggaggagatgtaccgtccacacccggccttctaccgcccgcgtctcagcgactgctccgactactcgggccagttcctgcagcccgaggcgtggcgccgcggccggagcccctccgacatctccagcgacgtgtccatccaaatgacgcagaactaccctcccgccatcaagtacccggaccacctgcacatctccacctcgccctgctgaggcccgcccctcggagctccccctgcctcctcctcctcctcgtcttagggggtctccctgcaatgcagcgcccccttccgtcct

SEQ ID NO: 3828 - DNA, 3759 bp, Homo sapiens
cagccgcatctggggtcaatcatactcaccttgcccgggccatgctccagcaaaatcaagctgttttcttttgaaagttcaaactcatcaagattatgctgctcactcttatcattctgttgccagtagtttcaaaatttagttttgttagtctctcagcaccgcagcactggagctgtcctgaaggtactctcgcaggaaatgggaattctacttgtgtgggtcctgcacccttcttaattttctcccatggaaatagtatctttaggattgacacagaaggaaccaattatgagcaattggtggtggatgctggtgtctcagtgatcatggattttcattataatgagaaaagaatctattgggtggatttagaaagacaacttttgcaaagagtttttctgaatgggtcaaggcaagagagagtatgtaatatagagaaaaatgtttctggaatggcaataaattggataaatgaagaagttatttggtcaaatcaacaggaaggaatcattacagtaacagatatgaaaggaaataattcccacattcttttaagtgctttaaaatatcctgcaaatgtagcagttgatccagtagaaaggtttatattttggtcttcagaggtggctggaagcctttatagagcagatctcgatggtgtgggagtgaaggctctgttggagacatcagagaaaataacagctgtgtcattggatgtgcttgataagcggctgttttggattcagtacaacagagaaggaagcaattctcttatttgctcctgtgattatgatggaggttctgtccacattagtaaacatccaacacagcataatttgtttgcaatgtccctttttggtgaccgtatcttctattcaacatggaaaatgaagacaatttggatagccaacaaacacactggaaaggacatggttagaattaacctccattcatcatttgtaccacttggtgaactgaaagtagtgcatccacttgcacaacccaaggcagaagatgacacttgggagcctgagcagaaactttgcaaattgaggaaaggaaactgcagcagcactgtgtgtgggcaagacctccagtcacacttgtgcatgtgtgcagagggatacgccctaagtcgagaccggaagtactgtgaagatgttaatgaatgtgctttttggaatcatggctgtactcttgggtgtaaaaacacccctggatcctattactgcacgtgccctgtaggatttgttctgcttcctgatgggaaacgatgtcatcaacttgtttcctgtccacgcaatgtgtctgaatgcagccatgactgtgttctgacatcagaaggtcccttatgtttctgtcctgaaggctcagtgcttgagagagatgggaaaacatgtagcggttgttcctcacccgataatggtggatgtagccagctctgcgttcctcttagcccagtatcctgggaatgtgattgctttcctgggtatgacctacaactggatgaaaaaagctgtgcagcttcaggaccacaaccatttttgctgtttgccaattctcaagatattcgacacatgcattttgatggaacagactatggaactctgctcagccagcagatgggaatggtttatgccctagatcatgaccctgtggaaaataagatatactttgcccatacagccctgaagtggatagagagagctaatatggatggttcccagcgagaaaggcttattgaggaaggagtagatgtgccagaaggtcttgctgtggactggattggccgtagattctattggacagacagagggaaatctctgattggaaggagtgatttaaatgggaaacgttccaaaataatcactaaggagaacatctctcaaccacgaggaattgctgttcatccaatggccaagagattattctggactgatacagggattaatccacgaattgaaagttcttccctccaaggccttggccgtctggttatagccagctctgatctaatctggcccagtggaataacgattgacttcttaactgacaagttgtactggtgcgatgccaagcagtctgtgattgaaatggccaatctggatggttcaaaacgccgaagacttacccagaatgatgtaggtcacccatttgctgtagcagtgtttgaggattatgtgtggttctcagattgggctatgccatcagtaataagagtaaacaagaggactggcaaagatagagtacgtctccaaggcagcatgctgaagccctcatcactggttgtggttcatccattggcaaaaccaggagcagatccctgcttatatcaaaacggaggctgtgaacatatttgcaaaaagaggcttggaactgcttggtgttcgtgtcgtgaaggttttatgaaagcctcagatgggaaaacgtgtctggctctggatggtcatcagctgttggcaggtggtgaagttgatctaaagaaccaagtaacaccattggacatcttgtccaagactagagtgtcagaagataacattacagaatctcaacacatgctagtggctgaaatcatggtgtcagatcaagatgactgtgctcctgtgggatgcagcatgtatgctcggtgtatttcagagggagaggatgccacatgtcagtgtttgaaaggatttgctggggatggaaaactatgttctgatatagatgaatgtgagatgggtgtcccagtgtgcccccctgcctcctccaagtgcatcaacaccgaaggtggttatgtctgccggtgctcagaaggctaccaaggagatgggattcactgtcttgatattgatgagtgccaactgggggtgcacagctgtggagagaatgccagctgcacaaatacagagggaggctatacctgcatgtgtgctggacgcctgtctgaaccaggactgatttgccctgactctactccaccccctcacctcagggaagatgaccaccactattccgtaagaaatagtgactctgaatgtcccctgtcccacgatgggtactgcctccatgatggtgtgtgcatgtatattgaagcattggacaagtatgcatgcaactgtgttgttggctacatcggggagcgatgtcagtaccgagacctgaagtggtgggaactgcgccacgctggccacgggcagcagcagaaggtcatcgtggtggctgtctgcgtggtggtgcttgtcatgctgctcctcctgagcctgtggggggcccactactacaggactcagaagctgctatcgaaaaacccaaagaatccttatgaggagtcgagcagagatgtgaggagtcgcaggcctgctgacactgaggatgggatgtcctcttgccctcaaccttggtttgtggttataaaagaacaccaagacctcaagaatgggggtcaaccagtggctggtgaggatggccaggcagcagatgggtcaatgcaaccaacttcatggaggcaggagccccagttatgtggaatgggcacagagcaaggctgctggattccagtatccagtgataagggctcctgtccccaggtaatggagcgaagctttcatatgccctcctatgggacacagacccttgaagggggtgtcgagaagccccattctctcctatcagctaacccattatggcaacaaagggccctggacccaccacaccaaatggagctgactcagtgaaaactggaattaaaaggaaagtcaagaagaatgaactatg

SEQ ID NO: 3829 - DNA, 1097 bp, Homo sapiens; identical to SEQ ID NO: 1146

SEQ ID NO: 3830 - DNA, 2041 bp, Homo sapiens
acaggagaatgagaggcctccgctggcgttacactcggctgcccagccaggtggaggacaccctgtctggggaggagggtaacgaagaggaagaggaggaggaggcagctccagacccagctgctgctcctgaggatcccacggtgccccagctgacagaagccagccaggttttgagtgcctcagagattcggcagctcagctttcacttcccaccaagagtcaccggccatccctggagtctggtcttctgcacgtcaagggacggtttcagcctgcagagcctgtaccggcggatggagggctgcagcgggccagtgctgctggtgctcagggaccaggacgggcagatatttggagccttctcctcctcggctatccgactcagcaaaggcttctatggtactggcgagacattcctcttctccttctccccacagctgaaggtctttaagtggactggaagcaactctttctttgtgaagggagacttggattcactgatgatgggcagtggcagtggccggtttgggctgtggttggatggagacttgttccgcgggggaagctccccttgcccgaccttcaacaacgaggtgctggcccggcaggagcagttctgcatccaggagctggaggcttggcttctcagctgacagccctgcggcaacagaattctatgattgaagcctctaaatgaattgtgcaggagagggagtttgtaaacaactgactacagacattcacattgggtcatctttaaaaagctggactctgcttttggatgcttctcggaggcgagttggattttggactgaagtactgtcgttccattcctttttttgaggtgttatgagtggggctataacatcgccatcctattaagaagagagagaaaaacaggcaatagagaaaagccagtttccatcatcttatttctgagtgaaagtctcaagtgcgcacatcctcatcttgcatatagattgcttctagctgtcctcaatccagggaaactccaaattacatatgccctgtgcttggggcaaattagaaacactacagtcttacgcaggaagagccttcatgaaaacagccactggcctctgcagagatgactgggagcagcataccactgcccacctctatggcctccttcacacaccttcacggagcacaaactctgtcctgttttcccaggagaaagacgggatgcactgaacccctagcttctctctcgcctggtcccctctgcaataaaaggcccaggtctacaagatggcaaagaaggggaggaagaacagtatgtacctgcagaatttaaatttttctctgcatcaaagctctaacgttggtcccatcagcataggctccagccaaagaagctcctccacccaaaataagggagagatccaaagggaggcgatacaatgacgtgaaaccatagaggtaagaagcaaggcctcctaatacttgactctatgctaaactgttctgaacttgtgggtagatcttctttggttacaagatgatgcacgatcttggagagcctctgttgtaccaggaatacaatgctggtgggaggattcgtgctcctcatctgcttatttgctctcagatccattcttcactcttcctctccctactctgtctcacaggagctactccggtaaattacatttctcagctcccatgcctgttggtttccagttagatttggtcagtgggaggctctggtgggagactggaggtgagaagagggcagagaagtcaggttttttctctccctacctcctctggcacgagcggcagtggcagtgactattctgtggttctagcttttgcaggtggccccagctcctggactcccacctgctcccttggtctctcctatcctagaggtggtagcagcttcctgctgttgaatcactgtcctctatgctcatttagctctgccaaaacttttgtatctcacccccatgttaaattttttctgttgaactacactggatctgacttgatagaactattaaaaatagttttt

SEQ ID NO: 3831 - DNA, 5206 bp, Homo sapiens
cccgccgcggaggccgagcgagcccccagcccagcctggcgactggggaccccggcacatgaggtggacgcccccggggaagacttgggtgcacagccaggcgagaaggtcttgagtcagacagagcaccagccttggggaccctggaccactatcatggagactgagagcgagcagaactccaattccaccaatgggagttctagctcagggggcagctctcggccccagatagctcaaatgtcactttatgaacgacaagcagtgcaggctctgcaagcactgcagcggcagcccaatgcagctcagtatttccaccagttcatgctccagcagcagctcagtaatgcccagctgcatagcctggctgccgtccagcaggccacaattgctgccagtcggcaggccagctccccaaacaccagcactacacagcagcagactaccaccacccaggcctcgatcaatctggccaccacatcggccgcccagctcatcagccgatcccagagtgtgagctctcccagtgctaccaccttgacccaatctgtgctactggggaacaccacctccccacccctcaaccagtctcaggcccagatgtatctacggccacagctgggaaacctattgcaggtaaaccgaaccctgggtcggaatgtgcctctagcctcccaactcatcctgatgcctaatggggcggtggctgcagtccagcaggaggtgccatctgctcagtctcctggagttcatgcagatgcagatcaggttcagaacttggcagtaaggaatcaacaggcctcagctcaaggacctcagatgcaaggctccactcagaaggccattcctccaggagcctcccctgtctctagcctctcccaggcctctagccaggccctagcggtggcacaggcttcctctggggccacaaaccagtccctcaaccttagtcaagctggtggaggcagtgggaatagcatcccagggtccatgggtccaggtggaggtgggcaggcacatggtggtttgggtcagttgccttcctcaggaatgggtggtgggagctgtcccagaaagggtacaggagtggtgcagcccttgcctgcagcccaaacagtgactgtgagccagggcagccagacagaggcagaaagtgcagcagccaagaaggcagaagcagatgggagtggccagcagaatgtgggcatgaacctgacacggacagccacacctgcgcccagccagacacttattagctcagccacctacacacagatccagccccattcactgattcagcaacagcaacagatccacctccagcagaaacaggtggtgatccagcagcagattgccatccaccaccagcagcagttccagcaccggcagtcccagctccttcacacagctacacacctccagttggcgcagcagcagcagcagcaacaacagcaacagcagcaacagcagcagccgcaagccaccaccctcactgcccctcagccaccacaggtcccacctactcagcaggtcccaccttcccagtcccagcagcaagcccaaaccctggtcgttcagcccatgcttcagtcttcacccttgtctcttccacctgatgcagcccctaagccaccaattcccatccaatccaaaccacctgtagcacctatcaagccgcctcagttaggggccgctaagatgtcagctgcccagcaaccaccaccccatatccctgtgcaagttgtaggcactcgacagccaggtacagcccaggcacaggctttggggttggcacagctggcagctgctgtacctacttcccgggggatgccaggtacagtgcagtctggtcaggcccatttggcctcctcgccaccttcatcccaggctcctggtgcactgcaggagtgccctcccacattggcccctgggatgacccttgctcctgtgcaggggacagcacatgtggtaaagggtggggctaccacctcctcacctgttgtagcccaggtccctgctgccttctatatgcagtctgtgcacttgccgggtaaaccccagacattggctgtcaaacgcaaggctgactctgaggaggagagagatgatgtctccacattgggttcaatgcttcctgccaaggcatctccagtagcagaaagcccaaaagtcatggacgagaagagcagtcttggagaaaaagctgaatcagtggctaatgtgaatgctaatactccaagcagtgaactagtagccttgacccccgccccttcagtaccgcctcctacactagccatggtgtctagacaaatgggtgactcaaaacccccacaggccatcgtgaagccccagattctcacccacatcattgaaggctttgttatccaggaaggagcagaacctttcccggtgggttgttctcagttactgaaggagtctgagaagccactacagactggccttccgacagggctgactgagaatcagtcaggtggccctttgggagtggacagcccatctgctgagttagataagaaggcgaatctcctgaagtgcgagtactgtgggaagtacgcccccgcagagcagtttcgtggctctaagaggttctgctccatgacttgcgctaagaggtacaatgtgagctgtagccatcagttccggctgaagaggaaaaaaatgaaagagtttcaagaagccaactatgctcgcgttcgcaggcgtggaccccgccgcagctcctctgacattgcccgtgccaagattcagggcaagtgccaccggggtcaagaagactctagccggggttcagataattccagttatgatgaagcactctctccaacatctcctgggcctttatcagtaagagctgggcatggagaacgtgacctggggaatcccaatacagctccacctacaccggaattacatggcatcaaccctgtgttcctgtccagtaatcccagccgttggagtgtagaggaggtgtacgagtttattgcttctctccaaggctgccaagagattgcagaggaatttcgctcacaggagattgatggacaggcccttttattacttaaagaagaacatcttatgagtgccatgaacatcaagctgggccctgccctcaagatctgcgccaagataaatgtcctcaaggagacctaaggtggccctcttgcacaaaccagcctaaggcagacactctccactgtccaggttataacctggtaccagcagactttgcagggaagaaagagttgttccaatcatgtaaccttctgtaggggattactgagacagggaagagaagtgcaagaattggttgctggtgctacatggcggcagctttgacattttctctgggttctactttattttttaaaatctttacagttctcaccatttcacgtaccttaatccaatctttataaaagaggcagtctagagaactaggactgctcagccttatcctggagtggagcatttagcccaggtcttaattctccaagaggaggaatacatagtatggtaaggcaaggaactgggtggaatgtcaggttgcctgcccaatgggagaggtagggtttttctagcttgtgtgacagaagtagcaaaatctggtcctcccccctcccagtgtagctgtggctcagagttttttctttttgttgtcacttactcccttgtgattgaattttttctcctgcatccatggcaggatccccagccagtatagagacttggttggcatcttctgctgcagggactaaaagtatttgactggggcacatgtggctgttgtcattctttctgcatcccactgttcccctccaatttatgttattttctaccctgtttttcagttccatctctgctctgtcctatagctttataaaaccagagtgtgtggggctgaggtcaggagtataagtacctgccttaggcactattccttatataacaaaaatattaaatatttttttcctcagtaaaaggatgaaaattggtttcagttgtcttactctattccagtctttgcccactttcacacaaatgacaaggccaatatgttttgtttgttttttaatcattaagagtttttgtacaaaaggtgatggttttttttcttcattttaaaacaccagggtgtgggggagggatgcaaacaaataacaaaaaagatgcttttgtaacattattttccctgtttagaaagaaaaaaatcactccaatagtattgaaaagtccaaagatgaaatagtttcattttcttttcctaaggcttataaaaggccccctgcctgttgattccatccctcttttgtgtccagtggagccatgttactcttcagtggcccaggggttcactattaaagaaagatcagtccaggtttctgggcacatggcctaaacaggaagatggaagcatcagaggattaaaaacctttccccacagaaatgtgggcaagaagacacttccctgagccagcagaagggacaggtgcagcagcattccacacccagcgcagaggacagcagagccctcgatgtcccacttctgcttccgttccctttctagaagattgaaaaaaaggtcaaaaccacatgcctgtggagaaagtgcgacatgtttagaaatactggtagggaaccaggagtaagaaaagctttaccagcttttactacaaatggatgaaagacatcaggatcccaccaccgcaaggtaaagtgacttcccttttctggaacccctgtggcacaggagtaccaattttcctttccaacgaactggatttctggataggcattttggctgtatgtggacagataagaccacagtccttagcccaatcccagctatacagtcaccccaatttccacaaatgatgtgatggtaccgtataatcctgtaattgggaaatttcacatttttcctgtcctaatctcagaggtgggagaagcaagtctagaacatctccaggctcagactaaacgagagtacttggactgcaaccaagtaatcactgcaaagtagttccaagcagcaagaaataccagattctcatggaggctactatagggtacagaataacaacatgaaagcaatcaaccctgtataaataatgtttcttggcattttttttttaattaaagaaatccagtgtctcaaaaaaaaaaaaaaaaaaaaaaaaaaaaaaaa

SEQ ID NO: 3832 - DNA, 1345 bp, Homo sapiens; identical to SEQ ID NO: 792

SEQ ID NO: 3833 - DNA, 2436 bp, Homo sapiens
cggatggctacatggatgtgatggagatggtttactatcgggaccttccgcaccctgctgatgttttgttgcttaggatatgaatggctgagcggaggctgtaaaacctggcactctgcttgggttatcaatactctggctgaccatcatcatcgtgggactgactttggtggaagtccttggttacatgtcattattgcgtttccgacaagttataaagttgtcattaccctctggatagtttacctttgggtgtctctcctgaagactatcttctggtctcgaaatggacatgatggatccacggatgtacagcagagagcctggaggtccaaccgccgtagacaggaagggctgaggtccatttgtatgcacacaaagaaaagagtttcttcctttcgaggaaataaaattggcctgaaagacgtcattactctacggagacatgtggaaacaaaagttagagctaaaatccgtaagaggaaggtgacaacgaaaatcaaccatcatgacaaaatcaatggaaagaggaagaccgccagaaaacagaaaatgtttcaacgtgcgcaagagttgcggcggcgagcagaggactaccacaaatgcaaaatccccccttctgcaagaaaggctctttgcaactgggtcagaatggcggcagcggagcatcgtcattcttcaggattgccctactggccctacctcacagctgaaactttaaaaaacaggatgggccaccagccacctcctccaactcaacaacattctataactgataactccctgagcctcaagacacctcccgagtgtctgctcactccccttccaccctcagcggatgataatctcaagacacctcccgagtgtgtgctcactccccttccaccctcagcggatgataatctcaagacacctcccgagtgtgtgctcactccccttccaccctcagcggatgataatctcaagacacctcctgagtgtctgctcactccccttccaccctcagcggatgataatctcaagacacctcccgagtgtctgctcactccccttccaccctcagctctaccctcagctccaccctcagcggatgataatctcaagacacgtgccgagtgtctgctccatccccttccaccctcagcggatgataatctcaagacaccttccgagcgtcagctcactccccttccaccctcagctccaccctcagcagatgataatatcaagacacctgccgagcgtctgcgggggccgcttccaccctcagcggatgataatctcaagacaccttccgagcgtcagctcactccccttccaccctcagctccaccctcagcagatgataatatcaagacacctgctgagcgtctgcgggggccgcttccaccctcagcggatgataatctcaagacaccttccgagcgtcagctcactccccttccaccctcagctccaccctcagcagatgataatatcaagacacctgccgagcgtctgcgggggccgcttccaccctcagcggatgataatctcaagacaccttccgagcgtcagctcactgcccttccaccctcagcagatgataatatcaagacacctgccgagcgtctgcgggggccgcttccaccctcagcggatgataatctcaagacaccttccgagcgtcagctcactccccttccaccctcagctccaccctcagcagatgataatatcaagacacctgctgagcgtctgcgggggccgcttccaccctcagcggatgataatctcaagacaccttccgagcgtcagctcactccccttccaccctcagctccaccctcagcagatgataatatcaagacacctgccgagcgtctgcgggggccgcttccaccctcagccgatgataatctcaagacacctcccttagctactcaggaggctgaggcagaaaaaccacgcaaacccaagaggcagagggcggctgagatggaaccacctcccgaacccaagaggcggagggtcggtgacgtggaaccgtcacgcaaacccaagaggcggagggccgctgacgtggaaccatcatcacccgaacccaagaggcggagggtcggtgatgtggaaccgtcacgcaaacccaagaggcggagggccgctgacgtggaaccatcatcacccgaacccaagaggcggagggtcggtgacgtggaaccgtcacgcaaacccaagaggcggagggccgctgacgtggaaccatcattacccgaacccaagaggcggaggttgagctgagaagaggccagtgcactcaagcctgagcaataagaataaaaccgagtagaacaaaataaaaaattcaaaaaaacaaaacaaaacccacactccaaaaactaacaaagaataaataaataatataaaaataaaataaaaaaaaaaaaaaaaaaaaaa

SEQ ID NO: 3834 - DNA, 1544 bp, Homo sapiens
ttaagcttccaatctgggtggacagaatatcttattacacagaaatcatggatggaaggcaaatttgattatttgttccatcttgtctctcataggaggaaaatatttcctaccggtccatagtgtcagagtggtgaacccctgcagccagcaggcctcctgaaaaaaaagtccatgggtgacagaagattcattgacttccaattccaagattcaaattcaagcctcagacccaggttgggcaatgctactgccaataatacttgcattgttgatgattccttcaagtataatctcaatggtgctgtctacagtgttgtattcatcttgggtctgataaccaacagtgtctctctgtttgtcttctgtttccgcatgaaaatgagaagtgagactgctatttttatcaccaatctagctgtctctgatttgctttttgtctgtacactaccttttaaaatattttacaacttcaaccgccactggccttttggtgacaccctctgcaagatctctggaactgcattccttaccaacatctatgggagcatgctctttctcacctgtattagtgtggatcgtttcctggccattgtctatccttttcgatctcgtactattaggactaggaggaattctgccattgtgtgtgctggtgtctggatcctagtcctcagtggcggtatttcagcctctttgttttccaccactaatgtcaacaatgcaaccaccacctgctttgaaggcttctccaaacgtgtctggaagacttatttatccaagatcacaatatttattgaagttgttgggtttatcattcctctaatattgaatgtctcttgctcttctgtggtgctgagaactcttcgcaagcctgctactctgtctcaagttgggaccaataagaaaaaagtactgaaaatgatcacagtacatatggcagtctttgtggtatgctttgtaccctacaactctgtcctcttcttgtatgccctggtgcgctcccaagctattactaattgctttttggaaagatttgcaaagatcatgtacccaatcaccttgtgccttgcaactctgaactgttgttttgaccctttcatctattacttcacccttgaatcctttcagaagtccttctacatcaatgcccacatcagaatggagtccctgtttaagactgaaacacctttgaccacaaagccttcccttccagctattcaagaggaagtgagtgatcaaacaacaaataatggtggtgaattaatgctagaatccaccttttaggtatgagaaatgtgttcaggtccagatatggtttctcctataatttttcctatgctataaactaaagatttgaagctaatgatactgagaataatgcaccaaatccagtcagatacatttgtttgaaggtttactgtagagtttttattgctgttttgttcagtaattataggtcaaatctaattacaacaaccaagatggattgccaaactcttctgcttggttggaatttcattgtatcgcattatccaggtggc

SEQ ID NO: 3835 - DNA, 3053 bp, Homo sapiens
actttcgagagtgccgtctatttgccacacacttccctgatgaaatgtctggatttggactaaagaaaaaaggaaaggctagcagtcatccaacagaatcatgagacagactttgccttgtatctacttttgggggggccttttgccctttgggatgctgtgtgcatcctccaccaccaagtgcactgttagccatgaagttgctgactgcagccacctgaagttgactcaggtacccgatgatctacccacaaacataacagtgttgaaccttacccataatcaactcagaagattaccagccgccaacttcacaaggtatagccagctaactagcttggatgtaggatttaacaccatctcaaaactggagccagaattgtgccagaaacttcccatgttaaaagttttgaacctccagcacaatgagctatctcaactttctgataaaacctttgccttctgcacgaatttgactgaactccatctcatgtccaactcaatccagaaaattaaaaataatccctttgtcaagcagaagaatttaatcacattagatctgtctcataatggcttgtcatctacaaaattaggaactcaggttcagctggaaaatctccaagagcttctattatcaaacaataaaattcaagcgctaaaaagtgaagaactggatatctttgccaattcatctttaaaaaaattagagttgtcatcgaatcaaattaaagagttttctccagggtgttttcacgcaattggaagattatttggcctctttctgaacaatgtccagctgggtcccagccttacagagaagctatgtttggaattagcaaacacaagcattcggaatctgtctctgagtaacagccagctgtccaccaccagcaatacaactttcttgggactaaagtggacaaatctcactatgctcgatctttcctacaacaacttaaatgtggttggtaacgattcctttgcttggcttccacaactagaatatttcttcctagagtataataatatacagcatttgttttctcactctttgcacgggcttttcaatgtgaggtacctgaatttgaaacggtcttttactaaacaaagtatttcccttgcctcactccccaagattgatgatttttcttttcagtggctaaaatgtttggagcaccttaacatggaagataatgatattccaggcataaaaagcaatatgttcacaggattgataaacctgaaatacttaagtctatccaactcctttacaagtttgcgaactttgacaaatgaaacatttgtatcacttgctcattctcccttacacatactcaacctaaccaagaataaaatctcaaaaatagagagtgatgctttctcttggttgggccacctagaagtacttgacctgggccttaatgaaattgggcaagaactcacaggccaggaatggagaggtctagaaaatattttcgaaatctatctttcctacaacaagtacctgcagctgactaggaactcctttgccttggtcccaagccttcaacgactgatgctccgaagggtggcccttaaaaatgtggatagctctccttcaccattccagcctcttcgtaacttgaccattctggatctaagcaacaacaacatagccaacataaatgatgacatgttggagggtcttgagaaactagaaattctcgatttgcagcataacaacttagcacggctctggaaacacgcaaaccctggtggtcccatttatttcctaaagggtctgtctcacctccacatccttaacttggagtccaacggctttaacgagatcccagttgaggtcttcaaggatttatttgaactaaagatcatcgatttaggattgaataatttaaacacacttccagcatctgtctttaataatcaggtgtctctaaagtcattgaaccttcagaagaatctcataacatccgttgagaagaaggttttcgggccagctttcaggaacctgactgagttagatatgcgctttaatccctttgattgcacgtgtgaaagtattgcctggtttgttaattggattaacgagacccataccaacatccctgagctgtcaagccactacctttgcaacactccacctcactatcatgggttcccagtgagactttttgatacatcatcttgcaaagacagtgccccctttgaactctttttcatgatcaataccagtatcctgttgatttttatctttattgtacttctcatccactttgagggctggaggatatctttttattggaatgtttcagtacatcgagttcttggtttcaaagaaatagacagacagacagaacagtttgaatatgcagcatatataattcatgcctataaagataaggattgggtctgggaacatttctcttcaatggaaaaggaagaccaatctctcaaattttgtctggaagaaagggactttgaggcgggtgtttttgaactagaagcaattgttaacagcatcaaaagaagcagaaaaattatttttgttataacacaccatctattaaaagacccattatgcaaaagattcaaggtacatcatgcagttcaacaagctattgaacaaaatctggattccattatattggttttccttgaggagattccagattataaactgaaccatgcactctgtttgcgaagaggaatgtttaaatctcactgcatcttgaactggccagttcagaaagaacggataggtgcctttcgtcataaattgcaagtagcacttggatccaaaaactctgtacattaaatttatttaaatattcaattagcaaaggagaaactttctcaatttaaaaagttctatggcaaatttaagttttccataaaggtgttataatttgtttattcatatttgtaaatgattatattctatcacaattacatctcttctaggaaaatgtgtctccttatttcaggcctatttttgacaattgacttaattttacccaaaataaaacatataagcacgtaaaaaaaaaaaaaaa

SEQ ID NO: 3836 - DNA, 2970 bp, Homo sapiens
gagagaccaggatccttccagctgaacaaagtcagccacaaagcagactagccagccggctacaattggagtcagagtcccaaagacatgggcttgttagagtgctgtgcaagatgtctggtaggggccccctttgcttccctggtggccactggattgtgtttctttggggtggcactgttctgtggctgtggacatgaagccctcactggcacagaaaagctaattgagacctatttctccaaaaactaccaagactatgagtatctcatcaatgtgatccatgccttccagtatgtcatctatggaactgcctctttcttcttcctttatggggccctcctgctggctgagggcttctacaccaccggcgcagtcaggcagatctttggcgactacaagaccaccatctgcggcaagggcctgagcgcaacggtaacagggggccagaaggggaggggttccagaggccaacatcaagctcattctttggagcgggtgtgtcattgtttgggaaaatggctaggacatcccgacaagtttgtgggcatcacctatgccctgaccgttgtgtggctcctggtgtttgcctgctctgctgtgcctgtgtacatttacttcaacacctggaccacctgccagtctattgccttccccagcaagacctctgccagtataggcagtctctgtgctgatgccagaatgtatggtgttctcccatggaatgctttccctggcaaggtttgtggctccaaccttctgtccatctgcaaaacagctgagttccaaatgaccttccacctgtttattgctgcatttgtgggggctgcagctacactggtttccctgctcaccttcatgattgctgccacttacaactttgccgtccttaaactcatgggccgaggcaccaagttctgatcccccgtagaaatccccctttctctaatagcgaggctctaaccacacagcctacaatgctgcgtctcccatcttaactctttgcctttgccaccaactggccctcttcttacttgatgagtgtaacaagaaaggagagtcttgcagtgattaaggtctctctttggactctcccctcttatgtacctcttttagtcattttgcttcatagctggttcctgctagaaatgggaaatgcctaagaagatgacttcccaactgcaagtcacaaaggaatggaggctctaattgaattttcaagcatctcctgaggatcagaaagtaatttcttctcaaagggtacttccactgatggaaacaaagtggaaggaaagatgctcaggtacagagaaggaatgtctttggtcctcttgccatctataggggccaaatatattctctttggtgtacaaaatggaattcattctggtctctctattaccactgaagatagaagaaaaaagaatgtcagaaaaacaataagagcgtttgcccaaatctgcctattgcagctgggagaagggggtcaaagcaaggatctttcacccacagaaagagagcactgaccccgatggcgatggactactgaagccctaactcagccaaccttacttacagcataagggagcgtagaatctgtgtagacgaagggggcatctggccttacacctcgttagggaagagaaacagggtgttgtcagcatcttctcactcccttctccttgataacagctaccatgacaaccctgtggtttccaaggagctgagaatagaaggaaactagcttacatgagaacagactggcctgaggagcagcagttgctggtggctaatggtgtaacctgagatggccctctggtagacacaggatagataactctttggatagcatgtctttttttctgttaattagttgtgtactctggcctctgtcatatcttcacaatggtgctcatttcatggggtattatccattcagtcatcgtaggtgatttgaaggtcttgatttgttttagaatgatgcacatttcatgtattccagtttgtttattacttatttggggttgcatcagaaatgtctggagaataattctttgattatgactgttttttaaactaggaaaattggacattaagcatcacaaatgatattaaaaattggctagttgaatctattgggattttctacaagtattctgcctttgcagaaacagatttggtgaatttgaatctcaatttgagtaatctgatcgttctttctagctaatggaaaatgattttacttagcaatgttatcttggtgtgttaagagttaggtttaacataaaggttattttctcctgatatagatcacataacagaatgcaccagtcatcagctattcagttggtaagcttccaggaaaaaggacaggcagaaagagtttgagacctgaatagctcccagatttcagtcttttcctgtttttgttaactttgggttaaaaaaaaaaaaaagtctgattggttttaattgaaggaaagatttgtactacagttcttttgttgtaaagagttgtgttgttcttttcccccaaagtggtttcagcaatatttaaggagatgtaagagctttacaaaaagacacttgatacttgttttcaaaccagtatacaagataagcttccaggctgcatagaaggaggagagggaaaatgttttgtaagaaaccaatcaagataaaggacagtgaagtaatccgtaccttgtgttttgttttgatttaataacataacaaataaccaacccttccctgaaaacctcacatgcatacatacacatatatacacacacaaagagagttaatcaactgaaagtgtttccttcatttctgatatagaattgcaattttaacacacataaaggataaacttttagaaacttatcttacaaagtgtattttataaaattaaagaaaataaaattaagaatgttctcaatcaaaaaaaaaaaaaaaaaaaaaaaaaaaaaa

SEQ ID NO: 3837 - DNA, 6514 bp, Homo sapiens
ccaggagctgccttggcagtcacgccccttccttccgaggagctttctggctgcctaaactggtagaccccctgaattactcctccatctccgctctctttcgcctcctcttctcttagttctctccgcctccccctcaactaccaccacctccagtcagtctcgcctccggctatccgctgctccaccctctggcccggtatcctgcctgtccgctgccaccaaggagagcccggacggagcagcgaggaggggagcagccgggagttggggcttcccccctgcccatccctggccgctggcccgggaccgaagccacttgagcgagcagagagtcgtcaccttgtcttctttgccttcagggagctgctaagaaggacaaataagatagcagagtgaaagagcttttgtctccttagaaggaaggctgagaaactaaaggccagcgcaggacatctcattgccattgtcagccaggaactcgcagcctcacagccctacttcttctctgacctctggggggtccttgcccttgctacaatctccaccatccactagattgtctcctgcccgacaccccttggtcccaaaccagggagaccattcagctcacctgcctaggccgcagcagcatttccttcctaatcaggctcaccagggggatcattaccgtctctcccaacctggcctgagtcagcagcagcagcaacagcagcagcagcaccatcatcaccatcaccaccaacaacagcagcagcagcagccacagcagcagccaggagaagcctattcagctatgcctcgggctcagccatcctctgcttcttatcagccagtgccagcagacccttttgccattgtttccagagcccagcagatggttgagatcctctcagacgagaaccggaacttgaggcaagagttggaaggatgctatgagaaggtggcaagactgcagaaggtggagacagaaatccagcgcgtctcggaggcatatgagaacctcgtgaagtcatcctccaaaagagaggccctagagaaagccatgagaaacaagctagagggcgagattcggaggatgcatgatttcaacagggatctgagagagcgtctagagactgccaacaagcagcttgcagagaaggaatatgaggggtcagaggacaccagaaaaaccatctcgcagctctttgcaaaaaataaagaaagccagcgtgagaaggagaagctggaagcggagctggccactgcccgttctaccaatgaggaccaaagacgacacatcgaaatccgagatcaggccctgagtaatgcccaggccaaggtggtaaagctggaagaagagctgaaaaagaagcaagtgtacgttgacaaggtggagaagatgcagcaggcccttgtacagctccaggcagcatgtgaaaaacgtgagcagctagagcaccgtctccggacacgactggagagggaactggaatccctgagaatccagcagcgtcagggcaactgtcagcccaccaacgtttcagaatacaatgctgctgcactgatggagctccttcgggagaaagaggagaggattctggctctggaagctgatatgacaaagtgggagcagaaatatttggaggagaatgtgatgagacattttgctctggatgctgctgcaactgtggctgctcagagggacacaacagtcatcagtcactctcctaacaccagctatgacacagctctagaagctcgcatccagaaagaggaggaagaaatcttgatggccaataagcgttgccttgacatggagggcaggattaagaccctccatgcccagattattgagaaggatgccatgatcaaagtactccagcagcgttcccggaaggagccgagcaagacagagcagctgtcgtgcatgcggccagcgaagtctctgatgtccatttccaatgctggatcaggcttgctctcccactcatccaccctgactggctcccccatcatggaagaaaagcgagacgacaagagctggaaggggagcctaggcattctcctgggtggagactaccgtgctgaatatgtcccttccacaccctcgcctgtgccaccctcgactcccctgctctcggctcactccaagacaggcagccgagactgcagtacccaaactgaacgtgggacggaatcgaacaaaactgcagctgttgctcccatctctgttcctgctccagttgctgctgccgccactgctgccgccatcactgccactgctgccaccatcaccaccaccatggtagctgctgctccagttgctgttgctgctgctgctgctccagctgctgctgctgccccgtctccagccactgccgctgctactgctgctgctgtttctccagctgctgctggtcagattccagctgctgcctctgttgcctcagctgctgccgttgctccttctgctgctgctgctgctgctgttcaggttgctccagctgctccggctccagttccagctccggctctggttccggttccagctccagcagcggctcaggcttctgctcctgctcagactcaggcaccaacttcagctccggctgtggctccaactccagctccaactccaactccagctgtggctcaggctgaggttcctgcaagtccagctaccggtcctggaccacatcgtttgtctataccaagtttgacctgcaatccagacaaaacagatgggcctgtgttccactccaatactctggaaagaaaaactcccattcagatcctgggacaagagcctgatgcagagatggtggaatatctcatctaaacggccaaatcaagagctgcagattatcagcaaaaatgcttttaatcattttcccccttttattggttcttgttttgagggtgaggacaagggttgtggggaggggatgttttttaacaggactttttattggaacaatgtactacttgagtaataccatgtgaacaccagtctattttggtatgcttagggagtacctctaaagacagattaatcagaatgtgctctaaagcttattgtttgaatttatacgaatactgggactgttaacaggtggctatacatcgacgttttcaatgtgcttaaatttgtttaaattttccatattctagatcattttttattgaagagcacagtatgtgtggaagacagtgtataacacgtagtttggaagtgggaagctagagagaattgagtgtgtgctgttttgtatagttactatcctgtgcagcagctggagaaagcactcacctcaggcttacaaaagggaatagtttcaggagctatgtaagctggaaaaaaggtagggagttttggggtgcagaagggtactggagctaattttttcttccagtttcccagctaccctgccccagggaattgtgtttgtcttcatttcagtggtgctttggaaatggattcttttggttccctcctggaggttcatacattcatatatatgctctggagtaatttatgcatttggataattaatatattgctttcagatgctgggagagtacattaactgagtgatgcgcaacttcctctctcttagggaattagaccatcagaggccttgatggagagttgcatggggtgctatatgcagacttccatggtttgtgtgtagccatgaacacagcttgcttgcatttagtaagaccaatcagcttagtgtttatttcttctacagcacagattcactggctgggtctccagtctcaaattgccaatcatttgcaaagtgaggaaggatctttgttgacaggttgaatgctttgaatttctggtgactactttgaaataacttgttttgtttgtcaaattctaagcatatgtcttaaaaggcatttttgactatcacctccaagggaatagcttgagaaacccaaagtactatgctgcagtcgggggagaggtggattgcagcagtatcctcaactacctcttctcactgtcagtgacaccatcttggaatacctttgggaagcagcaggaaatgtgcatgtgggtagagatcaaaggaggcaatggctccaagccttgccatagggctgcctccaaggacacagaaggatgccagttgccacaggtccctgccctgtgtcacctgtctgcccttcattaaggtgagaaatctgcagatagcatcattaagatcagttttaaggggtatagggagggtgagggaagtggggggtgttaggtaagggttgggggtagaggttttgggatgtcttagttagaaaccagattaatagaagagtaggcctgatatattacatcatgagccatagtggtgggaaagaactttagcaatatagccctacctcctcattttagtgatgaggaatctgagaactggagaggttcagtgactttttgaaagtcatacaacacagctaaccattatgccaatcaccatgcttattttgggaaactctttatcttttttaaattccattttatgaaaaggcatcttcatggtccagggaatatgtatcttgtaaaatgtacctggttggagtagcttgtccagtcttgacaaactactgaatttctgtcttgcctctccttcagtgccttttaaaaggttttcccttttctgatctgcatttcaacatagagtcacataaatgtccccctgagaaaccaatcccacttctttctaggagattgggtatcttagataatcttttggggttcctctgtgagtataggaatggtatccttcctaattatcttccaaaggaattattttgtgtgtgtgcctgtgtgtgtgtagagacataaaggagggtgatgtgattttcagctagtcctttcacattttcaataatgaggtaatcatgttacatacacattagtcctcagttataaagtgaatctcagatagaaattaaaagtgcagttgtgttaagactctttcatactaccctttagtcataaggagaaaaaaacactcaaatagtagaagcagcaagtagcaaacttcaggagagctactttctatccaaataatttaaaaaacacttttcacctactcctttcatggttataacacattggcagactttttgctggctctgggagccatgattttaatcacattctgcaaggtgacaaatgtcatacattccacattgtgtggtagccatctctttagactcatgtgttttggggaaaggaagaagttcttggctgagtactattttgaactttccagaaccctctcacaccagagacagttcttctctgttcagtttccaatccccgataatttgctaaaataacattgtacatccaagagagggaagaagagtatgtcagtatattatgcagaagatagatacagccttttcagaagatctccactagtttttgttccaaaaattcaagtttatgggagaaatctcaattagccaccttttcacagttgtgtggatataacatttgggggatctttctggactcctacctatctgtgcattttaccggcacctcaggaaaggagggtgaccaggttgtcttagcttgtactgcttggtgatctctgaggaccttctaattcagttgtaccccagtgttccatgtatagaaaaacttcattagaacaaactttacttgatatgaaactcctattaacagtctttttttgaaataaaaagtagcttgagctttcttttaaaatcatgtatcttgattgttgatttaatgaaggatttccttttaatgctgcttttgagcttcaaggtaataggacagcaggaacctaaaatatctgccatcatctgccataggaaagatacccagagacccatcatgttctctttttgttgttacactgttgggtgggtataacaattggaaaatgaacaaactgattgattgtgcaaactactttttatgacaagcctaaaccctcataatgcggcagcttaaagtgtatacatatgcactaactttgatcaattatattctcatatctgttagctacacagtctcctattatctcaattgcttatgtgcatatggaatatgttacttaaaacgtgtgcattcttactgaaaatgttttcaaaggaaggtatcagctgtgggctaattgccaccaatttcagcctgccacgattcttggaaatatgtcttccaagtgccatccatcatcagtaggacaagtgtcgggagtttgtttatttttttccagtagcaacgatgggttacatggagccatgaaacctccttctggcctcccttgtgattaatggcatgtgtttgtaaaatggatagctggggttggcagatggctagagaagaatcgcctttggtttaaaatgtatgtggtcccctaatgattgtgaccccattctgtaatcaactgagctagttccaataaagttaagcaggtttaaatccactttgtgcctatcttttcactgacaataaagttagctattttaaaatgca

SEQ ID NO: 3838 - DNA, 2014 bp, Homo sapiens; identical to SEQ ID NO: 692

SEQ ID NO: 3839 - DNA, 341 bp, Homo sapiens; identical to SEQ ID NO: 799

SEQ ID NO: 3840 - DNA, 5608 bp, Homo sapiens; identical to SEQ ID NO: 2341

SEQ ID NO: 3841 - DNA, 5560 bp, Homo sapiens
aagacggattctcagacaaggcttgcaaatgccccgcagccatcatttaactgcacccgcagaatagttacggtttgtcacccgaccctcccggatcgcctaatttgtccctagtgagaccccgaggctctgcccgcgcctggcttcttcgtagctggatgcatatcgtgctccgggcagcgcgggcgcagggcacgcgttcgcgcacaccctagcacacatgaacacgcgcaagagctgaaccaagcacggtttccatttcaaaaagggagacagcctctaccgcgattgtagaagagactgtggtgtgaattagggaccgggaggcgtcgaacggaggaacggttcatcttagagactaattttctggagtttctgcccctgctctgcgtcagccctcacgtcacttcgccagcagtagcagaggcggcggcggcggctcccggaattgggttggagcaggagcctcgctggctgcttcgctcgcgctctacgcgctcagtccccggcggtagcaggagcctggacccaggcgccgccggcgggcgtgaggcgccggagcccggcctcgaggtgcataccggacccccattcgcatctaacaaggaatctgcgccccagagagtcccgggagcgccgccggtcggtgcccggcgcgccgggccatgcagcgacggccgccgcggagctccgagcagcggtagcgcccccctgtaaagcggttcgctatgccggggccactgtgaaccctgccgcctgccggaacactcttcgctccggaccagctcagcctctgataagctggactcggcacgcccgcaacaagcaccgaggagttaagagagccgcaagcgcagggaaggcctccccgcacgggtgggggaaagcggccggtgcagcgcggggacaggcactcgggctggcactggctgctagggatgtcgtcctggataaggtggcatggacccgccatggcgcggctctggggcttctgctggctggttgtgggcttctggagggccgctttcgcctgtcccacgtcctgcaaatgcagtgcctctcggatctggtgcagcgacccttctcctggcatcgtggcatttccgagattggagcctaacagtgtagatcctgagaacatcaccgaaattttcatcgcaaaccagaaaaggttagaaatcatcaacgaagatgatgttgaagcttatgtgggactgagaaatctgacaattgtggattctggattaaaatttgtggctcataaagcatttctgaaaaacagcaacctgcagcacatcaattttacccgaaacaaactgacgagtttgtctaggaaacatttccgtcaccttgacttgtctgaactgatcctggtgggcaatccatttacatgctcctgtgacattatgtggatcaagactctccaagaggctaaatccagtccagacactcaggatttgtactgcctgaatgaaagcagcaagaatattcccctggcaaacctgcagatacccaattgtggtttgccatctgcaaatctggccgcacctaacctcactgtggaggaaggaaagtctatcacattatcctgtagtgtggcaggtgatccggttcctaatatgtattgggatgttggtaacctggtttccaaacatatgaatgaaacaagccacacacagggctccttaaggataactaacatttcatccgatgacagtgggaagcagatctcttgtgtggcggaaaatcttgtaggagaagatcaagattctgtcaacctcactgtgcattttgcaccaactatcacatttctcgaatctccaacctcagaccaccactggtgcattccattcactgtgaaaggcaaccccaaaccagcgcttcagtggttctataacggggcaatattgaatgagtccaaatacatctgtactaaaatacatgttaccaatcacacggagtaccacggctgcctccagctggataatcccactcacatgaacaatggggactacactctaatagccaagaatgagtatgggaaggatgagaaacagatttctgctcacttcatgggctggcctggaattgacgatggtgcaaacccaaattatcctgatgtaatttatgaagattatggaactgcagcgaatgacatcggggacaccacgaacagaagtaatgaaatcccttccacagacgtcactgataaaaccggtcgggaacatctctcggtctatgctgtggtggtgattgcgtctgtggtgggattttgccttttggtaatgctgtttctgcttaagttggcaagacactccaagtttggcatgaaaggcccagcctccgttatcagcaatgatgatgactctgccagcccactccatcacatctccaatgggagtaacactccatcttcttcggaaggtggcccagatgctgtcattattggaatgaccaagatccctgtcattgaaaatccccagtactttggcatcaccaacagtcagctcaagccagacacatttgttcagcacatcaagcgacataacattgttctgaaaagggagctaggcgaaggagcctttggaaaagtgttcctagctgaatgctataacctctgtcctgagcaggacaagatcttggtggcagtgaagaccctgaaggatgccagtgacaatgcacgcaaggacttccaccgtgaggccgagctcctgaccaacctccagcatgagcacatcgtcaagttctatggcgtctgcgtggagggcgaccccctcatcatggtctttgagtacatgaagcatggggacctcaacaagttcctcagggcacacggccctgatgccgtgctgatggctgagggcaacccgcccacggaactgacgcagtcgcagatgctgcatatagcccagcagatcgccgcgggcatggtctacctggcgtcccagcacttcgtgcaccgcgatttggccaccaggaactgcctggtcggggagaacttgctggtgaaaatcggggactttgggatgtcccgggacgtgtacagcactgactactacagggtcggtggccacacaatgctgcccattcgctggatgcctccagagagcatcatgtacaggaaattcacgacggaaagcgacgtctggagcctgggggtcgtgttgtgggagattttcacctatggcaaacagccctggtaccagctgtcaaacaatgaggtgatagagtgtatcactcagggccgagtcctgcagcgaccccgcacgtgcccccaggaggtgtatgagctgatgctggggtgctggcagcgagagccccacatgaggaagaacatcaagggcatccataccctccttcagaacttggccaaggcatctccggtctacctggacattctaggctagggcccttttccccagaccgatccttcccaacgtactcctcagacgggctgagaggatgaacatcttttaactgccgctggaggccaccaagctgctctccttcactctgacagtattaacatcaaagactccgagaagctctcgagggaagcagtgtgtacttcttcatccatagacacagtattgacttctttttggcattatctctttctctctttccatctcccttggttgttcctttttctttttttaaattttctttttcttttttttttcgtcttccctgcttcacgattcttaccctttcttttgaatcaatctggcttctgcattactattaactctgcatagacaaaggccttaacaaacgtaatttgttatatcagcagacactccagtttgcccaccacaactaacaatgccttgttgtattcctgcctttgatgtggatgaaaaaaagggaaaacaaatatttcacttaaactttgtcacttctgctgtacagatatcgagagtttctatggattcacttctatttatttattattattactgttcttattgtttttggatggcttaagcctgtgtataaaaaagaaaacttgtgttcaatctgtgaagcctttatctatgggagattaaaaccagagagaaagaagatttattatgaaccgcaatatgggaggaacaaagacaaccactgggatcagctggtgtcagtccctacttaggaaatactcagcaactgttagctgggaagaatgtattcggcaccttcccctgaggacctttctgaggagtaaaaagactactggcctctgtgccatggatgattcttttcccatcaccagaaatgatagcgtgcagtagagagcaaagatggcttccgtgagacacaagatggcgcatagtgtgctcggacacagttttgtcttcgtaggttgtgatgatagcactggtttgtttctcaagcgctatccacagaacctttgtcaacttcagttgaaaagaggtggattcatgtccagagctcatttcggggtcaggtgggaaagccaagaacttggaaaagataagacaagctataaattcggaggcaagtttcttttacaatgaacttttcagatctcacttccctccgacccctaacttccatgcccacccgtccttttaactgtgcaagcaaaattgtgcatggtcttcgtcgattaataccttgtgtgcagacactactgctccagacgtcgtttccctgataggtagagcagatccataaaaaggtatgacttatacaattaggggaagctaatggagtttattagctgagtatcaatgtctctgcgttgtacggtggtgatgggttttaatgaatatggaccctgaagcctggaaatcctcatccacgtcgaacccacaggactgtgggaagggcagaatcaatccctaagggaaaggaaacctcaccctgagggcatcacatgcactcatgttcagtgtacacaggtcaagtcccttgctctgggctctagttgggagagtggtttcattccaagtgtactccattgtcagtatgctgtttttgtttccttcactccattcaaaaagtcaaaatacaaaatttggcacagcatgccaacgggaggctgtgcccagaccaagcactggaagtgtgcttctaggcatagtcattggttttgcaaaaagagggctcaaatttaaatagaaatttacagctatttgaatggtcagatataccaagaaagaaaaatatttctgttcctcaagaaaacttgctaccctctgtgaggggaattttgctaaacttgacatctttataacatgagccagattgaaagggagtgattttcattcatcttaggtcatgttatttcatatttgtttctgaaggtgcgatagctctgttttaggttttgcttgcgcctgttaattactggaacaccttatttttcattaaaggctttgaaagccaattctcaaaaattcaaaagtgcaaattaacagaacaaaaggaaatccagtagcaactgcagtcaagcgagggagttgacaagataaaccttacgtccattcaagttatatgctggcctatgagagatgagagttgggtcgtttgttctctttgttgatgattt

SEQ ID NO: 3842 - DNA, 2404 bp, Homo sapiens
agtctccgggccgccttgccatggctgcccgtggtgtcatcgctccagttggcgagagtttgcgctacgctgagtacttgcagccctcggccaaacggccagacgccgacgtcgaccagcagagactggtaagaagtttgatagctgtaggcctgggtgttgcagctcttgcatttgcaggtcgctacgcatttcggatctggaaacctctagaacaagttatcacagaaactgcaaagaagatttcaactcctagcttttcatcctactataaaggaggatttgaacagaaaatgagtaggcgagaagctggtcttattttaggtgtaagcccatctgctggcaaggctaagattagaacagctcataggagagtcatgattttgaatcacccagataaaggtggatctccttacgtagcagccaaaataaatgaagcaaaagacttgctagaaacaaccaccaaacattgatgcttaaggaccacactgaaggaaaaaaaaagaggggacttcaaaaaaaaaaaaaaagccctgcaaaatattctaaaacatggtcttcttaattttctatatggattgaccacagtcttatcttccaccattaagctgtataacaataaaatgttaatagtcttgctttttattatcttttaaagatctccttaaattctataactgatcttttttcttattttgtttgtgacattcatacatttttaagatttttgttatgttctgaattcccccctacacacacacacacacacacacacacacacgtgcaaaaaatatgatcaagaatgcaattgggatttgtgagcaatgagtagacctcttattgtttatatttgtaccctcattgtcaatttttttttagggaatttgggactctgcctatataaggtgttttaaatgtcttgagaacaagcactggctgatacctcttggagatatgatctgaaatgtaatggaatttattaaatggtgtttagtaaagtaggggttaaggacttgttaaagaaccccactatctctgagaccctatagccaaagcatgaggacttggagagctactaaaatgattcaggtttacaaaatgagccctgtgaggaaaggttgagagaagtctgaggagtttgtatttaattatagtcttccagtactgtatattcattcattactcattctacaaatatttattgaccccttttgatgtgcaaggcactatcgtgcgtcccctgagagttgcaagtatgaagcagtcatggatcatgaaccaaaggaacttatatgtagaggaaggataaatcacaaatagtgaatactgttagatacagatgatatattttaaaagttcaaaggaagaaaagaatgtgttaaacactgcatgagaggaggaataagtggcatagagctaggctttagaaaagaaaaatattccgataccatatgattggtgaggtaagtgttattctgagatgagaattagcagaaatagatatatcaatcggagtgattagagtgcagggtttctggaaagcaaggtttggacagagtggtcatcaaaggccagccctgtgacttacactgcattaaattaatttcttagaacatagtccctgatcattatcactttactattccaaaggtgagagaacagattcagatagagtgccagcattgtttcccagtattcctttacaaatcttgggttcattccaggtaaactgaactactgcattgtttctatcttaaaatactttttagatatcctagatgcatctttcaacttctaacattctgtagtttaggagttctcaaccttggcattattgacatgttaggccaaataattttttttgtgggaggtctcttgtgcgttttagatgattagcaataatccctgacctgttatctactaaagactagtcgtttctcatcagttgtgacaacaaaaatggttccagatattgccaaatgccctttagaggacagtaatcgcccccagttgagaaccatttcagtaaaactttaattactattttttcttttggtttataaaataatgatcctgaattaaattgatggaaccttgaagtcgataaaatatatttcttgctttaaagtccccatacgtgtcctactaattttctcatgctttagtgttttcacttttctcctgttatccttgtacctaagaatgccatcccaatccccagatgtccacctgcccaaagtctaggcatagctgaaggccaagctaaaatgtatccctctttttctggtacatgcagcaaaagtaatatgaattatcagctttctgagagcaggcattgtatctgtcttgtttggtgttacattggcacccaataaatatttgttgagcgaaaaaaaaaaaaaaa

SEQ ID NO: 3843 - DNA, 10724 bp, Homo sapiens; identical to SEQ ID NO: 2476

SEQ ID NO: 3844 - DNA, 1779 bp, Homo sapiens
cttcacctcactttaccttctcctccagcacaggaactaggaactacggagagagaagccaagggagaggaggaggaggaaactaacgattccctgcccacccccacacccagcaccaccaacaggtgggcaagcttgccgagaaaacgcagagggcatcctgtgagcagcaaacacatctgagcctggaaaagacgcagagaagtaaaagatcaaagtctgattggcaccggctcccattccggctccagcctccaatccgacccccatttcggctgcagcctcggacctagctccggccctcggtctatccggttgcatcctccctccctgttccggatcttatcttgcgccagcgcctactccaggatcccgtagccagacctcaagccatggctggtcccttctcccgtctgctgtccgcccgcccgggactcaggctcctggctttggccggagcggggtctctagccgctgggtttctgctccgaccggaacctgtacgagctgccagtgaacgacggaggctgtatcccccgagcgctgagtacccagacctccgaaagcacaacaactgcatggccagtcacctgaccccagcagtctatgcacggctctgcgacaagaccacacccactggttggacgctagatcagtgtatccagactggcgtggacaaccctggccaccccttcatcaagactgtgggcatggtggctggagatgaggagacctatgaggtatttgctgacctgtttgaccctgtgatccaagagcgacacaatggatatgacccccggacaatgaagcacaccacggatctagatgccagtaaaatccgttctggctactttgatgagaggtatgtattgtcctctagagtcagaactggccgaagcatccgaggactcagtctgcctccagcttgcactcgagcagagcgacgagaggtggaacgtgttgtggtggatgcactgagtggcctgaagggtgacctggctggacgttactataggctcagtgagatgacagaggctgaacagcagcagcttattgatgaccactttctgtttgataagcctgtgtccccgttgctgactgcagcaggaatggctcgagactggccagatgctcgtggaatttggcacaacaatgagaagagcttcctgatctgggtgaatgaggaggatcatacacgggtgatctccatggagaagggtggtaacatgaagagagtgtttgaaagattctgccgaggcctcaaagaggtggagagacttatccaagaacgtggctgggagttcatgtggaatgagcgtttgggatacatcttgacctgtccatctaacctgggcactggacttcgggcaggagtgcacatcaaactgcccctgctaagcaaagatagccgcttcccaaagatcctggagaacctaagactccaaaagcgtggtactggaggagtggacactgctgccacaggcggtgtctttgatatttctaatttggaccgactaggcaaatcagaggtggagctggtgcaactggtcatcgatggagtaaactatttgattgattgtgaacggcgtctggagagaggccaggatatccgcatccccacacctgtcatccacaccaagcattaactccccatcgccagctgatgactcaagattccaaggagttctgctcattctaatgatggcccattctacttgctctggacctgccctcgcatcccctgcctccatcctagtaaagactccttgctatgctgca

SEQ ID NO: 3845 - DNA, 1779 bp, Homo sapiens; identical to SEQ ID NO: 698

SEQ ID NO: 3846 - DNA, 2792 bp, Homo sapiens; identical to SEQ ID NO: 619

SEQ ID NO: 3847 - DNA, 3470 bp, Homo sapiens
tattggctcagcagattgtttactgtgttcttcttctttttctttttttggtctttcctgctcagcgcccaacccaagttcaaaggctgataagagagaaaatctcatgaggaggttttagtctagggaaagtcattcagtggatgtgatcttggctcacaggggacgatgtcaagctcttcctggctccttctcagccttgttgctgtaactgctgctcagtccaccattgaggaacaggccaagacatttttggacaagtttaaccacgaagccgaagacctgttctatcaaagttcacttgcttcttggaattataacaccaatattactgaagagaatgtccaaaacatgaataatgctggggacaaatggtctgcctttttaaaggaacagtccacacttgcccaaatgtatccactacaagaaattcagaatctcacagtcaagcttcagctgcaggctcttcagcaaaatgggtcttcagtgctctcagaagacaagagcaaacggttgaacacaattctaaatacaatgagcaccatctacagtactggaaaagtttgtaacccagataatccacaagaatgcttattacttgaaccaggtttgaatgaaataatggcaaacagtttagactacaatgagaggctctgggcttgggaaagctggagatctgaggtcggcaagcagctgaggccattatatgaagagtatgtggtcttgaaaaatgagatggcaagagcaaatcattatgaggactatggggattattggagaggagactatgaagtaaatggggtagatggctatgactacagccgcggccagttgattgaagatgtggaacatacctttgaagagattaaaccattatatgaacatcttcatgcctatgtgagggcaaagttgatgaatgcctatccttcctatatcagtccaattggatgcctccctgctcatttgcttggtgatatgtggggtagattttggacaaatctgtactctttgacagttccctttggacagaaaccaaacatagatgttactgatgcaatggtggaccaggcctgggatgcacagagaatattcaaggaggccgagaagttctttgtatctgttggtcttcctaatatgactcaaggattctgggaaaattccatgctaacggacccaggaaatgttcagaaagcagtctgccatcccacagcttgggacctggggaagggcgacttcaggatccttatgtgcacaaaggtgacaatggacgacttcctgacagctcatcatgagatggggcatatccagtatgatatggcatatgctgcacaaccttttctgctaagaaatggagctaatgaaggattccatgaagctgttggggaaatcatgtcactttctgcagccacacctaagcatttaaaatccattggtcttctgtcacccgattttcaagaagacaatgaaacagaaataaacttcctgctcaaacaagcactcacgattgttgggactctgccatttacttacatgttagagaagtggaggtggatggtctttaaaggggaaattcccaaagaccagtggatgaaaaagtggtgggagatgaagcgagagatagttggggtggtggaacctgtgccccatgatgaaacatactgtgaccccgcatctctgttccatgtttctaatgattactcattcattcgatattacacaaggaccctttaccaattccagtttcaagaagcactttgtcaagcagctaaacatgaaggccctctgcacaaatgtgacatctcaaactctacagaagctggacagaaactgttcaatatgctgaggcttggaaaatcagaaccctggaccctagcattggaaaatgttgtaggagcaaagaacatgaatgtaaggccactgctcaactactttgagcccttatttacctggctgaaagaccagaacaagaattcttttgtgggatggagtaccgactggagtccatatgcagaccaaagcatcaaagtgaggataagcctaaaatcagctcttggagataaagcatatgaatggaacgacaatgaaatgtacctgttccgatcatctgttgcatatgctatgaggcagtactttttaaaagtaaaaaatcagatgattctttttggggaggaggatgtgcgagtggctaatttgaaaccaagaatctcctttaatttctttgtcactgcacctaaaaatgtgtctgatatcattcctagaactgaagttgaaaaggccatcaggatgtcccggagccgtatcaatgatgctttccgtctgaatgacaacagcctagagtttctggggatacagccaacacttggacctcctaaccagccccctgtttccatatggctgattgtttttggagttgtgatgggagtgatagtggttggcattgtcatcctgatcttcactgggatcagagatcggaagaagaaaaataaagcaagaagtggagaaaatccttatgcctccatcgatattagcaaaggagaaaataatccaggattccaaaacactgatgatgttcagacctccttttagaaaaatctatgtttttcctcttgaggtgattttgttgtatgtaaatgttaatttcatggtatagaaaatataagatgataaagatatcattaaatgtcaaaactatgactctgttcagaaaaaaaattgtccaaagacaacatggccaaggagagagcatcttcattgacattgctttcagtatttatttctgtctctggatttgacttctgttctgtttcttaataaggattttgtattagagtatattagggaaagtgtgtatttggtctcacaggctgttcagggataatctaaatgtaaatgtctgttgaatttctgaagttgaaaacaaggatatatcattggagcaagtgttggatcttgtatggaatatggatggatcacttgtaaggacagtgcctgggaactggtgtagctgcaaggattgagaatggcatgcattagctcactttcatttaatccattgtcaaggatgacatgctttcttcacagtaactcagttcaagtactatggtgatttgcctacagtgatgtttggaatcgatcatgctttcttcaaggtgacaggtctaaagagagaagaatccagggaacaggtagaggacattgctttttcacttccaaggtgcttgatcaacatctccctgacaacacaaaactagagccaggggcctccgtgaactcccagagcatgcctgatagaaactcatttctactgttctctaactgtggagtgaatggaaattccaactgtatgttcaccctctgaagtgggtacccagtctcttaaatcttttgtatttgctcacagtgtttgagcagtgctgagcacaaagcagacactcaataaatgctagatttacacactcaaaaaaaaaaaa

SEQ ID NO: 3848 - DNA, 1303 bp, Homo sapiens
acagacgcggacagcgccgggactcgccgccccgggactcgcgcagcccgcagcgctccggctcctcctctcgcgaccgccctccgcagcgatggacggagacggtgacccagagagcgtgggccagcccgaggaggcaagcccggaggagcagccagaggaggcgagtgctgaggaggagcggccggaggaccagcaggaggaggaggcggcggccgccgccgcgtacctggacgagctgcccgagccgctgctgctgcgcgtgctggccgcactgccggccgccgagctggtgcaggcctgccgcctggtgtgcctgcgctggaaggagctggtggacggcgccccgctgtggctgctcaagtgccagcaggaggggctggtgcccgagggcggcgtggaggaggagcgcgaccactggcagcagttctacttcctgagcaagcggcgccgcaaccttctgcgtaacccgtgtggggaagaggacttggaaggctggtgtgacgtggagcatggtggggacggctggagggtggaggagctgcctggagacagtggggtggagttcacccacgatgagagcgtcaagaagtacttcgcctcctcctttgagtggtgtcgcaaagcacaggtcattgacctgcaggctgagggctactgggaggagctgctggacacgactcagccggccatcgtggtgaaggactggtactcgggccgcagcgacgctggttgcctctacgagctcaccgttaagctactgtccgagcacgagaacgtgctggctgagttcagcagcgggcaggtggcagtgccccaagacagtgacggcgggggctggatggagatctcccacaccttcaccgactacgggccgggcgtccgcttcgtccgcttcgagcacggggggcaggactccgtctactggaagggctggttcggggcccgggtgaccaacagcagcgtgtgggtagaaccctgagcgaccctgcctccgctctcccccagctgcctggaggggcaaaggtcgagggtagataggccttaacttagtccatagcgtcctcaccttccccaagccacacatcctcctcccatcccttgctccgatcccagcccctgagcagggagagagaagttttgttggcataggtttgcttaggtagccggcttctagaatgtagatccgtgagggcgtgagcttggactggacccactgctgattccctgcacctagcacagtgcttgccacaaagtgggctctcaataaatattatttgtccaaggaaaaaaaaaaaaaaaa

SEQ ID NO: 3849 - DNA, 4678 bp, Homo sapiens; identical to SEQ ID NO: 2526

SEQ ID NO: 3850 - DNA, 6082 bp, Homo sapiens; identical to SEQ ID NO: 2344

SEQ ID NO: 3851 - DNA, 1810 bp, Homo sapiens
ggtgattgatcttttcatccagcacaatggacagaagtctaaggaacgtccttgtggtttcctttgggttcctgcttctctttacagcctatggaggtctgcagagcctgcagagcagcctgtacagcgaggagggcctgggtgtcacagcgctcagcaccctctatggaggcatgctcctgtcctccatgttcctcccaccgctcctcatcgagaggctgggctgcaaggggaccatcatcctctccatgtgtggctacgtggccttctccgtgggcaacttcttcgccagctggtacactttgatccccacctccatactgctgggactcggggccgccccgctgtggtctgcacagtgcacatacctcacgatcacgggaaacacacatgcagagaaggcgggaaagcgtggcaaagacatggtgaaccagtattttggcatcttcttcctcatattccagtcatccggtgtgtggggcaacttgatctcatcgctggtatttggccagactcccagccaagggagtggtgtcctggctgtcctgatgatagctgcgttcctccaacccatacgagatgttcagcgggaaagtgaaggagagaagaaatcagtacctttctggtccactttactgtcgactttcaagctatatagagataaacgtctgtgcctcttaattctgctgccgctgtacagtggattgcagcaaggattcctctccagcgaatacacaaggtcctatgtcacctgcaccctgggcatccagttcgtcggctacgtgatgatctgcttctcggccactgacgcgctgtgctccgtgttgtatggaaaggtctcgcagtacacgggcagggctgtgctgtacgtgctgggcgcggtgacccacgtgtcctgcatgattgccctactgctgtggagacctcgtgctgaccatctggcagtgttcttcgtattctctggcctgtggggcgtggcagatgccgtctggcagacacaaaacaatgctctctacggcgttctgtttgagaagagcaaggaagctgccttcgccaattaccgcctgtgggaggccctgggcttcgtcattgccttcgggtacagcatgtttttgtgcgtgcacgtcaagctctacattctgctgggggtcctgagcctgaccatggtggcgtatgggcttgtggagtgcgtggagtccaagaacccgatcagaccccacgctccaggacaggtcaaccaggcagaggatgaagaaatacaaacaaaaatgtgagagcagtgaggtccgaggaggatgaactcagaaagcaccagccagagaattttcttagaagatgcctcaggacatagagcggctcctcatcaccatctcagcacaatttggccattctgaagagatcatgttatttcactctttatgtattttttttctattctaacaaatttttcgtccaccatcttaacagagatcaagtgtatacatgaaggtatcagttcatttaattttagatgcaaaagaaaaaggtctaacgtacaatcagccaattagaatttgcctgaaatcatagactcaccctagttttattgctgtagttgtttttaagaattggaagcctgcttaaaaaatgtagttgagccccataattttacaaatgggcgaacttttaaacttctaactctacttggatcaaaacctcatacattttacaaaggggtcctgacaagtcagctgactcaacctcacagagtcagggggtgacaaagccagactggggctcaggattcctgaaacgtgtggggtctgcgttt

SEQ ID NO: 3852 - DNA, 3341 bp, Homo sapiens; identical to SEQ ID NO: 1533

SEQ ID NO: 3853 - DNA, 1665 bp, Homo sapiens; identical to SEQ ID NO: 1798

SEQ ID NO: 3854 - DNA, 2621 bp, Homo sapiens
ccttttttggcctcgacggcggcaacccagcctccctcctaacgccctccgcctttgggaccaaccaggggagctcaagttagtagcagccaaggagaggcgctgccttgccaagactaaaaagggaggggagaagagaggaaaaaagcaagaatcccccacccctctcccgggcggagggggcgggaagagcgcgtcctggccaagccgagtagtgtcttccactcggtgcgtctctctaggagccgcgcgggaaggatgctggtccgcaggggcgcgcgcgcagggcccaggatgccgcggggctggaccgcgctttgcttgctgagtttgctgccttctgggttcatgagtcttgacaacaacggtactgctaccccagagttacctacccagggaacattttcaaatgtttctacaaatgtatcctaccaagaaactacaacacctagtacccttggaagtaccagcctgcaccctgtgtctcaacatggcaatgaggccacaacaaacatcacagaaacgacagtcaaattcacatctacctctgtgataacctcagtttatggaaacacaaactcttctgtccagtcacagacctctgtaatcagcacagtgttcaccaccccagccaacgtttcaactccagagacaaccttgaagcctagcctgtcacctggaaatgtttcagacctttcaaccactagcactagccttgcaacatctcccactaaaccctatacatcatcttctcctatcctaagtgacatcaaggcagaaatcaaatgttcaggcatcagagaagtgaaattgactcagggcatctgcctggagcaaaataagacctccagctgtgcggagtttaagaaggacaggggagagggcctggcccgagtgctgtgtggggaggagcaggctgatgctgatgctggggcccaggtatgctccctgctccttgcccagtctgaggtgaggcctcagtgtctactgctggtcttggccaacagaacagaaatttccagcaaactccaacttatgaaaaagcaccaatctgacctgaaaaagctggggatcctagatttcactgagcaagatgttgcaagccaccagagctattcccaaaagaccctgattgcactggtcacctcgggagccctgctggctgtcttgggcatcactggctatttcctgatgaatcgccgcagctggagccccacaggagaaaggctgggcgaagacccttattacacggaaaacggtggaggccagggctatagctcaggacctgggacctcccctgaggctcagggaaaggccagtgtgaaccgaggggctcaggaaaacgggaccggccaggccacctccagaaacggccattcagcaagacaacacgtggtggctgataccgaattgtgactcggctaggtggggcaaggctgggcagtgtccgagagagcacccctctctgcatctgaccacgtgctacccccatgctggaggtgacatctcttacgcccaacccttccccactgcacacacctcagaggctgttcttggggccctacaccttgaggaggggcaggtaaactcctgtcctttacacattcggctccctggagccagactctggtcttctttgggtaaacgtgtgacgggggaaagccaaggtctggagaagctcccaggaacaatcgatggccttgcagcactcacacaggacccccttcccctaccccctcctctctgccgcaatacaggaacccccaggggaaagatgagcttttctaggctacaattttctcccaggaagctttgatttttaccgtttcttccctgtattttctttctctactttgaggaaaccaaagtaaccttttgcacctgctctcttgtaatgatatagccagaaaaacgtgttgccttgaaccacttccctcatctctcctccaagacactgtggacttggtcaccagctcctcccttgttctctaagttccactgagctccatgtgccccctctaccatttgcagagtcctgcacagttttctggctggagcctagaacaggcctcccaagttttaggacaaacagctcagttctagtctctctggggccacacagaaactctttttgggctcctttttctccctctggatcaaagtaggcaggaccatgggaccaggtcttggagctgagcctctcacctgtactcttccgaaaaatcctcttcctctgaggctggatcctagccttatcctctgatctccatggcttcctcctccctcctgccgactcctgggttgagctgttgcctcagtcccccaacagatgcttttctgtctctgcctccctcaccctgagccccttccttgctctgcacccccatatggtcatagcccagatcagctcctaacccttatcaccagctgcctcttctgtgggtgacccaggtccttgtttgctgttgatttctttccagaggggttgagcagggatcctggtttcaatgacggttggaaatagaaatttccagagaagagagtattgggtagatattttttctgaatacaaagtgatgtgtttaaatactgcaattaaagtgatactgaaacacaaaaaa

SEQ ID NO: 3855 - DNA, 5124 bp, Homo sapiens
gagactcagccagaggagtacggattaagtggccgaagaaagaggagtgaggcaggggagcgaggcggacgctccgagcgcatcggactcacctgggccggcggcgagcggcgagtacgagtggactcttgccctccgcagcatgcgccccgcctgctaagtcgccgccgtctcgccctcacctagcaccgccaatcccgcctggatggagtcccctctgggttcccattggctcctgtgagtgcttgggtgtcgggagcctgttttcggcgaggggaaccaacttttgaagttcgcccagaagactgcgttccagccccagttccccggcagcgggacccggcgaagacgcgaccgcggcgcgagtcaccatgggaagcaaaggtgtctaccagtaccactggcaaagccacaatgtcaagcacagtggtgtggacgacatggtgctactgtccaagatcacagagaactccatcgtggagaatctgaagaagagatacatggatgactacatttttacatatataggatctgtattaatctcagtcaaccctttcaagcagatgccatattttggggaaaaggaaattgaaatgtaccaaggagcggcacagtatgaaaacccaccacatatctatgcccttgcagataatatgtacagaaacatgatcattgacagagagaaccagtgcgtcattatcagtggtgaaagtggtgctggaaaaacagtggctgccaaatatatcatgagctacatctccagagtgtctggaggagggaccaaagtccagcacgtgaaggacattatcctgcagtccaacccgctgctggaggccttcgggaacgccaagaccgtccggaacaacaactccagccgatttggaaaatactttgaaatccagttcagtccaggtggggaaccagatggtggaaagatctccaacttccttctggaaaaatctagggtggtgatgaggaacccaggagagcggagttttcacatattttaccagctcatcgagggcgcctctgcagagcagaaacacagccttggcatcaccagcatggactattattactacctgagcctctcgggctcatacaaggttgatgacattgacgacaggcgggagtttcaggaaactctgcacgccatgaatgtgattgggatctttgcagaagagcaaacgctggtgttgcagatagtggcgggtattctccacctgggaaacatcagcttcaaagaagttggcaactacgcggctgtggagagtgaagagtttttagcttttcctgcatatctgctagggataaaccaggaccggttgaaagaaaagctaacaagccggcagatggatagcaagtggggaggcaaatccgaatccatccacgtgaccctcaacgtagagcaggcctgttacacccgggatgcgctcgccaaggccctgcacgcccgggtctttgatttcttggtagattccatcaataaagccatggagaaagaccatgaagaatacaacattggcgtcctagacatctatggctttgaaatattccagaaaaatggctttgaacagttttgtatcaattttgttaatgaaaaactgcagcagatttttattgaactgacattaaaggcagaacaggaagaatatgttcaagagggaataagatggacacccattgagtactttaataataaaatcgtatgtgacctcatagagaacaaagtgaaccctcctggcatcatgagcatcctggatgacgtgtgcgccacgatgcatgcggtgggtgagggggcagatcagacgctgctccagaaacttcagatgcagattgggagtcatgagcacttcaacagttggaaccaaggcttcatcattcatcattatgctgggaaggtatcctatgacatggatggcttttgtgaaaggaaccgggatgtgctttttatggatctcatcgagcttatgcagagcagcgagctgcctttcataaagtctttatttccggaaaatctgcaggctgacaagaaagggcgcccaactactgccggaagcaaaataaagaaacaagccaatgaccttgtgagcaccctgatgaaatgtacgccccactacattcgctgcatcaagccaaacgaaaccaagaagcccagagactgggaggaaagcagggtaaagcatcaagtcgaatatttgggtctgaaagagaacattcgagtgagaagagctggctatgcctatcggcgcatcttccaaaaattcctacagaggtatgccattctgaccaaagccacctggccttcttggcagggagaggagaagcaaggcgtcctgcacctgctgcagtcggtcaacatggacagcgaccagttccagctggggaggagtaaagtgttcatcaaagcccccgagtctctatttcttttagaagagatgagagagagaaagtatgatgggtatgctcgagtgatacagaaatcatggaggaaattcgtggcccggaagaaatacgttcaaatgagagaagaagcctcagacctcttattgaacaagaaggagagaaggagaaacagtattaacaggaactttataggggattatattgggatggaagagcacccagaactccagcagttcgtgggcaagagggagaagattgatttcgcagacacagtcaccaagtatgacaggaggttcaagggtgtaaagcgagacctgctccttaccccaaagtgcttgtacttaatcggacgagaaaaagtcaaacagggcccagacaagggcctggtgaaagaagtcctgaagcggaaaatcgagatagaacggatcttgtctgtgtccctcagtactatgcaggatgacatttttattctccatgagcaagagtatgacagtttgcttgaatctgtcttcaaaactgaattcctaagcctcttagcaaagcgttacgaggagaagacccagaagcaactacctctgaaattcagcaatacgcttgaactgaagttgaaaaaggaaaactggggcccctggagtgcagggggctcccggcaagtgcagttccaccaagggtttggggacctggctgtcctcaagcccagtaacaaagtgctgcaggtcagcatcggacctggactgcccaagaactcccgtcctaccagaaggaacactacccaaaatacaggttattccagtgggactcaaaatgccaactacccagtgagagctgcccctcctcccccaggataccatcagaacggagtcatcagaaaccagtatgtgccatatccccatgctcctggaagccagaggtccaatcagaaaagcctgtacacctccatggcccgcccgcccttgcctcggcagcagtctaccagttcagaccgagtgtcacagacgccagagagcctggatttcctcaaggtcccggaccagggagctgcaggggtcaggagacaaacaaccagtcggcctcccccagcagggggcagacccaagccccagcccaagcccaagcctcaggtgccacagtgcaaggctttgtatgcctatgacgctcaggacacagacgaactcagctttaatgccaatgacattattgatattatcaaagaagatccttctggctggtggacgggtcgactacgaggcaagcagggcctgttccccaacaactatgtgaccaagatctgaggtgcccgtgactctgacacatggggcagaggagctccaggcacagaccaggggaggggatatttaggggctccccttacaatccacaatgagcaattgcttctccaaggcctggagctattctggtaccttccccatggaggacactgaaaaggctgggttggggacagggagtatcactccataagtgatcctaaaaggtagcctcttcataggaacccaggaggacaaaaccaccatgcattaagatttatttattgtatttaaacctggtgagaggacaagtgaggtctgctcagaccttgtaggcttctatcaaaacagcaccctgcttgctcaccaggcctagagaatggctgtaggtggccgctgacaagtgcctttagttgaagagcacatttctttcatctctcttgtctatacctgatagacacattcctctctgccaccttccttcagggaggacccgccctctgcagactgggcttagcgtgagcaggcacttcccatgtacgtgccaagggtaagctggcctgctgagcccagggcgacagaggggcactggtttacactttgccgggaccatcagggccgccaagcaggtcaggggctgggggctgggggctgggctgctggctttgctttctctgggtcttcaattagaatgtggctggcccatattggtttgtgtttaaatgctgtacttactacaagaaggatcttttttcaagctgtacatttataaaaacagatcatatactgtatatataaaaatcttgagatggtagaaacatgtatgaatgtactaagtagtattccactgtactcattcataaggtaggttttcttacaaaactcacaccaggtacttaaagatgtgctctgcttttttccaactacggagtgtcactgctttctaggtcagtccctgcagactcttctcaactctttccctataggaaacttactccgcgtcctgcccccacctcctaaataaataaaggaatcggcgaacaccttcttcttttatgacatttgttatgggttgaattgtgtgcctccaaagaagatgttggagtcccagccaccagtacctcacaatatgaccttatttggaaatagagtctttatggagcaaacaaacaaaactaattaaaatgaagtcattagagtgggtcttaatccaatataatggtgtcctgatgaaaaggggaaatttggacacagagaccaacatgccagaggaaagaccatgtgaaaaggcagggagaagacagccattcacaagccctggacagaggcctggaacagattctccctcacaccctcacaaggaaccagccctgcccaccttggtcttggacttccaacctccagaactgtgaggcaatacatttcgctgtttaagccaaaaaaaaaaaaaaaa

SEQ ID NO: 3856 - DNA, 2768 bp, Homo sapiens
ggatgggaggatactgactaagtctgagaaggaggagaaagaaaattagctacaggaagagtttatatccccttctacaagaaaacttaaatatagctaccaccgctttgaaaggaatggtttgtgtccaaacagcattttccagacaagctctgtacttttttgccaaaagaattaactttaaactgaaggcagtggacagttaaacaagagtcggcactgggaacagctgtgcgtagaccagaccagtgacttataaggaggcgatcgagatcggatgacagcaaatcatgaaagctacctcctcatggcaagcacccagaatgatatggaagactgggtgaagtcaatccgccgagtcatatggggacctttcggaggaggcatttttggacagaaactggaggatactgttcgttatgagaagagatatgggaaccgtctggctccgatgttggtggagcagtgcgtggactttatccgacaaagggggctgaaagaagagggtctctttcgactgccaggccaggctaatcttgttaaggagctccaagatgcctttgactgtggggagaagccatcatttgacagcaacacagatgtacacacggtggcatcacttcttaagctgtacctccgagaacttccagaaccagttattccttatgcgaagtatgaagattttttgtcatgtgccaaactgctcagcaaggaagaggaagcaggtgttaaggaattagcaaagcaggtgaagagtttgccagtggtaaattacaacctcctcaagtatatttgcagattcttggatgaagtacagtcctactcgggagttaacaaaatgagtgtgcagaacttggcaacggtctttggtcctaatatcctgcgccccaaagtggaagatcctttgactatcatggagggcactgtggtggtccagcagttgatgtcagtgatgattagcaaacatgattgcctctttcccaaagatgcagaactacaaagcaagccccaagatggagtgagcaacaacaatgaaattcagaagaaagccaccatggggcagttacagaacaaggagaacaataacaccaaggacagccctagtaggcagtgctcctgggacaagtctgagtcaccccagagaagcagcatgaacaatggatcccccacagctctatcaggcagcaaaaccaacagcccaaagaacagtgttcacaagctagatgtgtctagaagcccccctctcatggtcaaaaagaacccagcctttaataagggtagtgggatagttaccaatgggtccttcagcagcagtaatgcagaaggtcttgagaaaacccaaaccacccccaatgggagcctacaggccagaaggagctcttcactgaaggtatctggtaccaaaatgggcacgcacagtgtacagaatggaacggtgcgcatgggcattttgaacagcgacacactcgggaaccccacaaatgttcgaaacatgagctggctgccaaatggctatgtgaccctgagggataacaagcagaaagaacaagctggagagttaggccagcacaacagactgtccacctatgataatgtccatcaacagttctccatgatgaaccttgatgacaagcagagcattgacagtgctacctggtccacttcctcctgtgaaatctccctccctgagaactccaactcctgtcgctcttctaccaccacctgcccagagcaagacttttttggggggaactttgaggaccctgttttggatgggcccccgcaggacgacctttcccaccccagggactatgaaagcaaaagtgaccacaggagtgtgggaggtcgaagtagtcgtgccaccagtagcagtgacaacagtgagacatttgtgggcaacagcagcagcaaccacagtgcactgcacagtttagtttccagcctgaaacaggaaatgaccaaacagaagatagagtatgagtccaggataaagagcttagaacagcgaaacttgactttggaaacagaaatgatgagcctccatgatgaactggatcaggagaggaaaaagttcacaatgatagaaataaaaatgcgaaatgccgagcgagcaaaagaagatgccgagaaaagaaatgacatgctacagaaagaaatggagcagtttttttccacgtttggagaactgacagtggaacccaggagaaccgagagaggaaacacaatatggattcagtgagcctgctttcgcctgctgtctctgatggctctggcaaggactccagggattctggtgggatatgacttagaaccaggtggctggtcacctggatgtacagaagtctaactggtgaaggaatatcatttacagacattaaacatccatatctgcaatgtgtaccaaagttatatcatgccccataatgctactgtcaagtgttacaactggatatgtgtatatagagtagtttttcaaaagtaaactaaaaatgagaagcatatttcaagaattattttattgcaagtcttgtatttaaatgttaaatcaatatgttgttgcaatttagcttgctttcaagcttcaccccttgcacttaacataagctatttttggcattgtgttatcatcggcttattttatagatcaatatttttatttcccttttttgctgaggaaatgaagataagcaaaaatataaatatatatataaatatatgagttattaaaatcagaagaataaaaaaacaacaaaaaaaaaaaaaaaaaa

SEQ ID NO: 3857 - DNA, 5526 bp, Homo sapiens
gtctctccaagggaatgaaaggtgaggggagcgtgagtgcaggcatgatgggaatctccgtgacttgtgaaccaaggactgggttttgctctggaagcctgtcctgattgcttctgtaatctggcgctatgcatccggatcttggacccttatgtacactgctgtatgttactcttacaattctgtgctcttctgtgagttcagacttggcaccttattttacttctgagccgctctctgctgtccagaaacttggtggacctgtagtactgcattgttctgctcaacctgtgaccactcgtatctcatggctgcataacggaaaaacattggatggaaacctggaacatattaagattcatcaggggactctgacaattctttctctcaactcctctcttttgggttactaccagtgccttgccaacaatagcatcggtgccattgtgagtggccctgcgacagtatctgtggcagttcttggtgattttggttcatccacaaagcatgttattacagcagaagaaaaaagtgctggtttcattggctgcagggtaccggagagtaaccccaaagctgaggtgcgctataaaatccggggaaaatggctggaacattccacagagaattacttaatccttccatcaggaaatcttcagattttgaatgtatccttagaggacaagggatcatacaaatgtgcagcttataatcctgtcacacatcaattaaaagttgaacctattggccgaaagctccttgtgagtcgtccttcttcagatgatgttcacattcttcaccccacccattcacaggcattagctgttctttctcgtagccctgtaaccttggagtgtgtggtgagtggggtcccggctcctcaagtgtattggctaaaggacgggcaggacattgcaccagaaagcaactggagaaggttgtattctcatcttgccactgatagcgttgacccggcggactccggaaactattcctgcatggcgggaaacaagtctggagatgtaaaatatgtgacttacatggttaatgtacttgaacatgcttccatttctaaaggactacaggatcagatagtgtctctgggtgccacagtacactttacctgcgacgttcatgggaacccagcccccaactgtacctggtttcacaatgcacagcctattcatccttctgcacgacatctaactgcaggaaacggactgaaaatcagtggggttactgtggaagatgttgggatgtatcagtgtgtagcagataatgggattggatttatgcactctactggaagacttgaaattgaaaatgacggtggattcaagccagttataattacggcaccagtaagtgcaaaggttgcagacggagactttgttactctgtcctgcaatgccagtgggctgccggttccggtcattcgttggtatgacagccatggattgataaccagccatccatctcaagtcctgagatcgaaatcccgaaaatcacagttatcaagacctgagggcttgaacctggagcctgtgtacttcgtcctgtcccaagctggtgcaagctctctccatattcaggctgtgactcaggaacatgcggggaaatacatctgcgaagctgcaaatgaacatggtaccacacaggcagaagcatctctcatggttgttccttttgaaacaaatacaaaagcagagacagtcacacttcctgatgctgctcagaatgatgacagaagtaagagagatggttcagaaactgggttactgagctcatttccggtgaaggtccatcccagtgcagtggaatcagcaccagagaaaaacgccagcggcatctctgttcctgatgcccccatcatactgagccccccacagacccacacaccagacacgtacaacctggtgtggagggcaggcaaggatggtgggctgcccatcaatgcttactttgtgaagtatcgaaagctggatgatggggttggcatgctgggaagctggcacacggttcgagtcccaggaagtgaaaatgagctccatttagctgagctggagccatctagtctttatgaagtcttgatggtagcaagaagcgcagcaggtgaaggccaacctgccatgcttaccttccgaaccagcaaagaaaaaacagcgtcatcaaaaaacacccaggcatcctctccacccgtgggcatccctaagtatcccgttgtttcagaggctgcaaacaacaattttggagtggtacttacagattcctctaggcacagtggagttccagaggcaccagatcggcctaccatctccactgcatcagagacatcagtctatgtcacttggattcctcgggcaaacgggggttctccaatcactgccttcaaagtcgaatataaacggatgaggaccagcaattggctggtggcagctgaagacatccctccttccaaactttcagtggaagttcgtagtttagaaccaggttcaacatacaaatttagggtcattgccatcaaccattatggtgagagttttcggagttcagcatctcgtccttatcaagtggttgggttccccaatcgcttttccagccgtccaataactggacctcacattgcatacacagaggctgtcagcgatactcagatcatgctaaagtggacgtacattccatcaagtaacaataacactcccattcaaggattttatatctattaccgaccaacagatagtgacaatgacagtgattacaagagggatgttgtagaaggttcaaagcagtggcacatgattggccacctgcagccagaaacctcctatgacattaaaatgcaatgcttcaatgaaggaggagaaagtgaatttagcaatgtgatgatctgcgagactaaagtgaaacgtgttcctggagcttctgaatatcctgtcaaagacttgagtacccctccaaattctttgggaagtggaggaaatgtggggcctgcaaccagccctgccagaagcagtgacatgttatatctgatcgttggctgtgtgctgggcgtcatggtcctcattctgatggttttcattgcaatgtgcctgtggaagaatcgccagcagaataccatacaaaaatatgacccaccaggatatctctaccaaggatcagatatgaacgggcagatggtggactacaccactctctcaggagcaagtcagataaatggaaatgttcacggaggcttcctaaccaatggcggtctcagcagtggctattcccaccttcaccataaggtccccaatgcagtcaatggaattgtgaatgggagcctaaatggagggctttactccgggcacagcaactctctaaccaggacacacgtggattttgaacatcctcatcatctagtgaatggtggtggaatgtacacagccgtgcctcagattgaccctctggagtgtgttaactgccgaaattgtcgaaacaacaataggtgtttcaccaaaaccaacagcactttcagcagcagccctcctcctgtggtccctgtggtagcaccttatcctcaggatggtttggaaatgaagcccctcagtcacgtgaaggtgcctgtatgcctgacttccgcagtccctgattgtggccagttgccggaggagagcgtcaaggacaatgtggaaccagttcctactcagcgtacctgctgtcaggacattgtaaatgacgtcagctctgatggctcagaagatccagcagagttcagcagaggtcaggaaggcatgatcaaccttaggattccagatcatcttcagttagctaagagctgtgtatgggaaggagacagctgtgcccattcagaaacagagaacaacattgtaagttggaatgctcttattttgccacctgtccccgagggctgtgctgagaagacaatgtggtctccacctggcattcctttagacagcccgacagaggtccttcagcagccccgggaaacctgaggacatgcaaacaaccagtcatgttccaacttcaagccggtaactgcacacaacaggcctgggagcgaactgtgtgaaggaccttaattcaaatcagagaaaatcattatttatttttttgtagtagtaatgtcatatggatgtatcttaaaacgtgtgcccttttatattatttatgccttaaatgttttcttccccattccttcctccccctcggtaggaaacaaccttgttttgcatagtattcagtcacctggagggcagaggggtccttccatgttttctaacagctatagtgacagcaagagctcctcatgcaaaggatcccatctcttggctgcttcggctaggagggaatgcaggggcccgttgaaggttgccaccagctgggttttcaggtggaaaatggtctttcaatagtgtattctcagacttttttttgtttgttttttgagatggagtcttgctgtcatccaggctggagtgcaatggctcgatcttggctcactgcaacctccgcctcccaggttcaagcaattctcccgcctcagcctcctgagtagctgggactacaggcacctgccaccacgtccagctaattgtcttgtatttttattagagacaaggtttcaggctggttttgaactcctgacctcaagtgatccacccgcctccgcctcccaaagtgcgaggattacaggcgtgagccaccacgtctggcctgtattatcagacttcctgagaacactttgaaatcaactgcagttgtgacccatgtttataataacagacctggctgacggattttacaagagtgccttccacagaagtggtaatgtgacctgttgactttgtatctgcacgtgggcacgagtgatgttcagtttgctaggcactagtcatagtgttatggacgtggtggagtgtaaggtcttgatgaattacggcagtatgcagaaaaggaaccaaggccagagagacaaataatgcctcatgtcccactgctttaaaattacattaatttataaaatggccactatgggctctttttgactgtttctcggagtaggaacaaaataagacattaaatggtggcttgaagagaaagatacacattttcagaagaaagaaaggggagggctgcagggagcctgtcttggcgggagctctccagtctgttggattagcacagggacacgcttatggtgccatgacgccgaaactagtcatcccccatctccagcataggcaacggcctgcaggggtgagtgtcagaaaagacttactttggaagaaaagggtttttttttgtttgtttgttttttgtttttttttgtttgtttgttttgggtttttttcctgaaatttcctgatacctttttcagaatgtcacccttgtaaataggcacctaaagccaagttggtcagcagagctcctgaccacggctgcctctgcgtgacaaggacatttgcagctgcctttggaaggctcttcacattaaaaaacaataattatgtaaaaaaaaaaaaaaaa

SEQ ID NO: 3858 - DNA, 4483 bp, Homo sapiens
aaaaaccaccgaattgagctctgtcagaggcgctttcggcttccaagggggaagtgctgggctataattaatgtttttattaaatttggagggaagtttttgcagcctttcgcctagcgtggccttcagtcccgttaggtgcaaagcaagtctcgttgatcgccattgctagttttgcacacgtttgcgaatcagagctgcccggggtacaccgaccgcgcagggaaacatcgagagtgtaaataaatacatcgcctcttgttcggatttttgctactaccgaaaatatgtaaattgtgaactctgttggctctctttggatccaggttgatagaagtccagatcctgaggaaatctccagctaaatgctcaaaatataaaatactgagctgagatttgcgaagagcagcagcatggatggattttatgaccagcaagtgccttacatggtcaccaatagtcagcgtgggagaaattgtaacgagaaaccaacaaatgtcaggaaaagaaaattcattaacagagatctggctcatgattcagaagaactctttcaagatctaagtcaattacaggaaacatggcttgcagaagctcaggtacctgacaatgatgagcagtttgtaccagactatcaggctgaaagtttggcttttcatggcctgccactgaaaatcaagaaagaaccccacagtccatgttcagaaatcagctctgcctgcagtcaagaacagccctttaaattcagctatggagaaaagtgcctgtacaatgtcagtgcctatgatcagaagccacaagtgggaatgaggccctccaacccccccacaccatccagcacgccagtgtccccactgcatcatgcatctccaaactcaactcatacaccgaaacctgaccgggccttcccagctcacctccctccatcgcagtccataccagatagcagctaccccatggaccacagatttcgccgccagctttctgaaccctgtaactcctttcctcctttgccgacgatgccaagggaaggacgtcctatgtaccaacgccagatgtctgagccaaacatccccttcccaccacaaggctttaagcaggagtaccacgacccagtgtatgaacacaacaccatggttggcagtgcggccagccaaagctttccccctcctctgatgattaaacaggaacccagagattttgcatatgactcagaagtgcctagctgccactccatttatatgaggcaagaaggcttcctggctcatcccagcagaacagaaggctgtatgtttgaaaagggccccaggcagttttatgatgacacctgtgttgtcccagaaaaattcgatggagacatcaaacaagagccaggaatgtatcgggaaggacccacataccaacggcgaggatcacttcagctctggcagtttttggtagctcttctggatgacccttcaaattctcattttattgcctggactggtcgaggcatggaatttaaactgattgagcctgaagaggtggcccgacgttggggcattcagaaaaacaggccagctatgaactatgataaacttagccgttcactccgctattactatgagaaaggaattatgcaaaaggtggctggagagagatatgtctacaagtttgtgtgtgatccagaagcccttttctccatggcctttccagataatcagcgtccactgctgaagacagacatggaacgtcacatcaacgaggaggacacagtgcctctttctcactttgatgagagcatggcctacatgccggaagggggctgctgcaacccccacccctacaacgaaggctacgtgtattaacacaagtgacagtcaagcagggcgtttttgcgcttttccttttttctgcaagatacagagaattgctgaatctttgttttatttctgttgtttgtattttatttttaaataataatacacaaaaaggggcttttcctgttgcattattctatggtctgccatggactgtgcactttatttgagggtgggtgggagtaatctaaacatttattctgtgtaacaggaagctaatgggtgaatgggcagagggatttggggattactttttacttaggcttgggatggggtcctacaagttttgagtatgatgaaactatatcatgtctgtttgatttcataacaacataagataatgtttattttatcggggtatctatggtacagttaatttcacgttgtgtaaatatccacttggagactatttgccttgggcattttcccctgtcatttatgagtctctgcaggtgtacaaaaaaaccccaatctactgtaaatggcagtttaattgttagaaatgactgtttttgcaccacttgtaaaaaggtatttagcgattgcatttgctgtttgttgttttattttgctttatatatgacttgcagaggataaccataaaatgggtaattctctctgaagttgaataatcaccatgactgtaaatgaggggcacaattttggactctggcgccaaactgagtcataggccagtagcattacgtgtatctggtgccaccttgctgtttagatacaaatcataccgtcttttaaatattttgaagcccatttcagttaaataatgacatgtcatggtcctttggaatcttcatttaaatgttaaatctggaatcaaaatgaagcaaaaaatatctgtctccttttcactttcttcagtacataaatacattatttaatcaataagaattaactgtactaaatcatgtattatgctgttctagttacagcaaacactctttaagaaaaatatccaatacactaaataggtactatagtaatttttagacatggtacccattgatatgcatttaaaccttttactgctgtgttatgttgataacatatataaatattagataatgctaatgcttctgctgctgtcttttctgtaatattctctttcatgctgaatttactatgaccatttataagcagtgcagttaactacagatagcatttcaggacaaaatagatgactcaaaccatttattgcttaaaaaatagcttacgccatgctatgctataagcagcttttatgcacattgacaaatgaagagtaagcttcagcttgctaaaggaaactgtggaaccttttgtaacttttggtgatatggaaaattatttacaaaccgtcaaagaatatgaggaagttgctgtatgacatagtgctggcactgatattatccatcatctctttttggacacttctgtaaatgtgattggattgtttgaaagaagatttaaagtttcaaagttttttgttctgtttttgctttgcatttggagaaaatattgaaagcagggtatgttgtttcattcaccttgaaaaaaccatgagtaaatggggatatagaatctctgaatagctcgctaaaagattcaagcaagggacatgaattttgttccatctatcaataatatccagaagaacaacttttttaaagagtctatagcaaaaagcaaaaaaaaaaaaaaaattctaaacacaaagtcaaaataaacctattgtaaaagcatttcgtgatgagcatgaaaaagattgtttaaagatgatccccccagctacccattttccaaaactacacagatcacagctcatttctctaagtggagcagttatcaagaaacccaaacaccaaaattgctactcttcacatttaatcctacaaaaagtactccaatttcaaaatatgtatgtaacctgcgatttcaatgattgttgttcatatacatcatgtattattttggcccattttgggcctaaaaaagaaaactatgccttaaaaaccagaaccttttctccccactatgcttatgtggccatctacagcacttagaataaaaacagatgttaaaatattcagtgaaagttttattggaaaaaggaattgagatatataattgagatttggtgaaattgaaggagaaaatttaagtgagtctttaaaatatattctgaatgaaaactgtattgaggattcatttttgttccttttttttctttttctcttttctcctttttcttctttttaatagtctagttttagtcagtcagtgaggaagaattgggccatgctaacgttatcacaagagaacaatggcagaaatggtattagttatataatatttaaggacaaactatatgttttgctgttttaacgtagtgactcactgaactaaatacataattgaccaacattaagtgtatttccaatacagaagggttgaaaatattacattataaactcttttgaaaaatgtatctaaaattttttaagttctgttttgattccactttttggttgagtttttatgtttttgttttcaggtagattaataaatctggcagctgatttctgcaaaaaaaaaaaaaaaaaaaaaaaagaaaaaaaaaaaaaaaa

SEQ ID NO: 3859 - DNA, 3043 bp, Homo sapiens
agacgcgcgggcgcgggggacggcgcaggggccgcctggctggagcagccagaggggatagcttcgtcgagaacggaggacaccggcggtccagggtcctgggcagtcgcgccagagctgagcggagggcgcggcgcgagaacgaatctttgtgacattctctctcagcattctttatcccctgtttgctgaagacttcgaccaaagctggtcttagctgttggcattctcctgagaaaaggatagcttcagaaatcagaaaaacatttgggaggtgtctagcccagtggaccttctgaagagcaatgctaagaagacgtttggtttaaagaattaaaaggaagaacaacttaagagcttcttcaaagtttcccgcatgaaaattacttaaacgttgcacacaacgtttcacaaaatcttttgtgaaagaagaaaaggaaattcagtgtgtgagtctcagcaggagttaagctaatgcagcttaaaataatgccgaaaaagaagcgcttatctgcgggcagagtgcccctgattctcttcctgtgccagatgattagtgcactggaagtacctcttgatctggtacagcctccaaccatcacccaacagtctccaaaagattacattattgaccctcgggagaatattgtaatccagtgtgaagccaaagggaaaccgcccccaagcttttcctggacccgtaatgggactcattttgacatcgataaagaccctctggtcaccatgaagcctggcacaggaacgctcataattaacatcatgagcgaagggaaagctgagacctatgaaggagtctatcagtgtacagcaaggaacgaacgcggagctgcagtttctaataacattgttgtccgcccatccagatcaccattgtggaccaaagaaaaacttgaaccaatcacacttcaaagtggtcagtctttagtacttccctgcagacccccaattggattaccaccacctataatattttggatggataattcctttcaaagacttccacaaagtgagagagtttctcaaggtttgaatggggacctttatttttccaatgtcctcccagaggacacccgcgaagactatatctgttatgctagatttaatcatactcaaaccatacagcagaagcaacctatttctgtgaaggtgatttcagtggatgaattgaatgacactatagctgctaatttgagtgacactgagttttatggtgctaaatcaagtagagagaggccaccaacatttttaactccagaaggcaatgcaagtaacaaagaggaattaagaggaaatgtgctttcactggagtgcattgcagaaggactgcctaccccaattatttactgggcaaaggaagatggaatgctacccaaaaacaggacagtttataagaactttgagaaaaccttgcagatcattcatgtttcagaagcagactctggaaattaccaatgtatagcaaaaaacgcattaggagccatccaccataccatttctgttagagttaaagcggctccatactggatcacagcccctcaaaatcttgtgctgtccccaggagaggatgggaccttgatctgcagagctaatggcaaccccaaacccagaattagctggttaacaaatggagtcccaatagaaattgcccctgatgaccccagcagaaaaatagatggcgataccattattttttcaaatgttcaagaaagatcaagtgcagtatatcagtgcaatgcctctaatgaatatggatatttactggcaaacgcatttgtaaatgtgctggctgagccaccacgaatcctcacacctgcaaacacactctaccaggtcattgcaaacaggcctgctttactagactgtgccttctttgggtctcctctcccaaccatcgagtggtttaaaggagctaaaggaagtgctcttcatgaagatatttatgttttacatgaaaatggaactttggaaattcctgtggcccaaaaggacagtacaggaacttatacgtgtgttgcaaggaataaattagggatggcaaagaatgaagttcacttagaaatcaaagatgctacatggatcgttaaacagcccgaatatgcagttgtgcaaagagggagcatggtgtcctttgaatgcaaagtgaaacatgatcacaccttatccctcactgtcctgtggctgaaggacaacagggaactgcccagtgatgaaaggttcactgttgacaaggatcatctagtggtagctgatgtcagtgacgatgacagcgggacctacacgtgtgtggccaacaccactctggacagcgtctccgccagcgctgtgcttagcgttgttgatgtcccaaatcctccctttgacttagaactgacagatcaacttgacaaaagtgttcagctgtcatggaccccaggcgatgacaacaatagccccattacaaaattcatcatcgaatatgaagatgcaatgcacaagccagggctgtggcaccaccaaactgaagtttctggaacacagaccacagcccagctgaagctgtctccttacgtgaactactccttccgcgtgatggcagtgaacagcattgggaagagcttgcccagcgaggcctctgagcagtatttgacgaaagcctcagaaccagataaaaaccccacagctgtggaaggactgggatcagagcctgataatttggtgattacgtggaagcccttgaatggtttcgaatctaatgggccaggccttcagacaagtactgcctctttttaaaatattaggtttgagtccatctaaaggcaaagtcattatgtgttttgagaggatggttttattaaatataaatgtaaatgacaagagagaaaaaggaagagaataactaaatgggtgcctgtcacaggtttgtactaatgtattttcagctgaatcaggaatgagttactgaaactcaaaaccttgaatcgtgcgagcacggtgaaatgtcaatttaatacatgttgaaacattcagaaaaaaaaaaaaaaaa

SEQ ID NO: 3860 - DNA, 3655 bp, Homo sapiens; identical to SEQ ID NO: 1961

SEQ ID NO: 3861 - DNA, 2210 bp, Homo sapiens
agcaatcctttctttcagctggagtgctcctcaggagccagccccacccttagaaaagatgttttccatgaggatcgtctgcctggtcctaagtgtggtgggcacagcatggactgcagatagtggtgaaggtgactttctagctgaaggaggaggcgtgcgtggcccaagggttgtggaaagacatcaatctgcctgcaaagattcagactggcccttctgctctgatgaagactggaactacaaatgcccttctggctgcaggatgaaagggttgattgatgaagtcaatcaagattttacaaacagaataaataagctcaaaaattcactatttgaatatcagaagaacaataaggattctcattcgttgaccactaatataatggaaattttgagaggcgatttttcctcagccaataaccgtgataatacctacaaccgagtgtcagaggatctgagaagcagaattgaagtcctgaagcgcaaagtcatagaaaaagtacagcatatccagcttctgcagaaaaatgttagagctcagttggttgatatgaaacgactggaggtggacattgatattaagatccgatcttgtcgagggtcatgcagtagggctttagctcgtgaagtagatctgaaggactatgaagatcagcagaagcaacttgaacaggtcattgccaaagacttacttccctctagagataggcaacacttaccactgataaaaatgaaaccagttccagacttggttcccggaaattttaagagccagcttcagaaggtacccccagagtggaaggcattaacagacatgccgcagatgagaatggagttagagagacctggtggaaatgagattactcgaggaggctccacctcttatggaaccggatcagagacggaaagccccaggaaccctagcagtgctggaagctggaactctgggagctctggacctggaagtactggaaaccgaaaccctgggagctctgggactggagggactgcaacctggaaacctgggagctctggacctggaagtactggaagctggaactctgggagctctggaactggaagtactggaaaccaaaaccctgggagccctagacctggtagtaccggaacctggaatcctggcagctctgaacgcggaagtgctgggcactggacctctgagagctctgtatctggtagtactggacaatggcactctgaatctggaagttttaggccagatagcccaggctctgggaacgcgaggcctaacaacccagactggggcacatttgaagaggtgtcaggaaatgtaagtccagggacaaggagagagtaccacacagaaaaactggtcacttctaaaggagataaagagctcaggactggtaaagagaaggtcacctctggtagcacaaccaccacgcgtcgttcatgctctaaaaccgttactaagactgttattggtcctgatggtcacaaagaagttaccaaagaagtggtgacctccgaagatggttctgactgtcccgaggcaatggatttaggcacattgtctggcataggtactctggatgggttccgccataggcaccctgatgaagctgccttcttcgacactgcctcaactggaaaaacattcccaggtttcttctcacctatgttaggagagtttgtcagtgagactgagtctaggggctcagaatctggcatcttcacaaatacaaaggaatccagttctcatcaccctgggatagctgaattcccttcccgtggtaaatcttcaagttacagcaaacaatttactagtagcacgagttacaacagaggagactccacatttgaaagcaagagctataaaatggcagatgaggccggaagtgaagccgatcatgaaggaacacatagcaccaagagaggccatgctaaatctcgccctgtcagaggtatccacacttctcctttggggaagccttccctgtccccctagactaagttaaatatttctgcacagtgttcccatggccccttgcatttccttcttaactctctgttacacgtcattgaaactacacttttttggtctgtttttgtgctagactgtaagttccttgggggcagggcctttgtctgtctcatctctgtattcccaaatgcctaacagtacagagccatgactcaataaatacatgttaaatggatgaatg

SEQ ID NO: 3862 - DNA, 4660 bp, Homo sapiens
agccccgaggacgcgagcggcaggtgtgcacagaggttctccactttgttttctgaactcgcggtcaggatggttttctctgtcaggcagtgtggccatgttggcagaactgaagaagttttactgacgttcaagatattccttgtcatcatttgtcttcatgtcgttctggtaacatccctggaagaagatactgataattccagtttgtcaccaccacctgctaaattatctgttgtcagttttgccccctcctccaatggtactccagaggttgaaacaacaagcctcaatgatgttactttaagcttactcccttcaaacgaaacaggcgtcaaaccccagagaaatatctgcaatttgtcatctatttgcaatgactcagcattttttagaggtgagatcatgtttcaatatgataaagaaagcactgttccccagaatcaacatataacgaatggcaccttaactggagtcctgtctctaagtgaattaaaacgctcagagctcaacaaaaccctgcaaaccctaagtgagacttactttataatgtgtgctacagcagaggcccaaagcacattaaattgtacattcacaataaaactgaataatacaatgaatgcatgtgctgtaatagctgctttggaaagagtaaagattcgaccaatggaacactgctgctgttctgtcaggataccctgcccttcctccccagaagagttggaaaagcttcagtgtgacctgcaggatcccattgtctgtcttgctgaccatccacgtggcccaccattttcttccagccaatccatcccagtggtgcctcgggccactgtgctttcccaggtccccaaagctacctcttttgctgagcctccagattattcacctgtgacccacaatgttccctctccaataggggagattcaacccctttcaccccagccttcagctcccatagcttccagccctgccattgacatgcccccacagtctgaaacgatctcttcccctatgccccaaacccatgtctccggcaccccacctcctgtgaaagcctcattttcctctcccaccgtgtctgcccctgcgaatgtcaacactaccagcgcacctcctgtccagacagacatcgtcaacaccagcagtatttctgatcttgagaaccaagtgttgcagatggagaaggctctgtccttgggcagcctggagcctaacctcgcaggagaaatgatcaaccaagtcagcagactccttcattccccgcctgacatgctggcccctctggctcaaagattgctgaaagtagtggatgacatcgtcctacagctgaacttttcaaacacgactataagtctaacctccccttctttggctctggctgtgatcagagtgaatgccagtagtttcaacacaactacctttgtggcccaagaccctgcaaatcttcaggtttctctggaaacccaagctcctgagaacagtattggcacaattactcttccttcatcgctgatgaataatttaccagctcatgacatggagctagcttccagggttcagttcaatttttttgaaacacctgctttgtttcaggatccttccctggagaacctctctctgatcagctacgtcatatcatcgagtgttgcaaacctgaccgtcaggaacttgacaagaaacgtgacagtcacattaaagcacatcaacccgagccaggatgagttaacagtgagatgtgtattttgggacttgggcagaaatggtggcagaggaggctggtcagacaatggctgctctgtcaaagacaggagattgaatgaaaccatctgtacctgtagccatctaacaagcttcggcgttctgctggacctatctaggacatctgtgctgcctgctcaaatgatggctctgacgttcattacatatattggttgtgggctttcatcaatttttctgtcagtgactcttgtaacctacatagcttttgaaaagatccggagggattacccttccaaaatcctcatccagctgtgtgctgctctgcttctgctgaacctggtcttcctcctggactcgtggattgctctgtataagatgcaaggcctctgcatctcagtggctgtatttcttcattattttctcttggtctcattcacatggatgggcctagaagcattccatatgtacctggcccttgtcaaagtatttaatacttacatccgaaaatacatccttaaattctgcattgtcggttggggggtaccagctgtggttgtgaccatcatcctgactatatccccagataactatgggcttggatcctatgggaaattccccaatggttcaccggatgacttctgctggatcaacaacaatgcagtattctacattacggtggtgggatatttctgtgtgatatttttgctgaacgtcagcatgttcattgtggtcctggttcagctctgtcgaattaaaaagaagaagcaactgggagcccagcgaaaaaccagtattcaagacctcaggagtatcgctggccttacatttttactgggaataacttggggctttgccttctttgcctggggaccagttaacgtgaccttcatgtatctgtttgccatctttaataccttacaaggatttttcatattcatcttttactgtgtggccaaagaaaatgtcaggaagcaatggaggcggtatctttgttgtggaaagttacggctggctgaaaattctgactggagtaaaactgctactaatggtttaaagaagcagactgtaaaccaaggagtgtccagctcttcaaattccttacagtcaagcagtaactccactaactccaccacactgctagtgaataatgattgctcagtacacgcaagcgggaatggaaatgcttctacagagaggaatggggtctcttttagtgttcagaatggagatgtgtgccttcacgatttcactggaaaacagcacatgtttaacgagaaggaagattcctgcaatgggaaaggccgtatggctctcagaaggacttcaaagcggggaagcttacactttattgagcaaatgtgattcctttcttctaaaatcaaagcatgatgcttgacagtgtgaaatgtccaattttaccttttacacaatgtgagatgtatgaaaatcaactcattttattctcggcaacatctggagaagcataagctaattaagggcgatgattattattacaagaagaaaccaagacattacaccatggtttttagacatttctgatttggtttcttatctttcattttataagaaggttggttttaaacaatacactaagaatgactcctataaagaaaacaaaaaaaggtagtgaactttcagctaccttttaaagaggctaagttatctttgataacatcatataaagcaactgttgacttcagcctgttggtgagtttagttgtgcatgcctttgttgtatataagctaaattctagtgacccatgtgtcaaaaatcttacttctacatttttttgtatttattttctactgtgtaaatgtattcctttgtagaatcatggttgttttgtctcacgtgataattcagaaaatccttgctcgttccgcaaatcctaaagctccttttggagatgatataggatgtgaaatacagaaacctcagtgaaatcaagaaataatgatcccagccagactgagaaaatgtaagcagacagtgccacagttagctcatacagtgcctttgagcaagttaggaaaagatgcccccactgggcagacacagccctatgggctcatggtttgacaaacagagtggagaggccatattttagccccactcaccctcttgggtgcacgacctgtacagccaaacacagcatccaatatgaatacccatcccctgaccgcatccccagtagtcagattatagaatctgcaccaagatgtttagctttataccttggccacagagagggatgaactgtcatccagaccatgtgtcaggaaaattgtgaacgtagatgaggtacatacactgccgcttctcaaatccccagagcctttaggaacaggagagtagactaggattccttctcttaaaaaggtacatatatatggaaaaaaatcatattgccgttctttaaaaggcaactgcatggtacattgttgattgttatgactggtacactctggcccagccagagctataattgttttttaaatgtgtcttgaagaatgcacagtgacaaggggagtagctattgggaacagggaactgtcctacactgctattgttgctacatgtatcgagccttgattgctcctagttatatacagggtctatcttgcttcctacctacatctgcttgagcagtgcctcaagtacatccttattaggaacatttcaaaccccttttagttaagtctttcactaaggttctcttgcatatatttcaagtgaatgttggatctcagactaaccatagtaataatacacatttctgtgagtgctgacttgtctttgcaatatttcttttctgatttatttaattttcttgtatttatatgttaaaatcaaaaatgttaaaatcaatgaaataaatttgcagttaagtaaaaaaaaaaaaaaaaaaaaaaaaaaaaa

SEQ ID NO: 3863 - DNA, 1362 bp, Homo sapiens
accccgtccggccatgggcgagcaccccagcccgggccccgcggtggccgcctgcgccgaggcggagcgcatcgaggagctggaacccgaggccgaggagcggctgcccgcggcgccggaggaccactggaaagtcctgtttgatcagtttgaccctgggaacacaggctacattagcacaggcaagttccggagtcttctggagagccacagctccaagctggacccgcacaaaagggaggtcctcctggctcttgccgacagccacgcggatgggcagatcggctaccaggattttgtcagcctaatgagcaacaagcgttccaacagcttccgccaagccatcctgcagggcaaccgcaggctaagcagcaaggccctgctggaggagaaggggctgagcctctcgcagcgacttatccgccatgtggcctatgagaccctgccccgggaaattgaccgcaagtggtactatgacagctacacctgctgccccccaccctggttcatgatcacagtcacgctgctggaggttgcctttttcctctacaatggggtgtcactaggtcaatttgtactgcaggtaactcatccacgttacttgaagaactccctggtttaccacccacagctgcgagcacaggtttggcgctacctgacatacatcttcatgcatgcagggatagaacacctgggactcaatgtggtgctgcagctgctggtgggggtgcccctggagatggtgcatggagccacccgaattgggcttgtctacgtggccggtgttgtggcagggtccttggcagtgtctgtggctgacatgaccgctccagtcgtgggctcttctggaggggtgtatgctctcgtctctgcccatctggccaacattgtcatgaactggtcaggcatgaagtgccagttcaagctgctgcggatggctgtggcccttatctgtatgagcatggagtttgggcgggccgtgtggctccgcttccacccgtcggcctatcccccgtgccctcacccaagctttgtggcgcacttgggtggcgtggccgtgggcatcaccctgggcgtggtggtcctgaggaactacgagcagaggctccaggaccagtcactgtggtggatttttgtggccatgtacaccgtcttcgtgctgttcgctgtcttctggaacatctttgcctacaccctgctggacttaaagctgccgcctcccccctgagggctggaggcccaaggtcggggaggggagggaaaagcagcacccacagggagcgcctgcgaggtttcttctcatcaccagctcagctaggccgggcagacaaggacagaagactctgggccactgtaatgttt

SEQ ID NO: 3864 - DNA, 3466 bp, Homo sapiens
tgcattcagcagcttgcaaatggttaactatatgcaaaaaagtcagcatagctgtgaagtatgccgtgaattttaattgagggaaaaagggacaattgcttcaggatgctctagtatgcactctgcttgaaatattttcaatgaaatgctcagtattctatctttgaccagaggttttaactttatgaagctatgggacttgacaaaaagtgatatttgagaagaaagtacgcagtggttggtgttttcttttttttaataaaggaattgaattactttgaacacctcttccagctgtgcattacagataacgtcaggaagagtctctgctttacagaatcggatttcatcacatgacaacatgaagctgtggattcatctcttttattcatctctccttgcctgtatatctttacactcccaaactccagtgctctcatccagaggctcttgtgattctctttgcaattgtgaggaaaaagatggcacaatgctaataaattgtgaagcaaaaggtatcaagatggtatctgaaataagtgtgccaccatcacgacctttccaactaagcttattaaataacggcttgacgatgcttcacacaaatgacttttctgggcttaccaatgctatttcaatacaccttggatttaacaatattgcagatattgagataggtgcatttaatggccttggcctcctgaaacaacttcatatcaatcacaattctttagaaattcttaaagaggatactttccatggactggaaaacctggaattcctgcaagcagataacaattttatcacagtgattgaaccaagtgcctttagcaagctcaacagactcaaagtgttaattttaaatgacaatgctattgagagtcttcctccaaacatcttccgatttgttcctttaacccatctagatcttcgtggaaatcaattacaaacattgccttatgttggttttctcgaacacattggccgaatattggatcttcagttggaggacaacaaatgggcctgcaattgtgacttattgcagttaaaaacttggttggagaacatgcctccacagtctataattggtgatgttgtctgcaacagccctccattttttaaaggaagtatactcagtagactaaagaaggaatctatttgccctactccaccagtgtatgaagaacatgaggatccttcaggatcattacatctggcagcaacatcttcaataaatgatagtcgcatgtcaactaagaccacgtccattctaaaactacccaccaaagcaccaggtttgataccttatattacaaagccatccactcaacttccaggaccttactgccctattccttgtaactgcaaagtcctatccccatcaggacttctaatacattgtcaggagcgcaacattgaaagcttatcagatctgagacctcctccgcaaaatcctagaaagctcattctagcgggaaatattattcacagtttaatgaagtctgatctagtggaatatttcactttggaaatgcttcacttgggaaacaatcgtattgaagttcttgaagaaggatcgtttatgaacctaacgagattacaaaaactctatctaaatggtaaccacctgaccaaattaagtaaaggcatgttccttggtctccataatcttgaatacttatatcttgaatacaatgccattaaggaaatactgccaggaacctttaatccaatgcctaaacttaaagtcctgtatttaaataacaacctcctccaagttttaccaccacatattttttcaggggttcctctaactaaggtaaatcttaaaacaaaccagtttacccatctacctgtaagtaatattttggatgatcttgatttgctaacccagattgaccttgaggataacccctgggactgctcctgtgacctggttggactgcagcaatggatacaaaagttaagcaagaacacagtgacagatgacatcctctgcacttcccccgggcatctcgacaaaaaggaattgaaagccctaaatagtgaaattctctgtccaggtttagtaaataacccatccatgccaacacagactagttaccttatggtcaccactcctgcaacaacaacaaatacggctgatactattttacgatctcttacggacgctgtgccactgtctgttctaatattgggacttctgattatgttcatcactattgttttctgtgctgcagggatagtggttcttgttcttcaccgcaggagaagatacaaaaagaaacaagtagatgagcaaatgagagacaacagtcctgtgcatcttcagtacagcatgtatggccataaaaccactcatcacactactgaaagaccctctgcctcactctatgaacagcacatggtgagccccatggttcatgtctatagaagtccatcctttggtccaaagcatctggaagaggaagaagagaggaatgagaaagaaggaagtgatgcaaaacatctccaaagaagtcttttggaacaggaaaatcattcaccactcacagggtcaaatatgaaatacaaaaccacgaaccaatcaacagaatttttatccttccaagatgccagctcattgtacagaaacattttagaaaaagaaagggaacttcagcaactgggaatcacagaatacctaaggaaaaacattgctcagctccagcctgatatggaggcacattatcctggagcccacgaagagctgaagttaatggaaacattaatgtactcacgtccaaggaaggtattagtggaacagacaaaaaatgagtattttgaacttaaagctaatttacatgctgaacctgactatttagaagtcctggagcagcaaacatagatggagagtttgagggctttcgcagaaatgctgtgattctgttttaagtccataccttgtaaataagtgccttacgtgagtgtgtcatcaatcagaacctaagcacagcagtaaactatggggaaaaaaaaagaagaagaaaaagaaactcagggatcactgggagaagccatggcattatcttcaggcaatttagtctgtcccaaataaaataaatccttgcatgtaaatcattcaaggattatagtaatatttcatatactgaaaagtgtctcataggagtcctcttgcacatctaaaaaggctgaacatttaagtatcccgaattttcttgaattgctttccctatagattaattacaattggatttcatcatttaaaaaccatacttgtatatgtagttataatatgtaaggaatacattgtttataaccagtatgtacttcaaaaatgtgtattgtcaaacatacctaactttcttgcaataaatgcaaaagaaactggaacttgacaattataaatagtaatagtgaagaaaaaatagaaaggttgcaattatataggccatgggtggctcaa

SEQ ID NO: 3865 - DNA, 1596 bp, Homo sapiens
accatggaggacgactcactctacttgtgaggtgagtggcagttcaaccacttttcaaaactcacatcttctcggcccgatgcagcttttgctgaaatccagcggacttctctccctgagaagtcaccactctcatgtgagacccgtgtcgacctctgtgatgatttggctcctgtggcaagacagcttgctcccagggagaagcttcctctgagtagcaggagacctgctgcggtgggggctgggctccagaatatgggaaatacctgctacgtgaacgcttccttgcagtgcctgacatacacaccgccccttgccaactacatgctgtcccgggagcactctcaaacgtgtcatcgtcacaagggctgcatgctctgtactatgcaagctcacatcacacgggccctccacaatcctggccacgtcatccagccctcacaggcattggctgctggcttccatagaggcaagcaggaagatgcccatgaatttctcatgttcactgtggatgccatgaaaaaggcatgccttcccgggcacaagcaggtagatcatcactctaaggacaccaccctcatccaccaaatatttggaggctactggagatctcaaatcaagtgtctccactgccacggcatttcagacacttttgacccttacctggacatcgccctggatatccaggcagctcagagtgtccagcaagctttggaacagttggtgaagcccgaagaactcaatggagagaatgcctatcattgtggtgtttgtctccagagggcgccggcctccaagacgttaactttacacacctctgccaaggtcctcatccttgtattgaagagattctccgatgtcacaggcaacaagattgccaagaatgtgcaatatcctgagtgccttgacatgcagccatacatgtctcagcagaacacaggacctcttgtctatgtcctctatgctgtgctggtccacgctgggtggagttgtcacaacggacattacttctcttatgtcaaagctcaagaaggccagtggtataaaatggatgatgccgaggtcaccgcctctagcatcacttctgtcctgagtcaacaggcctacgtcctcttttacatccagaagagtgaatgggaaagacacagtgagagtgtgtcaagaggcagggaaccaagagcccttggcgcagaagacacagacaggcgagcaacgcaaggagagctcaagagagaccacccctgcctccaggcccccgagttggacgagcacttggtggaaagagccactcaggaaagcaccttagaccactggaaattccttcaagagcaaaacaaaacgaagcctgagttcaacgtcagaaaagtcgaaggtaccctgcctcccgacgtacttgtgattcatcaatcaaaatacaagtgtgggatgaagaaccatcatcctgaacagcaaagctccctgctaaacctctcttcgacgaccccgacacatcaggagtccatgaacactggcacactcgcttccctgcgagggagggccaggagatccaaagggaagaacaaacacagcaagagggctctgcttgtgtgccagtga

SEQ ID NO: 3866 - DNA, 1192 bp, Homo sapiens; identical to SEQ ID NO: 3708

SEQ ID NO: 3867 - DNA, 1369 bp, Homo sapiens; identical to SEQ ID NO: 3707

SEQ ID NO: 3868 - DNA, 1339 bp, Homo sapiens; identical to SEQ ID NO: 3706

SEQ ID NO: 3869 - DNA, 2010 bp, Homo sapiens; identical to SEQ ID NO: 537

SEQ ID NO: 3870 - DNA, 4543 bp, Homo sapiens; identical to SEQ ID NO: 1423

SEQ ID NO: 3871 - DNA, 2348 bp, Homo sapiens
ggctgataagcgaggcattagtgagattgagagagactttaccccgccgtggtggttggagggcgcgcagtagagcagcagcacaggcgcgggtcccgggaggccggctctgctcgcgccgagatgtggaatctccttcacgaaaccgactcggctgtggccaccgcgcgccgcccgcgctggctgtgcgctggggcgctggtgctggcgggtggcttctttctcctcggcttcctcttcgggtggtttataaaatcctccaatgaagctactaacattactccaaagcataatatgaaagcatttttggatgaattgaaagctgagaacatcaagaagttcttatataattttacacagataccacatttagcaggaacagaacaaaactttcagcttgcaaagcaaattcaatcccagtggaaagaatttggcctggattctgttgagctagcacattatgatgtcctgttgtcctacccaaataagactcatcccaactacatctcaataattaatgaagatggaaatgagattttcaacacatcattatttgaaccacctcctccaggatatgaaaatgtttcggatattgtaccacctttcagtgctttctctcctcaaggaatgccagagggcgatctagtgtatgttaactatgcacgaactgaagacttctttaaattggaacgggacatgaaagtcaattgctctgggaaaattgtaattgccagatatgggaaagttttcagaggaaataaggttaaaaatgcccagctggcaggggccaaaggagtcattctctactccgaccctgctgactactttgctcctggggtgaagtcctatccagatggttggaatcttcctggaggtggtgtccagcgtggaaatatcctaaatctgaatggtgcaggagaccctctcacaccaggttacccagcaaatgaatatgcttataggcgtggaattgcagaggctgttggtcttccaagtattcctgttcatccaattggatactatgatgcacagaagctcctagaaaaaatgggtggctcagcaccaccagatagcagctggagaggaagtctcaaagtgccctacaatgttggacctggctttactggaaacttttctacacaaaaagtcaagatgcacatccactctaccaatgaagtgacaagaatttacaatgtgataggtactctcagaggagcagtggaaccagacagatatgtcattctgggaggtcaccgggactcatgggtgtttggtggtattgaccctcagagtggagcagctgttgttcatgaaattgtgaggagctttggaacactgaaaaaggaagggtggagacctagaagaacaattttgtttgcaagctgggatgcagaagaatttggtcttcttggttctactgagtgggcagaggagaattcaagactccttcaagagcgtggcgtggcttatattaatgctgactcatctatagaaggaaactacactctgagagttgattgtacaccgctgatgtacagcttggtacacaacctaacaaaagagctgaaaagccctgatgaaggctttgaaggcaaatctctttatgaaagttggactaaaaaaagtccttccccagagttcagtggcatgcccaggataagcaaattgggatctggaaatgattttgaggtgttcttccaacgacttggaattgcttcaggcagagcacggtatactaaaaattgggaaacaaacaaattcagcggctatccactgtatcacagtgtctatgaaacatatgagttggtggaaaagttttatgatccaatgtttaaatatcacctcactgtggcccaggttcgaggagggatggtgtttgagctagccaattccatagtgctcccttttgattgtcgagattatgctgtagttttaagaaagtatgctgacaaaatctacagtatttctatgaaacatccacaggaaatgaagacatacagtgtatcatttgattcacttttttctgcagtaaagaattttacagaaattgcttccaagttcagtgagagactccaggactttgacaaaagcaagcatgtcatctatgctccaagcagccacaacaagtatgcaggggagtcattcccaggaatttatgatgctctgtttgatattgaaagcaaagtggacccttccaaggcctggggagaagtgaagagacagatttatgttgcagccttcacagtgcaggcagctgcagagactttgagtgaagtagcctaagaggattctttagagaatccgtattgaatttgtgtggtatgtcactcagaaagaatcgtaatggg

SEQ ID NO: 3872 - DNA, 4344 bp, Homo sapiens; identical to SEQ ID NO: 1567

SEQ ID NO: 3873 - DNA, 1394 bp, Homo sapiens; identical to SEQ ID NO: 735

SEQ ID NO: 3874 - DNA, 1661 bp, Homo sapiens
ccgagggcggggccgggcccgggagcctgtggcttcaggaagaggagggcaaggtgtctggctgcgcgtttggctgcaatgagctcggcctcggggctccgcagggggcacccggcaggtggggaagaaaacatgacagaaacagatgccttctataaaagagaaatgtttgatccggcagaaaagtacaaaatggaccacaggaggagaggaattgctttaatcttcaatcatgagaggttcttttggcacttaacactgccagaaaggcggggcacctgcgcagatagagacaatcttacccgcaggttttcagatctaggatttgaagtgaaatgctttaatgatcttaaagcagaagaactactgctcaaaattcatgaggtgtcaactgttagccacgcagatgccgattgctttgtgtgtgtcttcctgagccatggcgaaggcaatcacatttatgcatatgatgctaaaatcgaaattcagacattaactggcttgttcaaaggagacaagtgtcacagcctggttggaaaacccaagatatttatcattcaggcatgtcggggaaaccagcacgatgtgccagtcattcctttggatgtagtagataatcagacagagaagttggacaccaacataactgaggtggatgcagcctccgtttacacgctgcctgctggagctgacttcctcatgtgttactctgttgcagaaggatattattctcaccgggaaactgtgaacggctcatggtacattcaagatttgtgtgagatgttgggaaaatatggctcctccttagagttcacagaactcctcacactggtgaacaggaaagtttctcagcgccgagtggacttttgcaaagacccaagtgcaattggaaagaagcaggttccctgttttgcctcaatgctaactaaaaagctgcatttctttccaaaatctaattaattaatagaggctatctaattttacactctgtattgaaaatggctttctcagccaggcgtggttactcacacctgtaatcccagcactttgggagtccaaggtgggcggatcacctgaggtcgggagttcgagaccagcctgaccaacatggagaagccccgtctctactaaaaatgcaaaaaaaaatttagctaggcatggcggcgcatgcctgcaatcccagctacttggaaggctgaggcaggagaatcacttgaacccaggaggtggaggctgcggtgagccgagattgcgccattgcactccagcctgggcaacgagtgaaactccgtctcaaaaaaaagaaaatgtctttctcttccttttatataaatatcgttagggtgaagcattatggtctaatgattcaaatgttttaaagtttaatgcctagcagagaactgccttaaaaaaaaaaaaaaaaagttcatgttggccatggtgaaagggtttgatatggagaaacaaaatcctcaggaaattagataaataaaaatttataagcatttgtattattttttaataaactgcagggttacacaaaaatctagctgatttaacttgtattttgtcacttttttataaaagtttattgtttgatgtttttaaaggtttttgaaatccaggaattaaatcatcccttaataaaatattcgaaattc

SEQ ID NO: 3875 - DNA, 1602 bp, Homo sapiens; identical to SEQ ID NO: 1785

SEQ ID NO: 3876 - DNA, 1135 bp, Homo sapiens
ttcctcctccgagagcggacagatctctgggtgctgggcggtcatggcgctactagatgtatgcggagccccccgagggcagcggccggaatcggctctcccggttgcgggaagcgggcgtcgctcggacccaggacactacagtttctctatgcgatctccagagctcgctttaccccggggaatgcagcccacagaattcttccagtccctgggtggggacggagaaaggaacgttcagattgagatggcccatggcaccaccacgctcgccttcaagttccagcatggagtgattgcagcagtggattctcgggcctcagctgggtcctacattagtgccttacgggtgaacaaggtgattgagattaacccttacctgcttggcaccatgtctggctgtgcagcagactgtcagtactgggagcgcctgctggccaaggaatgcaggctgtactatctgcgaaatggagaacgtatttcagtgtcggcagcctccaagctgctgtccaacatgatgtgccagtaccggggcatgggcctctctatgggcagtatgatctgtggctgggataagaagggtcctggactctactacgtggatgaacatgggactcggctctcaggaaatatgttctccacgggtagtgggaacacttatgcctacggggtcatggacagtggctatcggcctaatcttagccctgaagaggcctatgaccttggccgcagggctattgcttatgccactcacagagacagctattctggaggcgttgtcaatatgtaccacatgaaggaagatggttgggtgaaagtagaaagtacagatgtcagtgacctgctgcaccagtaccgggaagccaatcaataatggtggtggtggcagctgggcaggtctcctctgggaggtcttggccgactcagggacctaagccacgttaagtccaaggagaagaagaggcctagcctgagccaaagagagagtacgggctcagcagccagaggaggccggtgaagtgcatcttctgcgtgttctctatttgaacaagcatttcccccagggaagtttctgggtgccccactaagtagaataaagaaaaacggttataaataaaaaaaaaaaaaaaaaaaa

SEQ ID NO: 3877 - DNA, 3059 bp, Homo sapiens; identical to SEQ ID NO: 2315

SEQ ID NO: 3878 - DNA, 2165 bp, Homo sapiens; identical to SEQ ID NO: 1865

SEQ ID NO: 3879 - DNA, 859 bp, Homo sapiens
ggaccacgcttggagaaccactacactagggcaagcaggaagagagtcctccttctggaactgaagcaggcagtgtgaagacccatgtggaacaccttaacccgaagcctctctgaccatccagttggcaaagaccctcaggccatgaggactggccaaagacagtgagaggacgtgcaagggtaaattcctgagccccgcagtcttatttcctgccctgacgtccctgcataccagcccaagggttaaccgtaagctgatgcctgtatggcggccttactgatgccacgcaggaacaaagggatgaggactcgactgggatgcctgtctcacaagtcagactcgtgtagtgatttcacagctattcttccagacaaacccaaccgcgctctcaagagattatcgacagaagaagctacgaggtgggcagattcctttgatgtgcttctctctcataagtatggggtggctgcattccgtgccttcttgaagacggagttcagtgaggagaacctggaattctggttggcctgtgaggagttcaagaagaccaggtcaactgcaaaactggtctctaaggcccataggatctttgaggagtttgtggatgtgcaggctccacgggaggtaaacattgacttccagacccgagaagccacgaggaagaacctgcaggagccatccctgacttgctttgaccaagcccaaggaaaagtacacagcctcatggagaaagactcttaccccaggttcctgaggtccaaaatgtacttagatctgctgtcccaaagccagaggaggctcagttagacctcagaagggaactcctggaaatcaccggctttcccctccacttgct

SEQ ID NO: 3880 - DNA, 804 bp, Homo sapiens
atgcatctcctcttatttcagctgctggtactcctgcctctaggaaagaccacacggcaccaggatggccgccagaatcagagttctctttcccccgtactcctgccaaggaatcaaagagagcttcccacaggcaaccatgaggaagctgaggagaagccagatctgtttgtcgcagtgccacaccttgtaggcaccagccctgcaggggaaggccagaggcagagagagaagatgctgtccagatttggcaggttctggaagaagcctgagagagaaatgcatccatccagggactcagatagtgagcccttcccacctgggacccagtccctcatccagccgatagatggaatgaaaatggagaaatctcctcttcgggaagaagccaagaaattctggcaccacttcatgttcagaaaaactccggcttctcagggggtcatcttgcccatcaaaagccatgaagtacattgggagacctgcaggacagtgcccttcagccagactataacccacgaaggctgtgagaaattagttgttcagaacaacctttgctttgggaaatgcgggtctgttcattttcctggagccgcgcagcactcccatacctcctgctctcactgtttgcctgccaagttcaccacgatgcacttgccactgaactgcactgaactttcctccgtgatcaaggtggtgatgctggtggaggagtgccagtgcaaggtgaagacggagcatgaagatggacacatcctacatgctggctcccaggattcctttatcccaggagtttcagcttga

SEQ ID NO: 3881 - DNA, 792 bp, Homo sapiens
gctgcgttggggcctttttttttcgcatcctgcttcgtcaggtttataccactttatttggtgtgctgtgttagtcaccatgtctgaaacagtgcctcccgcccccgccgcttctgctgctcctgagaaacctttagctggcaagaaggcaaagaaacctgctaaggctgcagcagcctccaagaaaaaacccgctggcccttccgtgtcagagctgatcgtgcaggctgcttcctcctctaaggagcgtggtggtgtgtcgttggcagctcttaaaaaggcgctggcggccgcaggctacgacgtggagaagaacaacagccgcattaagctgggcattaagagcctggtaagcaagggaacgttggtgcagacaaagggtaccggagcctcgggttccttcaagctcaacaagaaggcgtcctccgtggaaaccaagcccggcgcctcaaaggtggctacaaaaactaaggcaacgggtgcatctaaaaagctcaaaaaggccacgggggctagcaaaaagagcgtcaagactccgaaaaaggctaaaaagcctgcggcaacaaggaaatcctccaagaatccaaaaaaacccaaaactgtaaagcccaagaaagtagctaaaagccctgctaaagctaaggctgtaaaacccaaggcggccaaggctagggtgacgaagccaaagactgccaaacccaagaaagcggcacccaagaaaaagtaaattcagttagaagtttcttctagtaacccaacggctcttttaagagccacctacgcatttcagga

SEQ ID NO: 3882 - DNA, 1607 bp, Homo sapiens
gggggcggggaactttacctgggagtgggccaggccgccagccccgccagccccgccagccccgccagccccgcgatggcttgggccgcgctcctcggcctcctggccgcactgttgctgctgctgctactgagccgccgccgcacgcggcgacctggtgagcctcccctggacctgggcagcatcccctggttggggtatgccttggactttggaaaagatgctgccagcttcctcacgaggatgaaggagaagcacggtgacatctttactatactggttgggggcaggtatgtcaccgttctcctggacccacactcctacgacgcggtggtgtgggagcctcgcaccaggctcgacttccatgcctatgccatcttcctcatggagaggatttttgatgtgcagcttccacattacagccccagtgatgaaaaggccaggatgaaactgactcttctccacagagagctccaggcactcacagaagccatgtataccaacctccatgcagtgctgttgggcgatgctacagaagcaggcagtggctggcacgagatgggtctcctcgacttctcctacagcttcctgctcagagccggctacctgactctttacggaattgaggcgctgccacgcacccatgaaagccaggcccaggaccgcgtccactcagctgatgtcttccacacctttcgccagctcgaccggctgctccccaaactggcccgtggctccctgtcagtgggggacaaggaccacatgtgcagtgtcaaaagtcgcctgtggaagctgctatccccagccaggctggccaggcgggcccaccggagcaaatggctggagagttacctgctgcacctggaggagatgggtgtgtcagaggagatgcaggcacgggccctggtgctgcagctgtgggccacacaggggaatatgggtcccgctgccttctggctcctgctcttccttctcaagaatcctgaagccctggctgctgtccgcggagagctcgagagtatcctttggcaagcggagcagcctgtctcgcagacgaccactctcccacagaaggttctagacagcacacctgtgcttgatagcgtgctgagtgagagcctcaggcttacagctgcccccttcatcacccgcgaggttgtggtggacctggccatgcccatggcagacgggcgagaattcaacctgcgacgtggtgaccgcctcctcctcttccccttcctgagcccccagagagacccagaaatctacacagacccagaggtatttaaatacaaccgattcctgaaccctgacggatcagagaagaaagacttttacaaggatgggaaacggctgaagaattacaacatgccctggggggcggggcacaatcactgcctggggaggagttatgcggtcaacagcatcaaacaatttgtgttccttgtgctggtgcacttggacttggagctgatcaacgcagatgtggagatccctgagtttgacctcagcaggtacggcttcggtctgatgcagccggaacacgacgtgcccgtccgctaccgcatccgcccatgacacagggagcagatggatccacgtgctcg

SEQ ID NO: 3883 - DNA, 1206 bp, Homo sapiens; identical to SEQ ID NO: 1471

SEQ ID NO: 3884 - DNA, 4688 bp, Homo sapiens; identical to SEQ ID NO: 1763

SEQ ID NO: 3885 - DNA, 1087 bp, Homo sapiens
ggcctctgcgccaaccccgcgcgccacccgcggcttcctccgctcggggtcctcgttcggcctctgctggcctccgcgactccgcggtgcccgcccccgttgagttcaaaaggacgcgcggagcggcgccggcccttcaccagcagcccgtccgactggaaagatctgcctcttctccaagaaactcaaccactagtgacaatgaccagcctcctgactactccttctccaagagaagaactgatgaccaccccaattttacagcccactgaggccctgtccccagaagatggagccagcacagcactcattgcagttgttatcaccgttgtcttcctcaccctgctctcggtcgtgatcttgatcttcttttacctgtacaagaacaaaggcagctacgtcacctatgaacctacagaaggtgagcccagtgccatcgtccagatggagagtgacttggccaagggcagcgagaaagaggaatatttcatctaatgactcccaggccccaaggagcttattcctggctccatcgctaacacgttgactgcttattatgggaaagttttctctgaagccagggagaagcattgattgatgtgggcaaatccaagctccagccaggtcgcagtcccaaatgccgacatcactgactccagggaccagggacatggagaaagctgtttatgatatctttaaccaggccctcttactagagctggtgtttgtgactggccaacaagatgtggctatgccaggggacatctgagtatgtgcccagtcatcttttttcacaggttgaagggagagaaaagattttgagttaaggtcattggctgctctactctgtcccctacctggtcacctagtgatagccccagtggagatactgtccatacaaggtcttcccagaggctggataccacagtaaaaggccaggccaggaggggtaggagactatggagatcttacctcctgataaatgtgctacaccccctaatctgagcccttcctttccgtgttccccaacaacctcatgcttacgtgatttttattcaaattaaaaattttcattgctacagaaatc

SEQ ID NO: 3886 - DNA, 1076 bp, Homo sapiens; identical to SEQ ID NO: 164

SEQ ID NO: 3887 - DNA, 1959 bp, Homo sapiens
cgtttgcgaatcagagctgcccggggtacaccgaccgcgcagggaaacatcgagagtgtaaataaatacatcgcctcttgttcggatttttgctactaccgaaaatatgtaaattgtgaactctgttggctctctttggatccaggttgatagaagtccagatcctgaggaaatctccagctaaatgctcaaaatataaaatactgagctgagatttgcgaagagcagcagcatggatggattttatgaccagcaagtgccttacatggtcaccaatagtcagcgtgggagaaattgtaacgagaaaccaacaaatgtcaggaaaagaaaattcattaacagagatctggctcatgattcagaagaactctttcaagatctaagtcaattacaggaaacatggcttgcagaagctcaggtacctgacaatgatgagcagtttgtaccagactatcaggctgaaagtttggcttttcatggcctgccactgaaaatcaagaaagaaccccacagtccatgttcagaaatcagctctgcctgcagtcaagaacagccctttaaattcagctatggagaaaagtgcctgtacaatgtcagtgcctatgatcagaagccacaagtgggaatgaggccctccaacccccccacaccatccagcacgccagtgtccccactgcatcatgcatctccaaactcaactcatacaccgaaacctgaccgggccttcccagctcacctccctccatcgcagtccataccagatagcagctaccccatggaccacagatttcgccgccagctttctgaaccctgtaactcctttcctcctttgccgacgatgccaagggaaggacgtcctatgtaccaacgccagatgtctgagccaaacatccccttcccaccacaaggctttaagcaggagtaccacgacccagtgtatgaacacaacaccatggttggcagtgcggccagccaaagctttccccctcctctgatgattaaacaggaacccagagattttgcatatgactcagaagtgcctagctgccactccatttatatgaggcaagaaggcttcctggctcatcccagcagaacagaaggctgtatgtttgaaaagggccccaggcagttttatgatgacacctgtgttgtcccagaaaaattcgatggagacatcaaacaagagccaggaatgtatcgggaaggacccacataccaacggcgaggatcacttcagctctggcagtttttggtagctcttctggatgacccttcaaattctcattttattgcctggactggtcgaggcatggaatttaaactgattgagcctgaagaggtggcccgacgttggggcattcagaaaaacaggccagctatgaactatgataaacttagccgttcactccgctattactatgagaaaggaattatgcaaaaggtggctggagagagatatgtctacaagtttgtgtgtgatccagaagcccttttctccatggcctttccagataatcagcgtccactgctgaagacagacatggaacgtcacatcaacgaggaggacacagtgcctctttctcactttgatgagagcatggcctacatgccggaagggggctgctgcaacccccacccctacaacgaaggctacgtgtattaacacaagtgacagtcaagcagggcgtttttgcgcttttccttttttctgcaagatacagagaattgctgaatctttgttttatttctgttgtttgtattttatttttaaataataatacacaaaaaggggcttttcctgttgcattattctatggtctgccatggactgtgcactttatttgagggtgggtgggagtaatctaaacatttattctgtgtaacaggaagctaatgggtgaatgggcagagggatttggggattactttttacttaggcttgggatggggtcctac

SEQ ID NO: 3888 - DNA, 1958 bp, Homo sapiens
cgtttgcgaatcagagctgcccggggtacaccgaccgcgcagggaaacatcgagagtgtaaataaatacatcgcctcttgttcggatttttgctactaccgaaaatatgtaaattgtgaactctgttggctctctttggatccaggttgatagaagtccagatcctgaggaaatctccagctaaatgctcaaaatataaaaactgagctgagatttgcgaagagcagcagcatggatggattttatgaccagcaagtgccttacatggtcaccaatagtcagcgtgggagaaattgtaacgagaaaccaacaaatgtcaggaaaagaaaattcattaacagagatctggctcatgattcagaagaactctttcaagatctaagtcaattacaggaaacatggcttgcagaagctcaggtacctgacaatgatgagcagtttgtaccagactatcaggctgaaagtttggcttttcatggcctgccactgaaaatcaagaaagaaccccacagtccatgttcagaaatcagctctgcctgcagtcaagaacagccctttaaattcagctatggagaaaagtgcctgtacaatgtcagtgcctatgatcagaagccacaagtgggaatgaggccctccaacccccccacaccatccagcacgccagtgtccccactgcatcatgcatctccaaactcaactcatacaccgaaacctgaccgggccttcccagctcacctccctccatcgcagtccataccagatagcagctaccccatggaccacagatttcgccgccagctttctgaaccctgtaactcctttcctcctttgccgacgatgccaagggaaggacgtcctatgtaccaacgccagatgtctgagccaaacatccccttcccaccacaaggctttaagcaggagtaccacgacccagtgtatgaacacaacaccatggttggcagtgcggccagccaaagctttccccctcctctgatgattaaacaggaacccagagattttgcatatgactcagaagtgcctagctgccactccatttatatgaggcaagaaggcttcctggctcatcccagcagaacagaaggctgtatgtttgaaaagggccccaggcagttttatgatgacacctgtgttgtcccagaaaaattcgatggagacatcaaacaagagccaggaatgtatcgggaaggacccacataccaacggcgaggatcacttcagctctggcagtttttggtagctcttctggatgacccttcaaattctcattttattgcctggactggtcgaggcatggaatttaaactgattgagcctgaagaggtggcccgacgttggggcattcagaaaaacaggccagctatgaactatgataaacttagccgttcactccgctattactatgagaaaggaattatgcaaaaggtggctggagagagatatgtctacaagtttgtgtgtgatccagaagcccttttctccatggcctttccagataatcagcgtccactgctgaagacagacatggaacgtcacatcaacgaggaggacacagtgcctctttctcactttgatgagagcatggcctacatgccggaagggggctgctgcaacccccacccctacaacgaaggctacgtgtattaacacaagtgacagtcaagcagggcgtttttgcgcttttccttttttctgcaagatacagagaattgctgaatctttgttttatttctgttgtttgtattttatttttaaataataatacacaaaaaggggcttttcctgttgcattattctatggtctgccatggactgtgcactttatttgagggtgggtgggagtaatctaaacatttattctgtgtaacaggaagctaatgggtgaatgggcagagggatttggggattactttttacttaggcttgggatggggtcctac

SEQ ID NO: 3889 - DNA, 1940 bp, Homo sapiens
aaagatgcttgaaagataaatacgtttaattaggggcagaggatgatcattaaaggaagtctgactgctgcagaagtcattaacaatcttaaatgaaatttttatttttatgatagccatttacatgtataataagagccaatgattcttgggagcagtgtgacagaaacagagtgtggcgagaactcatgtaagacatactatttaaatgagctggtgttagctattcatatttgttaatgaactagatatgcagggctataagaatgaatgttctgatgctttaaattttaatatctagaaatcaagggtaaggaccaattactagaatttccacccttagaagaataattaataacaatgtaacaaatgtacagccccaaacctcttttaaaaaagtttaatttaaaaaatttaatatcaatagttgaaaaacagccaaacagcaatgtcaagctgtagtagtttgtgattgtggcagctttttgtgttggtcatggatcataattctaaacgttttaatatacagtaatccatatgaatgcattgcagaccctgttatcacctgtagttaatggtgcctgtgatacaagtgaacaggctgttctttgctcttacctttatggtaaataaaccagcattctggagtcacaataattaaataaaatgtaaatccctaatctcatttggctatttggaccaagaaacttacccggctattacctgtctagttctaatgattactaatgatttattgttctttttttttattgttctaaaagtgctctgatgtggtgccttgatgtctaatgaaaagaaattggtcttaaaaagctactcattgtttatcctgactctgagataacacatttttcttctgataaaatatttttcttatttattgttcaaaacacacaatatagacaataactctaattctggtgcagttttatttagtagtgttttatccccggtgcctggctgtctacagtcatacctcagcacatagctttactctgagataagccctctctcctttgctctttctcccatgctttctggagtttgtctgcaggatgcaggttttgaactgaagagcgcagtggagttcttactgtgcctttccggttccagcacaatcaaagttttgtgtttggaattgtccttgacattctttcgtcccacaatggggtggacacagtgtgctggaaaccatgacatcattatcattgacacagacttaaataaatcacctgcatcttggcctctttctgcttattcaaggattcttcatcttaaggaagaaagtgctctttatttttacaaatcttcatcccaggggtgactggaagacgcaaacttttacaagtgttttaaaaataaatatactatgtggttttagacacagtatgctgagtcagaggtgtcttagagaatgtttaaggttagacataaggcagaaagacagccagattgcctttaattcggaggcaatattcctaaactgtgtatcattatgtccttctgaatatggattcacttgaaacttaattaaataggcatatacataacatttcaaatacatacctgaaaaggcttagtagtgtttcattttcacacattgagcttgatattcaaaaaagaaaaagattgatgctcagtgaatcaaagcaaagtactttctaggtaaaagtgacaccatctcatccaatgtctctgaaagatctcagttgcacagtctttggataaaaagggttataactaaataatactacaaaatgcaatttacacaatgtgctgactacacatttgtatacccagcatttattaatttgggaagcaaccaactactgtaacttctctttactttttcataagaaaatgacaatgaggaaggaagtgcagcagaaatcttgaacattaccactattatgcaaaaa

SEQ ID NO: 3890 - DNA, 1308 bp, Homo sapiens; identical to SEQ ID NO: 496

SEQ ID NO: 3891 - DNA, 2816 bp, Homo sapiens; identical to SEQ ID NO: 132

SEQ ID NO: 3892 - DNA, 3138 bp, Homo sapiens; identical to SEQ ID NO: 1153

SEQ ID NO: 3893 - DNA, 1270 bp, Homo sapiens
ggggactgctcttccagaggcaagaccaaccaagatgagtgccctgggagctgtcattgccctcctgctctggggacagctttttgcagtggactcaggcaatgatgtcacggatatcgcagatgacggctgcccgaagccccccgagattgcacatggctatgtggagcactcggttcgctaccagtgtaagaactactacaaactgcgcacagaaggagatggagtgtacaccttaaacaatgggaagcagtggataaataaggctgttggagataaacttcctgaatgtgaagcagtatgtgggaagcccaagaatccggcaaacccagtgcagcggatcctgggtggacacctggatgccaaaggcagctttccctggcaggctaagatggtttcccaccataatctcaccacaggtgccacgctgatcaatgaacaatggctgctgaccacggctaaaaatctcttcctgaaccattcagaaaatgcaacagcgaaagacattgcccctactttaacactctatgtggggaaaaagcagcttgtagagattgagaaggttgttctacaccctaactactcccaggtagatattgggctcatcaaactcaaacagaaggtgtctgttaatgagagagtgatgcccatctgcctaccttcaaaggattatgcagaagtagggcgtgtgggttatgtttctggctgggggcgaaatgccaattttaaatttactgaccatctgaagtatgtcatgctgcctgtggctgaccaagaccaatgcataaggcattatgaaggcagcacagtccccgaaaagaagacaccgaagagccctgtaggggtgcagcccatactgaatgaacacaccttctgtgctggcatgtctaagtaccaagaagacacctgctatggcgatgcgggcagtgcctttgccgttcacgacctggaggaggacacctggtatgcgactgggatcttaagctttgataagagctgtgctgtggctgagtatggtgtgtatgtgaaggtgacttccatccaggactgggttcagaagaccatagctgagaactaatgcaaggctggccggaagcccttgcctgaaagcaagatttcagcctggaagagggcaaagtggacgggagtggacaggagtggatgcgataagatgtggtttgaagctgatgggtgccagccctgcattgctgagtcaatcaataaagagctttcttttgacccaaaaaaaaaaaaaaaaaaaaaaaaaaaa

SEQ ID NO: 3894 - DNA, 7944 bp, Homo sapiens
atgcgtgcccgcgacgctccatcccaaacacacacacatttttcccccggacttggaaagtcacccaaagccgccccaagtgcaggcaaacagaccttgctgactgaaggcaaagactcctccatcccacctgccctcccagctgccacggccatcgacccctcctttacaaggggctcctgcaactccccagcagcacgtgttggaatggacttcggaccctggcctcttgggatgcaaaggatgaagtgacacccccagccacatccgaggaggttctaggacctgctacgagagtttgggaccaaggagaagagaatggatcttggaacagctgagggcacccggtgcacggacccgcctgcaggcaagcccgccatggcgcccaaacgcaagggtggcctgaagctgaacgccatctgcgccaagctgagccgccaggtggtggtggagaagcgagctgacgccggctcccacacggagggcagcccatcgcagccccgggaccaagagcgcagtggccctgagtctggggcagcccgggccccccgcagcgaggaagacaagagacgggcagtgatcgagaagtgggtgaacggggagtacagcgaggagccggcacccacacccgtgttggggcggattgcccgcgagggcctggagctgcctcccgagggtgtctacatggtgcagccccaggggtgcagcgatgaggaagaccacgcggaggagccctccaaggacggcggtgccctggaggagaaggattcggacggggcagcctccaaggaggacagcggccccagcaccaggcaggcttcaggagaggcctcctcgctgcgggactacgcggcctccaccatgaccgagttcctcggcatgtttggctataatgaccagaacacgcgggacgagctggccaggaagatcagctttgagaagctgcacgcgggctccaccccggaggcagccacctcctccatgctgcccacctccgaggataccctcagcaagcgggcgcggttctctaagtatgaggagtacatccgcaagctcaaggctggcgagcagctctcctggccggcccccagcaccaagaccgaggagcgggtgggcaaggaggtggtgggcaccccgcccggcctgcggctgcccagcagcacggcccacctggagaccaaggccaccatcctgcccctgccgtcgcacagcagtgtccagatgcagaacctggtagcccgggcctccaagtacgacttcttcatccaaaaactgaagaccggcgagaatctgcggccccaaaacgggagcacctacaagaagccatccaagtatgacctggagaatgtcaagtacctgcacctcttcaaacccggggagggcagccccgacatgggcggggccatcgccttcaagacaggcaaggtggggcgcccttccaagtacgacgtccggggcatccagaagccaggccccgccaaggttccgcccacccccagcctggctcccgcacccctcgccagcgtgcccagtgcccccagcgcccccgggccagggccagagcctcctgcctccctgtccttcaacactcccgagtacctgaagtcaaccttctccaaaacagactccatcaccacggggaccgtctccactgtcaagaacggactgcccacagataaaccagccgtcactgaagatgtaaacatttaccagaaatatattgccaggttctcgggcagccagcactgtggccacatccactgtgcctaccagcaccgcgagcactaccactgccttgaccctgagtgtaactaccagaggttcacgagtaagcaggacgtgatccgccactacaacatgcacaagaagcgcgacaactccctgcagcacggcttcatgcgtttcagcccgctggacgactgcagcgtctactaccacggctgccacctcaatgggaagagcacccactatcactgcatgcaggtgggctgtaacaaggtgtacacgagcacgtctgacgtgatgacccacgagaacttccacaagaagaatacccagctcattaacgacggcttccagcgcttccgagccaccgaagactgtggcacagccgactgccagttctacggacagaagaccacgcacttccactgcaggcgccccggctgcacattcactttcaagaacaagtgtgacatcgagaagcacaagagctaccacatcaaggacgatgcctacgccaaggacggcttcaagaagttctacgagtacgaggagtgcaagtacgagggctgcgtgtacagcaaggctaccaaccacttccactgcatccgcgccggctgcggcttcaccttcacctccaccagccagatgacctctcacaagcgcaagcatgagcgccggcacatccgctcctcgggcgcgctggggctgccgccctcgctgctgggcgccaaggacacggagcacgaggagtccagcaacgacgaccttgttgacttctccgccctgagcagcaagaactccagcctgagcgcctcccctaccagccagcagtcctctgcgtccctggctgccgccactgccgccaccgaggctgggcccagtgccaccaaacctcccaacagcaagatctcggggctgctgccccagggcctgcctggctcaatccccctggccctggccctctccaactcgggcctgcccacccccacgccctacttccccatactggctggccgtgggagcacctccctgcctgtgggcacccccagcctcctgggtgccgtgtcgtctgggtcagcagcctcagccacccctgacacacccacgctggtcgcctcgggagctggagactcagcccccgtggctgccgcctctgtcccggcaccacccgcctccatcatggagaggatctctgcaagcaagggcctcatctcgcccatgatggccaggctggctgcagctgccctcaagccctctgccacctttgacccaggaagcgggcagcaggtcaccccagccaggttccccccggcccaagtgaagccggaacccggtgagagcaccggcgccccaggcccccacgaagcctcccaggaccgcagtctagacctgactgtgaaggagcccagcaacgaatcaaatggccacgcagtcccggcaaattcatctcttttatcctcgcttatgaataagacgtctcagggcaaccctggcctgggcagcctgctgaacatcaaggcggaagcagaggggagccccgctgcggagccctcgccctccctaggcaaggccgtgaaggcgctggttcaggagaagttggcagagccctggaaggtgtacctgcgcaggtttggtacaaaggacttctgtgacggccagtgtgacttcctccacaaggcccacttccactgcgtggtggaggaatgcggcgcgctcttcagcaccttggacggggccatcaagcacgcaaacttccacttccggacagagggaggagcagcaaaaggaaacacagaggctgcctttccggcctcggccgccgagaccaaacctcccatggccccctcgtcccctccggtccctcctgtcaccacggccacggtgtcctctctggaggggcccgctcccagcccggcctccgtgccctccacccccaccctgctcgcctggaagcagctggcttccaccataccccagatgcctcagatcccagcgtcagtgcctcacctgcccgcctcgcccttggcaacgacttctctagagaacgccaagccccaggtcaaacccggattcctccagttccaggagaacgatccttgcctcgccacggactgcaagtacgccaacaagttccacttccactgtctctttgggaactgcaagtacgtctgcaaaacgtctggcaaggccgaatcccactgcctggaccacatcaaccccaacaacaacctggtgaacgtgcgagaccagtttgcatactactctctgcagtgtctctgtcccaaccagcactgcgagttccgaatgcgtgggcactaccactgcctccgcaccggctgctattttgtgaccaacatcaccaccaagctcccctggcacatcaagaagcatgagaaggcggagcggcgggcagccaatggcttcaaatacttcaccaagcgcgaggagtgtggcaggctaggttgcaagtacaaccaggtgagcagccacttccactgcatccgggagggctgccagttctccttcctcctcaagcaccagatgacctcccacgcgcggaagcacatgcggaggatgctggggaagaacttcgaccgcgtgcccccctcccagggccccccaggcctgatggatgctgagacagatgagtgcatggactacactggctgcagcccaggcgccatgtcctctgagtcatccaccatggaccggagctgctccagcacccccgtgggtaacgagagcaccgcggcagggaacaccatctctatgccgacagcctcgggggccaaaaagcgcttctggatcatcgaggacatgtcgcccttcggcaagcggcggaagacggcgtcctcccggaagatgctggacgagggcatgatgctggagggcttccggcgcttcgacctttacgaggactgcaaggacgcagcttgtcagttctcgctcaaggtcacccactaccactgcacgcgcgagaactgcggctacaagttctgcgggcgcacgcacatgtacaagcacgcgcagcaccacgaccgcgtggacaacctggtgctggacgacttcaagcgcttcaaggcctcactcagccgccacttcgccgactgccccttctcgggcaccagcacgcacttccactgcctgcgctgccgcttccgctgcaccgacagcaccaaggtcacggcgcatcgcaagcaccacggcaaacaggacgtgatcagcgccgcgggcttccgccagttcagctccagcgccgactgcgccgtgcccgactgcaagtacaagctcaagtgctcgcacttccactgcaccttcccgggctgccgccacacggtggtgggcatgtcgcagatggactcgcacaagcgcaagcacgagaagcaggagcgcggcgagcccgcggcagagggccccgcgcccgggcctcccatcagtctggacggctccctgtcgctgggcgccgagccgggctcgctgctcttcctgcagtcggcggccgccggcctgggcctggcgctgggcgacgcgggcgaccccggcccgcccgacgccgccgcccccgggccgcgcgagggcgccgccgccgccgccgccgcagctggggagtcctcgcaggaggacgaggaggaggagctggagctgccggaggaggaggccgaagacgacgaggacgaggacgacgacgaggacgacgacgacgaggacgacgacgaggacgacgacgacgaggacctgcgcaccgactcggaggagtcgctgcccgaggcggcggcggaggcggcgggcgcgggcgcgcggaccccggccttggcggcgctggcggccctgggcgcccccggccccgcgcccactgcagcctcctcgccctagcggcgcccgcgggtggccctggcggcggcctcggcctcggcctcgggagcggcgccgccccgcgcgaagcggcccctgggcagagccccgcgccccgccggtgcttccggaccccgagtccgtctcaggacagaggcggggacccctctggtgctccgcggccgaggacacaggcggcggcggtggccctgctctagggaggccgggtctcttcagggaaacagaaggtgctcttgtcccggggtagggaacctaggagcaggggtcccgggcgaatgcggcgcagctcccggccgctgccccggcgcccctccccgcggccgattcggccccgcgaccattgctcaggactgggacgggcgctgggggccaccgggacccccaccgcgcgccaccagggcggggtggctcctggagccgctggcggggcctccctcatgcagctaggatcctcccccctgcccagggggagacgggcagaaggcagtcagcacgggtgacactacagggaccgtggaggaagcctcacgggagtagcagccgcggagctccagctcagccccaccccagggcccggctgctcccccaggcctgggtcgggtctgtttggcgactccctggccccagcctccgccccagggaaaccgaggctgcgtccaaaacccagagtagcccgctgggggccggggcggggtctcggccaccctggtggtgcaaacaggaaggatgcgcctggttttggctttaatgttcaaaatggaaaaaaatacaagaaagttgtacagtatttttcctgtaaaggttattattctacatagaacaaaaaggaagaaagcaggcgtggtgagagtgcagacccgcctgggcccggcctgaggttggaggctcagtcccgtttatcctgtgggatttggtccagggtttttgtagaggccttaactgtttgaggctgtctgtcttcacaatagcactgatgggagctgcgtgattccaactcttaacttgaattttgtagagacaagaaaaaaggactattactgttgatccaagtttgtagttaatttaacatttgagttctctcttggtgatgcgtgtggctttatagggctttttttttttccagtttgttttattactttgtttgggatgcttcttcgctggtgcagtctacccagattgggttccctttgcaaaacatcccccttcctggagatgatgatgccatcgaagcccgggccagggcctgacctggcaggcacacacctggccagtggctctgaggtccccggggaccgagtcccctgcgagggcaggctgcccgaggccacacctgcccaccttccctactccaggccaccagctggtgtcagattgggccaccgggagagaacaggcctaggagggaatggaaggctggcggggaggctgtcatccagaagcctcctccccagaggtctccaggaggaacctggctcaactggggggcagtggtttacttttcccttttttcttcctttcttttgtcctctcagctgcccacagccagaaagccaggaccacccgaactggacagggagcagggagggaggagtggtcgcacggagcgtacctgattcaacaggaaatcagttattttctaaaacagcccctaccagagcctcctgaactctgtgggcaccacgtgctgctgtgagcatctgcccagacagtgacccgccacaggccccgggcgtctgtggaaggagttttgtaaaggaaaaaaaaacacacacacacaaacattttttcaatgtagcaaaatcaaacttaaaaaaaaaaaagaagaaaagaagaagatgccgacagtgcggagtctagccttttgtaaacttcatattgcacactaggactataagccattgctagctcattttgaattttaacgtgtaatttttgttttattttctttctgtggggaaacaatgcttgatccaccaatgctctttttaatgttttataactatgtatgtgtatatatataaatatcaaataatatgtatgcacatatgtgtgtgtatatatctatatgtatatacatatatagatatatagagatatatagagaggttttgagacaaaaaaaatacagaacgtgaaacccgagctgaacagcgtgtgctctgattacttgaatctggtctcctcggcacctggttattaagaactgaatatttttccacttgaatttagtgctattagaaatttaatatatgtgttttatttatttgattttttttttttttttgcatgactgatgcaaggtttgacattttcactcaataaaaactggaaaaaaaaaaaaaaaaa

SEQ ID NO: 3895 - DNA, 1948 bp, Homo sapiens
ggggctacatgaaaaggatggtttcttggagcttccacaaacttaaaaccatgaaacatctattattgctactattgtgtgtttttttagttaagtcccaaggtgtcaacgacaatgaggagggtttcttcagtgcccgtggtcatcgaccccttgacaagaagagagaagaggctcccagcctgaggcctgccccaccgcccatcagtggaggtggctatcgggctcgtccagccaaagcagctgccactcaaaagaaagtagaaagaaaagcccctgatgctggaggctgtcttcacgctgacccagacctgggggtgttgtgtcctacaggatgtcagttgcaagaggctttgctacaacaggaaaggccaatcagaaatagtgttgatgagttaaataacaatgtggaagctgtttcccagacctcctcttcttcctttcagtacatgtatttgctgaaagacctgtggcaaaagaggcagaagcaagtaaaagataatgaaaatgtagtcaatgagtactcctcagaactggaaaagcaccaattatatatagatgagactgtgaatagcaatatcccaactaaccttcgtgtgcttcgttcaatcctggaaaacctgagaagcaaaatacaaaagttagaatctgatgtctcagctcaaatggaatattgtcgcaccccatgcactgtcagttgcaatattcctgtggtgtctggcaaagaatgtgaggaaattaccaggaaaggaggtgaaacatctgaaatgtatctcattcaacctgacagttctgtcaaaccgtatagagtatactgtgacatgaatacagaaaatggaggatggacagtgattcagaaccgtcaagacggtagtgttgactttggcaggaaatgggatccatataaacagggatttggaaatgttgcaaccaacacagatgggaagaattactgtggcctaccaggtgaatattggcttggaaatgataaaattagccagcttaccaggatgggacccacagaacttttgatagaaatggaggactggaaaggagacaaagtaaaggctcactatggaggattcactgtacagaatgaagccaacaaataccagatctcagtgaacaaatacagaggaacagccggtaatgccctcatggatggagcatctcagctgatgggagaaaacaggaccatgaccattcacaacggcatgttcttcagcacgtatgacagagacaatgacggctggttaacatcagatcccagaaaacagtgttctaaagaagacggtggtggatggtggtataatagatgtcatgcagccaatccaaacggcagatactactggggtggacagtacacctgggacatggcaaagcatggcacagatgatggtgtagtatggatgaattggaaggggtcatggtactcaatgaggaagatgagtatgaagatcaggcccttcttcccacagcaatagtccccaatacgtagatttttgctcttctgtatgtgacaacatttttgtacattatgttattggaattttctttcatacattatattcctctaaaactctcaagcagacgtgagtgtgactttttgaaaaaagtataggataaattacattaaaatagcacatgattttcttttgttttcttcatttctcttgctcaccaagaagtaacaaaagtatagttttgacagagttggtgttcataatttcagttctagttgattgcgagaattttcaaataaggaagaggggtcttttatccttgtcgtaggaaaaccatgacggaaaggaaaaactgatgtttaaaagtccacttttaaaactatatttatttatgtaggatctgtcaaagaaaacttccaaaaagatttattaattaaaccagcctctgttgcaataaaaaaaaaaaaaaaaaaaaaaaaaaaaaa

SEQ ID NO: 3896 - DNA, 840 bp, Homo sapiens
ggggacactctaccaccatgaatctacttctgatccttacctttgttgcagctgctgttgctgccccctttgatgatgatgacaagatcgttgggggctacatctgtgaggagaattctgtcccctaccaggtgtccttgaattctggctaccacttctgcggtggctccctcatcagcgaacagtgggtggtgtcagcaggtcactgctacaagtcccgcatccaggtgagactgggagagcacaacatcgaagtcctggaggggaatgaacagttcatcaatgcggccaagatcatccgccaccccaaatacaacagccggactctggacaatgacatcctgctgatcaagctctcctcacctgccgtcatcaattcccgcgtgtccgccatctctctgcccactgcccctccagctgctggcaccgagtccctcatctccggctggggcaacactctgagttctggtgccgactacccagacgagctgcagtgcctggatgctcctgtgctgagccaggctgagtgtgaagcctcctaccctggaaagattaccaacaacatgttctgtgtgggcttcctcgagggaggcaaggattcctgccagggtgattctggtggccctgtggtctccaatggagagctccaaggaattgtctcctggggctatggctgtgcccagaagaacaggcctggagtctacaccaaggtctacaactatgtggactggattaaggacaccatagctgccaacagctaaagcccctggtccctctgcagtctctataccaataaagtgaccctgctcacaaaaaaaaaaaaaaaaaaaaaaaaaaaaa

SEQ ID NO: 3897 - DNA, 1788 bp, Homo sapiens
ggctggctttcggtttctctgctcacctccggataaatcacggggtctcccgcgccgctcatggcgcctcccgtccgtctcgagcgtccctttccttcccggcgctttcctgggttgcttctggcggccctggtgttgctgctgtcctccttctccgatcaatgcaatgtcccggaatggcttccatttgccaggcctaccaacctaactgatgactttgagtttcccattgggacatatctgaactatgaatgccgccctggttattccggaagaccgttttctatcatctgcctaaaaaattcagtctggacaagtgctaaggacaagtgcaaacgtaaatcatgtcgtaatcctccagatcctgtgaatggcatggcacatgtgatcaaagacatccagttcggatcccaaattaaatattcttgtcctaaaggataccgactcattggttcctcgtctgccacatgcatcatctcaggcaacactgtcatttgggataataaaacacctgtttgtgacagtgatgacattagggagtgaggcctttggaaggtgatgagatcatgagagcagagctgtcacgaatgggattagcgtcctaataaaagaggcccagaagagctcctttgcccctcctgccatgggaagaaatgctgaatctgccagagaggaattatttgtgggctaccccccaccatcgccaatggagatttcactagcatcagcagagagtattttcactatggatcagtggtgacctaccactgcaatcttggaagcagagggaaaaaggtgtttgagcttgtgggtgagccctccatatactgcaccagcaaagatgatcaagtgggcatctggagtggcccagcccctcagtgcattatacctaacaaatgcacgcctccaaatgtggaaaatggaatattggtatctgacaacagaagcttattttccttaaatgaagttgtggagtttaggtgtcagcctggctttggcatgaaagggccctcccatgtgaagtgccaggccctgaacaaatgggagccagagttaccaagctgctccagggtatgtcagccacctccagatgtcctgcatgctgagcgtacccaaagggacaaggacaacttttcacccgggcaggaagtgttctacagctgtgagcccggctacgacctcagaggatctacgtatttgcactgcacaccccagggagactggagccctgcagcccccagatgtgaagtgaaatcctgtgatgacttcctgggccaacttcctaatggccatgtgctatttccacttaatctccagcttggagcaaaagtggattttgtttgtgatgaaggatttcaattaaaaggcagctctgctagttactgtgttttggctggaatggaaagcctttgggatagcagtgttccagtgtgtgaacgtaaatcatgtgaaactcctccagttccagtgaatggcatggtgcatgtgatcacagacatccatgttggatccagaatcaactattcttgtactacagggttctgattaaaaggcaggtctgctagtcattgtgtcttggctggaatgaaagccctttggaatagcagtgttccagtgtgttaacaaatcttttgtccaaatcctccagctatccttaatgggagacacacaggaactccccttggagatattccctatggaaaagaagtatcttacacatgtgacccccacccagacagagggatgaccttcaacctcattggggagagcaccatccgccgcacaagt

SEQ ID NO: 3898 - DNA, 2726 bp, Homo sapiens
acccagaagaccgtgccttgcctggaagtcctgcctgtaggcctgaaggacttgccctaacagagcctcaacaactacctggtgattcctacttcagccccttggtgtgagcagcttctcaacatgaactacagcctccacttggccttcgtgtgtctgagtctcttcactgagaggatgtgcatccaggggagtcagttcaacgtcgaggtcggcagaagtgacaagctttccctgcctggctttgagaacctcacagcaggatataacaaatttctcaggcccaattttggtggagaacccgtacagatagcgctgactctggacattgcaagtatctctagcatttcagagagtaacatggactacacagccaccatatacctccgacagcgctggatggaccagcggctggtgtttgaaggcaacaagagcttcactctggatgcccgcctcgtggagttcctctgggtgccagatacttacattgtggagtccaagaagtccttcctccatgaagtcactgtgggaaacaggctcatccgcctcttctccaatggcacggtcctgtatgccctcagaatcacgacaactgttgcatgtaacatggatctgtctaaataccccatggacacacagacatgcaagttgcagctggaaagctggggctatgatggaaatgatgtggagttcacctggctgagagggaacgactctgtgcgtggactggaacacctgcggcttgctcagtacaccatagagcggtatttcaccttagtcaccagatcgcagcaggagacaggaaattacactagattggtcttacagtttgagcttcggaggaatgttctgtatttcattttggaaacctacgttccttccactttcctggtggtgttgtcctgggtttcattttggatctctctcgattcagtccctgcaagaacctgcattggagtgacgaccgtgttatcaatgaccacactgatgatcgggtcccgcacttctcttcccaacaccaactgcttcatcaaggccatcgatgtgtacctggggatctgctttagctttgtgtttggggccttgctagaatatgcagttgctcactacagttccttacagcagatggcagccaaagatagggggacaacaaaggaagtagaagaagtcagtattactaatatcatcaacagctccatctccagctttaaacggaagatcagctttgccagcattgaaatttccagcgacaacgttgactacagtgacttgacaatgaaaaccagcgacaagttaaagtttgtcttccgagaaaagatgggcaggattgttgattatttcacaattcaaaaccccagtaatgttgatcactattccaaactactgtttcctttgatttttatgctagccaatgtattttactgggcatactacatgtatttttgagtcaatgttaaatttcttgcatgccataggtcttcaacaggacaagataatgatgtaaatggtattttaggccaagtgtgcacccacatccaatggtgctacaagtgactgaaataatatttgagtctttctgctcaaagaatgaagctccaaccattgttctaagctgtgtagaagtcctagcattataggatcttgtaatagaaacatcagtccattcctctttcatcttaatcaaggacattcccatggagcccaagattacaaatgtactcagggctgtttattcggtggctccctggtttgcatttacctcatataaagaatgggaaggagaccattgggtaaccctcaagtgtcagaagttgtttctaaagtaactatacatgttttttactaaatctctgcagtgcttataaaatacattgttgcctatttagggagtaacattttctagtttttgtttctggttaaaatgaaatatgggcttatgtcaattcattggaagtcaatgcactaactcaataccaagatgagtttttaaataatgaatattatttaataccacaacagaattatccccaatttccaataagtcctatcattgaaaattcaaatataagtgaagaaaaaattagtagatcaacaatctaaacaaatccctcggttctaagatacaatggattccccatactggaaggactctgaggctttattcccccactatgcatatcttatcattttattattatacacacatccatcctaaactatactaaagcccttttcccatgcatggatggaaatggaagatttttttttaacttgttctagaagtcttaatatgggctgttgccatgaaggcttgcagaattgagtccattttctagctgcctttattcacatagtgacggggtactaaaagtactgggttgactcagagagtcgctgtcattctgtcattgctgctactctaacactgagcaacactctcccagtggcagatcccctgtatcattccaagaggagcattcatccctttgctctaatgatcaggaatgatgcttattagaaaacaaactgcttgacccaggaacaagtggcttagcttaagtaaacttggctttgctcagatccctgatccttccagctggtctgctctgagtggcttatcccgcatgagcaggagcgtgctggccctgagtactgaactttctgagtaacaatgagatacgttacagaacctatgttcaggttgcgggtgagctgccctctccaaa

SEQ ID NO: 3899 - DNA, 9648 bp, Homo sapiens; identical to SEQ ID NO: 217

SEQ ID NO: 3900 - DNA, 3150 bp, Homo sapiens; identical to SEQ ID NO: 569

SEQ ID NO: 3901 - DNA, 1602 bp, Homo sapiens; identical to SEQ ID NO: 559

SEQ ID NO: 3902 - DNA, 1009 bp, Homo sapiens
ggccctgcaagagctggctgcttagagactgcgagaaggaggtcccccacggcccttcaggatgaaagctgcggtgctgaccttggccgtgctcttcctgacggggagccaggctcggcatttctggcagcaagatgaacccccccagagcccctgggatcgagtgaaggacctggccactgtgtacgtggatgtgctcaaagacagcggcagagactatgtgtcccagtttgaaggctccgccttgggaaaacagctaaacctaaagctccttgacaactgggacagcgtgacctccaccttcagcaagctgcgcgaacagctcggccctgtgacccaggagttctgggataacctggaaaaggagacagagggcctgaggcaggagatgagcaaggatctggaggaggtgaaggccaaggtgcagccctacctggacgacttccagaagaagtggcaggaggagatggagctctaccgccagaaggtggagccgctgcgcgcagagctccaagagggcgcgcgccagaagctgcacgagctgcaagagaagctgagcccactgggcgaggagatgcgcgaccgcgcgcgcgcccatgtggacgcgctgcgcacgcatctggccccctacagcgacgagctgcgccagcgcttggccgcgcgccttgaggctctcaaggagaacggcggcgccagactggccgagtaccacgccaaggccaccgagcatctgagcacgctcagcgagaaggccaagcccgcgctcgaggacctccgccaaggcctgctgcccgtgctggagagcttcaaggtcagcttcctgagcgctctcgaggagtacactaagaagctcaacacccagtgaggcgcccgccgccgccccccttcccggtgctcagaataaacgtttccaaagtggggaaaaaaaaaaaaaaaaaaaaaaaaaaaaaaaaaaaaaaaaaaaaaaaaaaaaaaaaaaaaaaaaaaaaaaaaaaaaaaaaaaaaaaaa

SEQ ID NO: 3903 - DNA, 4841 bp, Homo sapiens; identical to SEQ ID NO: 606

SEQ ID NO: 3904 - DNA, 783 bp, Homo sapiens
gtgatgctgacactgctggttcagggaccacgcttggagaaccactacactagggcaagcaggaagagagtcctccttctggaactgaagcaggcagtgtgaagacccatgtggaacaccttaacccgaagcctctctgaccatccagttggcaaagaccctcaggccatgaggactggccaaagacagaacaaagggatgaggactcgactgggatgcctgtctcacaagtcagactcgtgtagtgatttcacagctattcttccagacaaacccaaccgcgctctcaagagattatcgacagaagaagctacgaggtgggcagattcctttgatgtgcttctctctcataagtatggggtggctgcattccgtgccttcttgaagacggagttcagtgaggagaacctggaattctggttggcctgtgaggagttcaagaagaccaggtcaactgcaaaactggtctctaaggcccataggatctttgaggagtttgtggatgtgcaggctccacgggaggtaaacattgacttccagacccgagaagccacgaggaagaacctgcaggagccatccctgacttgctttgaccaagcccaaggaaaagtacacagcctcatggagaaagactcttaccccaggttcctgaggtccaaaatgtacttagatctgctgtcccaaagccagaggaggctcagttagacctcagaagggaactcctggaaatcaccggctttcccctccacttgctgccaagatcatattctaatgtgaaatgtc

SEQ ID NO: 3905 - DNA, 519 bp, Homo sapiens; identical to SEQ ID NO: 743

SEQ ID NO: 3906 - DNA, 43815 bp, Homo sapiens; identical to SEQ ID NO: 2301

SEQ ID NO: 3907 - DNA, 2772 bp, Homo sapiens
cagcccgaggagtagaggcagcagcagctggacccccaaagagagacgtggggcagcggctgtgaccgcatctcctgagctacaacaacaggtcgcctttttgagactcctttggcgggaagggctacttggaaaggaaggtttgaaagagtgagaagggtaggtgtaagggttccctaattcgtcgaaagaattctattgggtgactctcgttcgtcttctctatcctacactccacatactgaccctatattatccagactgtgccggggagaaatcaaaaacacctgtttgaagaaacggctgcacctgtgtgcttatttgtgccagagggtggcctagcccacctgcaggaagagatttggctgggttctgttgagggtgattgttaggacgttgtattttgttgccattattccaaatacctgtcttggagggaaagttgcccttctgagaactgtgactttaccaggagccctatcttggaataagagttacacctctggaccacgtttctcactagtactttgcttgactggaggaagtgggtgacttttggctgcttcggtgacccattgtagacgcctcgttacccttcttccttccgcttcaagtaatcatggcggcgggggtggcagcgtggctgccttttgcaagggcagcggctatcgggtggatgcctgtggcctcggggcctatgccggctcccccgaggcaggagaggaaaaggacccaagatgctctcattgtgctgaatgtgagtggcacccgcttccagacgtggcaggacaccctggaacgttacccagacactctactgggcagttctgagagggactttttctaccacccagaaactcagcagtatttctttgaccgtgacccagacatcttccgccacatcctgaatttctaccgcactgggaagctccactatcctcgccacgagtgcatctctgcttacgatgaagaactggccttctttggcctcatcccggaaatcatcggcgactgctgttatgaggagtacaaggatcgcaggcgagagaacgccgagcgcctgcaggacgacgcggataccgacaccgctggggagagcgccttgcccaccatgactgcaaggcagagggtctggagggccttcgagaacccccacaccagcacgatggccctggtgttctactatgtcacggggtttttcattgccgtctctgtcatcgcgaatgtggtggaaacagtgccgtgcggatcaagcccaggtcacattaaagaactgccctgtggagagcggtatgctgtggccttcttctgcttggacacggcctgcgtcatgatcttcacagttgagtatttgcttcgcctggctgcagcgcctagtcgttaccgttttgtgcgtagtgtcatgagtatcatcgacgtggtggccatcctgccttattacattgggctggtgatgacagacaatgaggacgtcagcggagcctttgtcacactccgagtcttccgggtcttcaggatctttaagttttcccgccactctcaaggcctgcgcatcctggggtacacactgaagagttgtgcctcagaattgggcttcttgcttttctcgctcaccatggctatcatcatcttcgctacagttatgttctacgcagagaaggggtcttcggctagcaagttcaccagcatccctgcagccttctggtataccatcgtcaccatgacaacactagggtatggtgacatggtgccaaaaaccatagcagggaagatttttggttctatctgttcgctgagtggggtcttggtcattgctctacctgttccggtgattgtatccaacttcagtcgcatctaccaccagaatcaacgagcagacaaacgaagggcacaaaagaaagctagactggccaggatccgggcagccaaaagcggaagcgcaaatgcttacatgcagagcaaacggaatggtttactcagtaatcagctgcagtcctcagaggatgagcaggcttttgttagcaaatccggctccagctttgaaacccagcaccaccacctgcttcactgcctggaaaaaaccacgaatcacgagtttgtggacgaacaagtctttgaagaaagctgcatggaagttgcaactgttaatcgtccttcaagtcacagtccttcactgtcttcacaacaaggagtcaccagcacctgctgttcacgacgacacaaaaaaacttttcgcatcccaaatgccaatgtatcaggaagccatcaaggtagtatacaagaactcagcacgattcagatcagatgtgtggagagaacacctctgtctaacagccgatccagtttaaatgccaaaatggaagagtgtgttaaactaaactgtgaacaaccttatgtgactacagcaataataagcatcccaacacctccagtaaccacaccagaaggagacgataggccagaatcccctgagtactcaggaggaaatattgtcagagtttctgctttgtaagacaattggaataaggtctaagagaattcgagccctggctgtgaaaagaatctcaacatagaagaaagaagaaacaataaatattctgcagattaatgcagcaaagaaagaaggttggtagtgaaacacaaagcttccaatcttaaggatgtgaataaaaccaccaaatggcatttctagacagtttgacctgttatacagagtaatattctgtggccctttgactttgtgaatgagcacaatgaaatgccgcctactga

SEQ ID NO: 3908 - DNA, 3455 bp, Homo sapiens
gttggcactcatcatgagcccctgttctcattctgcaaatggtgaagctctctattgtcctgaccccacagttcctgtcccatgaccagggccagctcaccaaggagctgcagcagcatgtaaagtcagtgacatgcccatgcgagtacctgaggaaggttatcaatactctggctgaccatcatcatcgtgggactgactttggtggaagtccttggttacatgtcattattgcgtttccgacaagttataaagttgtcattaccctctggatagtttacctttgggtgtctctcctgaagactatcttctggtctcgaaatggacatgatggatccacggatgtacagcagagagcctggaggtccaaccgccgtagacaggaagggctgaggtccatttgtatgcacacaaagaaaagagtttcttcctttcgaggaaataaaattggcctgaaagacgtcattactctacggagacatgtggaaacaaaagttagagctaaaatccgtaagaggaaggtgacaacgaaaatcaaccatcatgacaaaatcaatggaaagaggaagaccgccagaaaacagaaaatgtttcaacgtgcgcaagagttgcggcggcgggcagaggactaccacaaatgcaaaatccccccttctgcaagaaaggctctttgcaactgggtcagaatggcggcagcggagcatcgtcattcttcaggattgccctactggccctacctcacagctgaaactttaaaaaacaggatgggccaccagccacctcctccaactcaacaacattctataactgataactccctgagcctcaagacacctcccgagtgtgtgctcactccccttccaccctcagcggatgataatctcaagacacctcccgagtgtgtgctcactccccttccaccctcagcggatgataatctcaagacacctcctgagtgtctgctcactccccttccaccctcagcggatgataatctcaagacacctcctgagtgtctgctcactccccttccaccctcagcggatgataatctcaagacacctcccgagtgtctgctcactccccttccaccctcagctccaccctcagctccaccctcagcggatgataatctcaagacacgtgccgagtgtctgctccatccccttccaccctcagcggatgataatctcaagacaccttccgagcgtcagctcactccccttccaccctcagctccaccctcagcagatgataatatcaagacacctgccgagcgtctgcgggggccgcttccaccctcagcggatgataatctcaagacaccttccgagcgtcagctcactccccttccaccctcagctccaccctcagcagatgataatatcaagacacctgccgagcgtctgcgggggccgcttccaccctcagcggatgataatctcaagacaccttccgagcgtcagctcactccccttccaccctcagctccaccctcagcagatgataatatcaagacacctgccgagcgtctgcgggggccgcttccaccctcagcggatgataatctcaagacaccttccgagcgtcagctcactccccttccaccctcagctccaccctcagcagatgataatatcaagacacctgccgagcgtctgcgggggccgcttccaccctcagcggatgataatctcaagacaccttccgagcgtcagctcactccccttccaccctcagctccaccctcagcagatgataatatcaagacacctgccttccaccctcagcggatgataatctcaagacaccttccgagcgtcagctcactccccttccaccctcagctccactctcagcagatgataatatcaagatacctgctgagcgtctgcggattccgcttccaccatcagccgatgataatctcaagacaccttccgagcgtcagctcactccccttccaccctcagctccaccctcagcagatgataatatcaagacacctgccgagcgtctgcgggggccgcttccaccctcagcggatgataatctcaagacaccttccgagcgtcagctcactccccttccaccctcagctccaccctcagcagatgataatatcaagacacctgccgagcgtctgcgggggccgcttccaccctcagcggatgataatctcaagacaccttccgagcgtcagctcactccccttccaccctcagctccaccctcagcagatgataatatcaagacacctgccgagcgtctgcggggagcgtctgcgggggccgcttccaccctcagcggatgataatctcaagacaccttccgagcgtcagctcactccccttccaccctcagctccaccctcagcagatgataatatcaagacacctgccgagcgtctgcggaggccgcttccaccctcagcggatgataatctcaagacaccttccgagcgtcagctcactccccttccaccctcagctccaccctcagcagatgataatatcaagacacctgccgagcgtctgcgggggccgcttccaccctcagcggatgataatctcaagacaccttccgagcgtcagctcactccccttccaccctcagctccaccctcagcagatgataatatcaagacacctgccgagcgtctgcgggggccgcttccaccctcagcggatgataatctcaagacaccttccgagcgtcagctcactccccttccaccctcagctccaccctcagcagatgataatatcaagacacctgccgagcgtctgcgggggccgcttccaccctcagcggatgataatctcaagacaccttccgagcgtcagctcactccccttccaccctcagctccaccctcagcagatgataatatcaagacacctgccgagcgtctgcgggggccgcttccaccctcagcggatgataatctcaagacaccttctgagcgtcagctcactccccttccaccctcagctccaccctcagcagatgataatatcaagacacctgccgagcgtctgcgggggccgcttccaccctcagccgatgataatctcaagacacctcccttagctactcaggaggctgaggcagaaaaaccacgcaaacccaagaggcagagggcggctgagatggaaccacctcccgaacccaagaggcggagggtcggtgacgtggaaccgtcacgcaaacccaagaggcggagggccgctgacgtggaaccatcatcacccaaacccaagaggcggagggtcggtgatgtggaaccgtcacgcaaacccaagaggcggagggccgctgacgtggaaccatcatcacccgaacccaagaggcggagggtcggtgacgtggaaccgtcacgcaaacccaagaggcggagggccgctgacgtggaaccatcatcacccgaacccaagaggcggaggttgagctga

SEQ ID NO: 3909 - DNA, 708 bp, Homo sapiens; identical to SEQ ID NO: 1508

SEQ ID NO: 3910 - DNA, 3028 bp, Homo sapiens; identical to SEQ ID NO: 774

SEQ ID NO: 3911 - DNA, 2768 bp, Homo sapiens; identical to SEQ ID NO: 1501

SEQ ID NO: 3912 - DNA, 951 bp, Homo sapiens; identical to SEQ ID NO: 1517

SEQ ID NO: 3913 - DNA, 3320 bp, Homo sapiens
ggaaaacagaaaaagaattgtgtgccactatgtctgaatatatcttctacttgtagataattacatccaagttgcccttttgcctttttatttccgtttttggacacctctttttatcatccagccaactggaatagacaaagcaccgctggtgccctgagcgacagaactctggtagggggctggctgtaaattgacgtggcatggaaattctccgctaagttgtagcagcttgcatgtttctctaagatcaagcccagcctcctggagctgtagcttaatcatgggttcaatgactttacagaaaaatggatagaaaaattcttcaactcctttctttggacccagatggttttttttggtttttttttttttttttggtttttgcttttttttttttttttggttatctatagtttagctgaaaacaaaatcaaagcagttaagtctgtaactttctttttgcagcttaaacaacagaatttgctgctctccctcccctttcctgcaatttaattccttacagattttgccatggggtgcggacttagaaagctagaagaccctgatgatagcagccctggaaaaatattttctaccctgaagagaccgcaagtggaaacaaagacagaatttgcttacgaatatgtattgctggattttactctacaagcttcatcaaacccagaagtcatcaagataaattcaattctggatatagtaacaaaagtggaaaactattatcttaaaggatatattgtcggggctattcatcctgttatacaacctgtggggcagcgaaaacacctacctgcaagttacctatacagagtggtgctattgcgcttgaaattaagcccaaagaattcggcagcacccagtggacaaagacgcccaaggcttgtgattgaggaatgtcccctaacttctgaggcacaaacaaatgacgcagcaaaagaactgatagaaaagattaatgtcgctgctaaaagaggaatgaaatttgttggattcatatcacagcattattctccatctaaattctgcaatggaaccaaccatgatggagatatagaatcgatgctacatgtgagacacggttcagatgaaaactgtagaagttggaatgaagggacgttaagtgggcagtcatctgaaagcggaattgaggaagaacttcatcatgaaagtggacagtatcaaatggaacaaaatggcagccctacttcctctaaatcaagaaagggagaagcctcagataacaaattgtatacagtcttcaatgcttttgatgatgattcaacctcctgggcctatcaggaaggcatcctgtcaatgaaagtaacaagaaaaggatcagtcattagtacacttgatgctgattggctggagttaactaccttttattataaacaaggcttgtctttaattgattcttttgtattctgggaaacatctaaaggggaacatttgcctaaatctttggaaggattttttatctatgaagaagaaggttctggagttccaggttctagtaggaaaggaaatgatgccatcgtagtagaacaatggactgttattgagggatgtgaaatcaaaacagattatggccctctgctgcacactctggctgaattcggatggcttctgacaagcgtgttgcccacacctgtattgagacatgacagtgaagggaatttggctacaaagcagatcgtattccttcagaggccagttatgtggaattcagctgctcaaacaccagataagaaagccagccgccacataaaaggtgaagacaagaataaagccactagtagaagcatcggattagacacaacctcgtcacaacctgcagagagcagacacctgcctgaggagtgccgcctttctccctcccgggaatgctggacaaaggagggaaggctggcacagcacaacagcttctctgggttcagcagcagtgacaacgtcctccgggaattagacgacggacagtttgatcaggaagatggagtgactcaggtcacttgtatgtgagccatgaggtgaagcaaaggaaggccctgtaaataattgttaaaatcattgccaactgaccttattgtattactttctctgcatttatgtaatatttttgaatttttccagacccagcctttcctctaatctatgtaaactttggcacaacctcccagacaaggaagaataaccaacatatttatacatttagaatcatgtttacacttctctcaactaaaacatctggttaaacagatgttccattcggttattacacaataatctatttcagcttctcatgaatgtacaaagtagactttcttacaattcctggtaaggagactgaatatctcaatcagtattttacccaattagagagagttctcaggaagttacagtcttatttaagctgaaaaataacctctctctctcttttttttctctctctctctcatacacacacacagctaattagtgcaaataaatatctatttcccaaatataataattaatccacattttgtctttaactatagcatgtatatacaaagcaagcccctatgtgttaaaatattttttgaaaaaaatcttttttatgtatctttgcttttaaagggtcatgtcaccaaccctgtactgattcattgcacataaatgttgttgctcctaaaagcctaaaaatgcagacagcaaagcagcatctcttaaaattcaatatgaaaagaacccataatctcaatacataaataccttagtagagagtaagatttaatttttttttattttaaagtccaaatactatgaagaggaaaaatatcaacttcaatttgaaactgaagtcttttacatctgtctagatttgaattctgcttttattttgacttgttaaatcctgaagaatgttgaaacctagaattttcaatctggcaggagtagaaagatgctcatagcacacgcgatatgtatgataacatattttgtttcatcttgcttttctttccccttctaatagaggtggctttgccttgacccagcctttaacaatctttaaaattctacaaaataaaggattttcatttatctatgaaaggcttactttgaaagatggaacctccaagtgaattacaacttattctatcattgatgaattcagcctattatatatttttattaacattgatgttgacattgtaagatcattttaataataaaacatcatttttaaaaaaaaaaaaaaaaaaaaaaaaaaaaaaaaaaaaaaaaaaaaaaaaaaaaaaaaaaaaaaaaaaaaaaaaaaa

SEQ ID NO: 3914 - DNA, 1306 bp, Homo sapiens
cagacaacagacacgcgaggtcaggaagaagccgcttataaattaccgcttccttcgcgccgccgccaacgccgagccccgaggaccgcaagcccagaggacaagctgcgccaagagggagtgcggagcgttcacccagcgggtcagagagcgagcgggcaggcagcccccggccggcggaacccggcacagccgagcagagcgcgggcggcgccgcagccaccccagatccagaaccagaaccacagcccttctgaggagctcccaaacaaagcaaggagatggccaccaaggagaagctgcagtgtctgaaagatttccacaaggacatcctgaagccctcaccagggaagagcccaggcacgcggcctgaggacgaggctgagggaaaacctccgcagagggagaagtggtctagcaagatcgactttgtgctctctgtggctggcggcttcgtgggcttgggcaacgtctggcgcttcccgtacctctgctacaagaatggtggaggtgcgtttctcataccgtattttattttcctgtttgggagcggcctgcctgtgtttttcttggagatcatcataggccagtacacctctgaagggggcatcacctgctgggaaaagatctgccccttgttctctggtatcggctatgcctccgttgtaattgtgtccctcctgaatgtctactacatcgtcatcctggcctgggccacatactacctgttccagtccttccagaaggagctgccctgggcacactgcaaccacagctggaacacacctcactgcatggaggacaccatgcgcaagaacaagagtgtctggatcaccatcagctccaccaacttcacctcccctgtcatcgagttctgggagtaaggccacctcattgaagcaaggaggaggacatgggtggggcagagaggatggcccacttccttatctcctcccctgggatacaggagccactgtcttcgggggagtgggaggagggtgcagatctggagataaatttatgcctttggccatagacaggactggaatcccagttctgccacttactggctgtttgaccttaggcaagccactcctcctttctgagcctcagtttctttacctgtaagataaaaagaatgaatcattactaccctgtgaggcaggtatgcatacttatgttgtctaaaaatgatacagttttcttaatgtattttaggaaaaaatatattctgttattgcacagagaaaaaaaaaaaaaaaaaaaaaaaaaaaaaaaaaaaaaaaaaaaaaaaaaaaaaaaaaaa

SEQ ID NO: 3915 - DNA, 3319 bp, Homo sapiens; identical to SEQ ID NO: 1918

SEQ ID NO: 3916 - DNA, 3642 bp, Homo sapiens
gcttccggccgcggccctggcgcgtggtctgcgcgcgcccggccgtgcgtgcggatgcggggaggctgcgtgtgtgcgcagggagagaacgccggccaccttcccgcttccgagctgggtgcgcgccgagcacaggagggtgcaatacctgccttgcgtcgcccgtgccgctccagccaccgtcaaatccgggtagcgacccggggcgtttgcagcggtgccgaggaagaggacgggaacggtgttacgattgcctgcgtttaggaggtggctgcgttgtgggaaaagctatcaaggaagaaattgccaaaccatgtctttttttctgttttcagagtagttcacaacagatctgagtgttttaattaagcatggaatacagaaaacaacaaaaaacttaagctttaatttcatctggaattccacagagacaaggccactttatgtttcccaggctggactggaacccctgggctcaaatgatcctcctacctaagcctgcagagtagcgaggacttcagttttcttagctccctggacccggttgacctgttggctcttcccgctggctgctctatcacgtggtgctctccgactactcaccccgagtgtaaagtcttgctgctctgttgcccaggctggagtacagtggcaggatctcagctcactgcaatctccgtctctcaggtttaagcagttctcctgcctcagcctcccaagtaggtgggactacagaaccttcggctcgcgtgcttctgagctgctgtggatggcctcggctctctggactgtccttccgagtaggatgtcactgagatccctcaaatggagcctcctgctgctgtcactcctgagtttctttgtgatgtggtacctcagccttccccactacaatgtgatagaacgcgtgaactggatgtacttctatgagtatgagccgatttacagacaagactttcacttcacacttcgagagcattcaaactgctctcatcaaaatccatttctggtcattctggtgacctcccacccttcagatgtgaaagccaggcaggccattagagttacttggggtgaaaaaaagtcttggtggggatatgaggttcttacatttttcttattaggccaagaggctgaaaaggaagacaaaatgttggcattgtccttagaggatgaacaccttctttatggtgacataatccgacaagattttttagacacatataataacctgaccttgaaaaccattatggcattcaggtgggtaactgagttttgccccaatgccaagtacgtaatgaagacagacactgatgttttcatcaatactggcaatttagtgaagtatcttttaaacctaaaccactcagagaagtttttcacaggttatcctctaattgataattattcctatagaggattttaccaaaaaacccatatttcttaccaggagtatcctttcaaggtgttccctccatactgcagtgggttgggttatataatgtccagagatttggtgccaaggatctatgaaatgatgggtcacgtaaaacccatcaagtttgaagatgtttatgtcgggatctgtttgaatttattaaaagtgaacattcatattccagaagacacaaatcttttctttctatatagaatccatttggatgtctgtcaactgagacgtgtgattgcagcccatggcttttcttccaaggagatcatcactttttggcaggtcatgctaaggaacaccacatgccattattaacttcacattctacaaaaagcctagaaggacaggatactttgtggaaagtgttaaataaagtaggtactgtggaaaattcatggggaggtcagtgtgctggcttacactgaactgaaactcatgaaaaacccagactggagactggagggttacacttgtgatttattagtcaggcccttcaaagatgatatgtggaggaattaaatataaaggaattggaggtttttgctaaagaaattaataggaccaaacaatttggacatgtcattctgtagactagaatttcttaaaagggtgttactgagttataagctcactaggctgtaaaaacaaaacaatgtagagttttatttattgaacaatgtagtcacttgaaggttttgtgtatatcttatgtggattaccaatttaaaaatatatgtagttctgtgtcaaaaaacttcttcactgaagttatactgaacaaaattttacctgtttttggtcatttataaagtacttcaagatgttgcagtatttcacagttattattatttaaaattacttcaactttgtgtttttaaatgttttgacgatttcaatacaagataaaaaggatagtgaatcattctttacatgcaaacattttccagttacttaactgatcagtttattattgatacatcactccattaatgtaaagtcataggtcattattgcatatcagtaatctcttggactttgttaaatattttactgtggtaatatagagaagaattaaagcaagaaaatctgaagtattgtcttgtttttaaaaaatacagttcctagtgtttttagaagtcacttaatttgtctcatttttccacctggaaattaggaataatgtagaatgcaaggcagtaatttccttttggaaaggactctgaaggcagaaaagaagggagagaacctcatgggcagaatattataaaaagagtgtcatattccagcatttgaattggaaagagaagagtgaagatccaagttgcattattaatctgccctgtgttttttccttttaacaatcagtttgagctgctgctgttatgagtttctcatcaagatgaaagccctaatatgtaaagtcaaatccgatttaaattttgtgcttttatagaaagaaatttcttcatagacgtggtgatatatcatttgttggacctgctaatagtaggtcaaaggggagcactccttgccccctgttcctgggtttatgcagttttctttttagagtttatatagggcaagtggttctttttctctgaattacaggatggaaaaaggtcatatcctttgtcaggaaatataaacttgaaagtatgtagtcagctcttgtaatactcatatttatgattgtcctatatgaaaaacaacttcagttaaaactataatgtgtgattctgtataacaaggtgatgtctgtttcccagggctcagacctaatccagttataataaaatcaattaaatgaaatattctatagaatcgatctatgcccttgttaatctccatccatataggagtcacgttctttaagacagatggtggtagttatttttgtggcatggttagatttgactggttttgcagaagattacagttatgtactgcataatgacatatacaatagtggtcccataaaattataatggagcagaaaatctattgcctcatgatgttttagccgttttaatgtcatagcctagtgcattactcacgtgtctgtggagatgctggtgtaaacaaacctactacactgccagttgtataaaagtacagcacattcagttatgtacagtatgtaatactgataatgacaataaatgacaccggtttgtgtatttactttttataaa

SEQ ID NO: 3917 - DNA, 3292 bp, Homo sapiens
ggtgcaatacctgccttgcgtcgcccgtgccgctccagccaccgtcaaatccgggtagcgacccggggcgtttgcagcggtgccgaggaagaggacgggaacggtgttacgattgcctgcgtttaggaggtggctgcgttgtgggaaaagctatcaaggaagaaattgccaaaccatgtctttttttctgttttcagagtagttcacaacagatctgagtgttttaattaagcatggaatacagaaaacaacaaaaaacttaagctttaatttcatctggaattccacagttttcttagctccctggacccggttgacctgttggctcttcccgctggctgctctatcacgtggtgctctccgactactcaccccgagtgtaaagaaccttcggctcgcgtgcttctgagctgctgtggatggcctcggctctctggactgtccttccgagtaggatgtcactgagatccctcaaatggagcctcctgctgctgtcactcctgagtttctttgtgatgtggtacctcagccttccccactacaatgtgatagaacgcgtgaactggatgtacttctatgagtatgagccgatttacagacaagactttcacttcacacttcgagagcattcaaactgctctcatcaaaatccatttctggtcattctggtgacctcccacccttcagatgtgaaagccaggcaggccattagagttacttggggtgaaaaaaagtcttggtggggatatgaggttcttacatttttcttattaggccaagaggctgaaaaggaagacaaaatgttggcattgtccttagaggatgaacaccttctttatggtgacataatccgacaagattttttagacacatataataacctgaccttgaaaaccattatggcattcaggtgggtaactgagttttgccccaatgccaagtacgtaatgaagacagacactgatgttttcatcaatactggcaatttagtgaagtatcttttaaacctaaaccactcagagaagtttttcacaggttatcctctaattgataattattcctatagaggattttaccaaaaaacccatatttcttaccaggagtatcctttcaaggtgttccctccatactgcagtgggttgggttatataatgtccagagatttggtgccaaggatctatgaaatgatgggtcacgtaaaacccatcaagtttgaagatgtttatgtcgggatctgtttgaatttattaaaagtgaacattcatattccagaagacacaaatcttttctttctatatagaatccatttggatgtctgtcaactgagacgtgtgattgcagcccatggcttttcttccaaggagatcatcactttttggcaggtcatgctaaggaacaccacatgccattattaacttcacattctacaaaaagcctagaaggacaggatactttgtggaaagtgttaaataaagtaggtactgtggaaaattcatggggaggtcagtgtgctggcttacactgaactgaaactcatgaaaaacccagactggagactggagggttacacttgtgatttattagtcaggcccttcaaagatgatatgtggaggaattaaatataaaggaattggaggtttttgctaaagaaattaataggaccaaacaatttggacatgtcattctgtagactagaatttcttaaaagggtgttactgagttataagctcactaggctgtaaaaacaaaacaatgtagagttttatttattgaacaatgtagtcacttgaaggttttgtgtatatcttatgtggattaccaatttaaaaatatatgtagttctgtgtcaaaaaacttcttcactgaagttatactgaacaaaattttacctgtttttggtcatttataaagtacttcaagatgttgcagtatttcacagttattattatttaaaattacttcaactttgtgtttttaaatgttttgacgatttcaatacaagataaaaaggatagtgaatcattctttacatgcaaacattttccagttacttaactgatcagtttattattgatacatcactccattaatgtaaagtcataggtcattattgcatatcagtaatctcttggactttgttaaatattttactgtggtaatatagagaagaattaaagcaagaaaatctgaagtattgtcttgtttttaaaaaatacagttcctagtgtttttagaagtcacttaatttgtctcatttttccacctggaaattaggaataatgtagaatgcaaggcagtaatttccttttggaaaggactctgaaggcagaaaagaagggagagaacctcatgggcagaatattataaaaagagtgtcatattccagcatttgaattggaaagagaagagtgaagatccaagttgcattattaatctgccctgtgttttttccttttaacaatcagtttgagctgctgctgttatgagtttctcatcaagatgaaagccctaatatgtaaagtcaaatccgatttaaattttgtgcttttatagaaagaaatttcttcatagacgtggtgatatatcatttgttggacctgctaatagtaggtcaaaggggagcactccttgccccctgttcctgggtttatgcagttttctttttagagtttatatagggcaagtggttctttttctctgaattacaggatggaaaaaggtcatatcctttgtcaggaaatataaacttgaaagtatgtagtcagctcttgtaatactcatatttatgattgtcctatatgaaaaacaacttcagttaaaactataatgtgtgattctgtataacaaggtgatgtctgtttcccagggctcagacctaatccagttataataaaatcaattaaatgaaatattctatagaatcgatctatgcccttgttaatctccatccatataggagtcacgttctttaagacagatggtggtagttatttttgtggcatggttagatttgactggttttgcagaagattacagttatgtactgcataatgacatatacaatagtggtcccataaaattataatggagcagaaaatctattgcctcatgatgttttagccgttttaatgtcatagcctagtgcattactcacgtgtctgtggagatgctggtgtaaacaaacctactacactgccagttgtataaaagtacagcacattcagttatgtacagtatgtaatactgataatgacaataaatgacaccggtttgtgtatttactttttataaa

SEQ ID NO: 3918 - DNA, 3438 bp, Homo sapiens
gcttccggccgcggccctggcgcgtggtctgcgcgcgcccggccgtgcgtgcggatgcggggaggctgcgtgtgtgcgcagggagagaacgccggccaccttcccgcttccgagctgggtgcgcgccgagcacaggagattgcctgcgtttaggaggtggctgcgttgtgggaaaagctatcaaggaagaaattgccaaaccatgtctttttttctgttttcagagtagttcacaacagatctgagtgttttaattaagcatggaatacagaaaacaacaaaaaacttaagctttaatttcatctggaattccacagttttcttagctccctggacccggttgacctgttggctcttcccgctggctgctctatcacgtggtgctctccgactactcaccccgagtgtaaagtcttgctgctctgttgcccaggctggagtacagtggcaggatctcagctcactgcaatctccgtctctcaggtttaagcagttctcctgcctcagcctcccaagtaggtgggactacagaaccttcggctcgcgtgcttctgagctgctgtggatggcctcggctctctggactgtccttccgagtaggatgtcactgagatccctcaaatggagcctcctgctgctgtcactcctgagtttctttgtgatgtggtacctcagccttccccactacaatgtgatagaacgcgtgaactggatgtacttctatgagtatgagccgatttacagacaagactttcacttcacacttcgagagcattcaaactgctctcatcaaaatccatttctggtcattctggtgacctcccacccttcagatgtgaaagccaggcaggccattagagttacttggggtgaaaaaaagtcttggtggggatatgaggttcttacatttttcttattaggccaagaggctgaaaaggaagacaaaatgttggcattgtccttagaggatgaacaccttctttatggtgacataatccgacaagattttttagacacatataataacctgaccttgaaaaccattatggcattcaggtgggtaactgagttttgccccaatgccaagtacgtaatgaagacagacactgatgttttcatcaatactggcaatttagtgaagtatcttttaaacctaaaccactcagagaagtttttcacaggttatcctctaattgataattattcctatagaggattttaccaaaaaacccatatttcttaccaggagtatcctttcaaggtgttccctccatactgcagtgggttgggttatataatgtccagagatttggtgccaaggatctatgaaatgatgggtcacgtaaaacccatcaagtttgaagatgtttatgtcgggatctgtttgaatttattaaaagtgaacattcatattccagaagacacaaatcttttctttctatatagaatccatttggatgtctgtcaactgagacgtgtgattgcagcccatggcttttcttccaaggagatcatcactttttggcaggtcatgctaaggaacaccacatgccattattaacttcacattctacaaaaagcctagaaggacaggatactttgtggaaagtgttaaataaagtaggtactgtggaaaattcatggggaggtcagtgtgctggcttacactgaactgaaactcatgaaaaacccagactggagactggagggttacacttgtgatttattagtcaggcccttcaaagatgatatgtggaggaattaaatataaaggaattggaggtttttgctaaagaaattaataggaccaaacaatttggacatgtcattctgtagactagaatttcttaaaagggtgttactgagttataagctcactaggctgtaaaaacaaaacaatgtagagttttatttattgaacaatgtagtcacttgaaggttttgtgtatatcttatgtggattaccaatttaaaaatatatgtagttctgtgtcaaaaaacttcttcactgaagttatactgaacaaaattttacctgtttttggtcatttataaagtacttcaagatgttgcagtatttcacagttattattatttaaaattacttcaactttgtgtttttaaatgttttgacgatttcaatacaagataaaaaggatagtgaatcattctttacatgcaaacattttccagttacttaactgatcagtttattattgatacatcactccattaatgtaaagtcataggtcattattgcatatcagtaatctcttggactttgttaaatattttactgtggtaatatagagaagaattaaagcaagaaaatctgaagtattgtcttgtttttaaaaaatacagttcctagtgtttttagaagtcacttaatttgtctcatttttccacctggaaattaggaataatgtagaatgcaaggcagtaatttccttttggaaaggactctgaaggcagaaaagaagggagagaacctcatgggcagaatattataaaaagagtgtcatattccagcatttgaattggaaagagaagagtgaagatccaagttgcattattaatctgccctgtgttttttccttttaacaatcagtttgagctgctgctgttatgagtttctcatcaagatgaaagccctaatatgtaaagtcaaatccgatttaaattttgtgcttttatagaaagaaatttcttcatagacgtggtgatatatcatttgttggacctgctaatagtaggtcaaaggggagcactccttgccccctgttcctgggtttatgcagttttctttttagagtttatatagggcaagtggttctttttctctgaattacaggatggaaaaaggtcatatcctttgtcaggaaatataaacttgaaagtatgtagtcagctcttgtaatactcatatttatgattgtcctatatgaaaaacaacttcagttaaaactataatgtgtgattctgtataacaaggtgatgtctgtttcccagggctcagacctaatccagttataataaaatcaattaaatgaaatattctatagaatcgatctatgcccttgttaatctccatccatataggagtcacgttctttaagacagatggtggtagttatttttgtggcatggttagatttgactggttttgcagaagattacagttatgtactgcataatgacatatacaatagtggtcccataaaattataatggagcagaaaatctattgcctcatgatgttttagccgttttaatgtcatagcctagtgcattactcacgtgtctgtggagatgctggtgtaaacaaacctactacactgccagttgtataaaagtacagcacattcagttatgtacagtatgtaatactgataatgacaataaatgacaccggtttgtgtatttactttttataaa

SEQ ID NO: 3919 - DNA, 3224 bp, Homo sapiens
gcttccggccgcggccctggcgcgtggtctgcgcgcgcccggccgtgcgtgcggatgcggggaggctgcgtgtgtgcgcagggagagaacgccggccaccttcccgcttccgagctgggtgcgcgccgagcacaggagattgcctgcgtttaggaggtggctgcgttgtgggaaaagctatcaaggaagaaattgccaaaccatgtctttttttctgttttcagagtagttcacaacagatctgagtgttttaattaagcatggaatacagaaaacaacaaaaaacttaagctttaatttcatctggaattccacagaaccttcggctcgcgtgcttctgagctgctgtggatggcctcggctctctggactgtccttccgagtaggatgtcactgagatccctcaaatggagcctcctgctgctgtcactcctgagtttctttgtgatgtggtacctcagccttccccactacaatgtgatagaacgcgtgaactggatgtacttctatgagtatgagccgatttacagacaagactttcacttcacacttcgagagcattcaaactgctctcatcaaaatccatttctggtcattctggtgacctcccacccttcagatgtgaaagccaggcaggccattagagttacttggggtgaaaaaaagtcttggtggggatatgaggttcttacatttttcttattaggccaagaggctgaaaaggaagacaaaatgttggcattgtccttagaggatgaacaccttctttatggtgacataatccgacaagattttttagacacatataataacctgaccttgaaaaccattatggcattcaggtgggtaactgagttttgccccaatgccaagtacgtaatgaagacagacactgatgttttcatcaatactggcaatttagtgaagtatcttttaaacctaaaccactcagagaagtttttcacaggttatcctctaattgataattattcctatagaggattttaccaaaaaacccatatttcttaccaggagtatcctttcaaggtgttccctccatactgcagtgggttgggttatataatgtccagagatttggtgccaaggatctatgaaatgatgggtcacgtaaaacccatcaagtttgaagatgtttatgtcgggatctgtttgaatttattaaaagtgaacattcatattccagaagacacaaatcttttctttctatatagaatccatttggatgtctgtcaactgagacgtgtgattgcagcccatggcttttcttccaaggagatcatcactttttggcaggtcatgctaaggaacaccacatgccattattaacttcacattctacaaaaagcctagaaggacaggatactttgtggaaagtgttaaataaagtaggtactgtggaaaattcatggggaggtcagtgtgctggcttacactgaactgaaactcatgaaaaacccagactggagactggagggttacacttgtgatttattagtcaggcccttcaaagatgatatgtggaggaattaaatataaaggaattggaggtttttgctaaagaaattaataggaccaaacaatttggacatgtcattctgtagactagaatttcttaaaagggtgttactgagttataagctcactaggctgtaaaaacaaaacaatgtagagttttatttattgaacaatgtagtcacttgaaggttttgtgtatatcttatgtggattaccaatttaaaaatatatgtagttctgtgtcaaaaaacttcttcactgaagttatactgaacaaaattttacctgtttttggtcatttataaagtacttcaagatgttgcagtatttcacagttattattatttaaaattacttcaactttgtgtttttaaatgttttgacgatttcaatacaagataaaaaggatagtgaatcattctttacatgcaaacattttccagttacttaactgatcagtttattattgatacatcactccattaatgtaaagtcataggtcattattgcatatcagtaatctcttggactttgttaaatattttactgtggtaatatagagaagaattaaagcaagaaaatctgaagtattgtcttgtttttaaaaaatacagttcctagtgtttttagaagtcacttaatttgtctcatttttccacctggaaattaggaataatgtagaatgcaaggcagtaatttccttttggaaaggactctgaaggcagaaaagaagggagagaacctcatgggcagaatattataaaaagagtgtcatattccagcatttgaattggaaagagaagagtgaagatccaagttgcattattaatctgccctgtgttttttccttttaacaatcagtttgagctgctgctgttatgagtttctcatcaagatgaaagccctaatatgtaaagtcaaatccgatttaaattttgtgcttttatagaaagaaatttcttcatagacgtggtgatatatcatttgttggacctgctaatagtaggtcaaaggggagcactccttgccccctgttcctgggtttatgcagttttctttttagagtttatatagggcaagtggttctttttctctgaattacaggatggaaaaaggtcatatcctttgtcaggaaatataaacttgaaagtatgtagtcagctcttgtaatactcatatttatgattgtcctatatgaaaaacaacttcagttaaaactataatgtgtgattctgtataacaaggtgatgtctgtttcccagggctcagacctaatccagttataataaaatcaattaaatgaaatattctatagaatcgatctatgcccttgttaatctccatccatataggagtcacgttctttaagacagatggtggtagttatttttgtggcatggttagatttgactggttttgcagaagattacagttatgtactgcataatgacatatacaatagtggtcccataaaattataatggagcagaaaatctattgcctcatgatgttttagccgttttaatgtcatagcctagtgcattactcacgtgtctgtggagatgctggtgtaaacaaacctactacactgccagttgtataaaagtacagcacattcagttatgtacagtatgtaatactgataatgacaataaatgacaccggtttgtgtatttactttttataaa

SEQ ID NO: 3920 - DNA, 2358 bp, Homo sapiens
attcatatcatttttcttctccggccccatggaggaagtgagaaagttggcacagtcacgccgggcttcgcaggaccaggtcactcagtgacagatggacaatgcaagaatgaactccttcctggaataccccatacttagcagtggcgactcggggacctgctcagcccgagcctacccctcggaccataggattacaactttccagtcgtgcgcggtcagcgccaacagttgcggcggcgacgaccgcttcctagtgggcaggggggtgcagatcggttcgccccaccaccaccaccaccaccaccatcaccacccccagccggctacctaccagacttccgggaacctgggggtgtcctactcccactcaagttgtggtccaagctatggctcacagaacttcagtgcgccttacagcccctacgcgttaaatcaggaagcagacccaccaagaagcctgtcgctcccccgcatcggagacatcttctccagcgcagacttttgactggatgaaagtcaaaagaaaccctcccaaaacagggaaagttggagagtacggctacctgggtcaacccaacgcggtgcgcaccaacttcactaccaagcagctcacggaactggagaaggagttccacttcaacaagtacctgacgcgcgcccgcagggtggagatcgctgcatccctgcagctcaacgagacccaagtgaagatctggttccagaaccgccgaatgaagcaaaagaaacgtgagaaggagggtctcttgcccatctctccggccaccccgccaggaaacgacgagaaggccgaggaatcctcagagaagtccagctcttcgccctgcgttccttccccggggtcttctacctcagacactctgactacctcccactgaggcggctccagccccagacaacagcccaggcatctccttgggctgggacttcttacccaaagcacatgcttagcttatctttctttccatttacagtctctttcttcctttctaatcctatctggggagctcctggccaggataatatatttgcagataattctggaccagagacttggtgcggggttaacaccttcatccagattgggtgccagcatacattttctggtgggccttaacatccctcctgcttttaggagaattcacagaacctactgttcctttcagatgaccttttggaaaatagttccctttgccaacagaaacatgccagaaggaatcttctcatcttttatctaactatatgtacagctctcccctcccttgtccttgaaagtaggatatagcgaaaggcgagtccaggagctcaggaagaagagatgcactatatgtttacacaattaattcatcccttaatttaagtcattttcatgtgtgtgagtttgctggttgtaaatactttgtcctaagagatttatctttatacagattttctagaaatgtttaggttactaaaacagggtgggcaaactctctaaactggtacaattttataggtgaaagaaaaaattccctcatttaaacccaatcagatgcctcagagggtagccttgatttgttcttacagttaagaagccctgcagagcacaaacttcagaaacccggcttcctgtgctaagtctttcccaatctctacccctttcttctcgggccaccctctgtttaaaatttgtgctgggttattcagaacctaaaagtattattcaaaccaatttcttccttccacagttatcttagctggatataatgtattttcagctcaattgttaatgtgatggatggcacaatgaatgtatattttgtgttattcgtgaatagtcttttgcatgtcgcacaatgtttgatgtccccaaagtaccacactgagttctatcagttatcctttgtgagcctatgatattccccatttcctgtacaatcatgaacagctctgagatcctggagtgatatgatccagagcagagtttacgggtcttaggatgtctgtaataaataaatatactcaagtttcaggtatgcttaagcatccgtgtatttggctgggctacaatttgttaattcctatgaagttggcacatttcatgaggggaaagggagaagggtggtaaatattttcaaagagatgggccttttcttgaataaaagttaataacagctcctttattataatcaaagctcataatggaaaaaaagactgatgaagaaatttatgaagcagatttatttttgaaacaaacatggatacttcctgggtcaagtgctaaccttttcacctccaactggatgttgacgtatatataaacagaactcccttcaaaagccaaaaaaaaaaaaaaaa

SEQ ID NO: 3921 - DNA, 2561 bp, Homo sapiens; identical to SEQ ID NO: 1713

SEQ ID NO: 3922 - DNA, 3138 bp, Homo sapiens; identical to SEQ ID NO: 1153

SEQ ID NO: 3923 - DNA, 3152 bp, Homo sapiens
ataacgctacctgccgagcaagccgagtggagggaggcaaaggccaggctgaggatcagggtggcccgggtggcagcggggaggcgctgcatgctggaggctgtgctgagtgcccggtgcaggtgagccggtcctgcggagttgtgccgagtgcctgctgcagtctcatttccagttcctccatgacgtggcaagtgaagacaggaatgaaaggaatgtaaagcagcttttctctgaagagaagaagagagagagacacagccaagaccgaggctgggccaagatggtgtctgtgtttcgaagcgaggagatgtgtttgtcacaactgtttctccaggtggaagctgcatattgctgtgtggctgagctcggagagctcggattggttcagttcaaagatttaaatatgaatgtgaacagctttcaaaggaaatttgtgaatgaagtcagaaggtgtgaatcactggagagaatcctccgttttctggaagacgagatgcaaaatgagattgtagttcagttgctcgagaaaagcccactgaccccgctcccacgggaaatgattaccctggagactgttctagaaaaactggaaggagagttacaggaagccaaccagaaccagcaggccttgaaacaaagcttcctagaactgacagaactgaaatacctcctgaagaaaacccaagacttctttgagacggaaaccaatttagctgatgatttctttactgaggacacttctggcctcctggagttgaaagcagtgcctgcatatatgaccggaaagttggggttcatagccggtgtgatcaacagggagaggatggcttcctttgagcggttactgtggcgaatctgccgaggaaacgtgtacttgaagttcagtgagatggacgcccctctggaggatcctgtgacgaaagaagaaattcagaagaacatattcatcatattttaccaaggagagcagctcaggcagaaaatcaagaagatctgtgatgggtttcgagccactgtctacccttgcccagagcctgcggtggagcgcagagagatgttggagagcgtcaatgtgaggctggaagatttaatcaccgtcataacacaaacagagtctcaccgccagcgcctgctgcaggaagccgctgccaactggcactcctggctcatcaaggtgcagaagatgaaagctgtctaccacatcctgaacatgtgcaacatcgacgtcacccagcagtgtgtcatcgccgagatctggttcccggtggcagatgccacacgtatcaagagggcactggagcaaggcatggaactaagtggctcctccatggcccccatcatgaccacagtgcaatctaaaacagcccctcccacatttaacaggaccaataaattcacagctggcttccagaatattgttgatgcctatggtgtcggcagctaccgggagataaacccagccccctacaccatcatcactttccccttcctgttcgctgtgatgtttggagactgtggtcatggaaccgtgatgctcctggctgcactttggatgattctgaatgagagacgcttgctctcccagaagacagacaatgagatttggaacaccttcttccacgggcgctatctgatcctacttatgggcatcttctccatctacacgggtttgatctacaatgactgcttctccaagtccttgaacatctttggctcttcttggagtgtccaacccatgttcagaaacggcacatggaatactcatgtaatggaggaaagtctatatctgcagctggacccagccataccaggagtgtattttggaaatccatacccgtttgggattgatccgatttggaacttggcttcaaacaaactcacatttctgaactcgtataaaatgaagatgtcggtgatcctgggaattgtccagatggttttcggtgtcatcctcagccttttcaatcacatatacttcagaagaactctcaacatcattctgcaatttatccctgagatgatttttatcctgtgtctgtttggatacctggttttcatgatcattttcaaatggtgctgctttgacgtccatgtatctcagcacgcccccagcatcctcatccacttcatcaacatgtttctgtttaactacagtgactcttccaacgcacccctctacaaacatcagcaagaagtccaaagtttctttgtggttatggctttgatttctgtgccgtggatgcttctgattaagccgtttattcttagagccagtcatcggaaatcccagctgcaggcatccaggatccaagaagatgccactgagaacattgaaggtgatagctccagcccttctagccgttctggccagaggacttctgcagatacccacggggctctggacgaccatggagaagagttcaactttggagacgtctttgtccaccaagccatccacaccatcgagtactgcctgggctgcatttcaaacacagcctcctacctgcggctctgggccctcagcctggctcatgcacaactgtctgaagtgctctggactatggtgatgaacagcggccttcagacgcgaggctggggaggaatcgtcggggtttttattatttttgccgtatttgctgtcctgacagtagccatccttctgatcatggagggcctctctgctttcctgcacgccctgcgactgcactgggttgagttccagaacaagttctatgtcggggatggttacaagttttctccattctcctttaaacacatcctggatggcacagccgaggagtaggctgagggctgcacctcccacggtggtcaccatgccaatgaaggaagttcagtcttgtctttgatatcagcccctgcaaggcgctcaatgggaaggttgttcttggctcacctgaagcatgaaactgtgtattatttggacgtcagcctgtggatttgatacgacttaaccacgtcagaggaaggactttggcaagtgatattgtcttcatgtggggtattaattctcaaataataaagtaattgacaaatgaggggagaatgctaaacagatgtcttcttgcaatattttaaatattgtatttgagaaaataaacatctgagtcattcaaaaaaaaaaaaaaaaa

SEQ ID NO: 3924 - DNA, 3049 bp, Homo sapiens; identical to SEQ ID NO: 1778

SEQ ID NO: 3925 - DNA, 3107 bp, Homo sapiens
aacagagctgcctcctggctctttgggagcctgggaggagaaggagccgggaggggcgctgcggggaagccacctgcggattcactggctgctgctccgcccaggactgctagcaagcacggagggctgccagacctggggctccctgctccgtgcgtcaggttggggaaaccaccgtctgccccagaccctgacccaggacccgcctggaggaagctgggaccgaggctgggccaagatggtgtctgtgtttcgaagcgaggagatgtgtttgtcacaactgtttctccaggtggaagctgcatattgctgtgtggctgagctcggagagctcggattggttcagttcaaagatttaaatatgaatgtgaacagctttcaaaggaaatttgtgaatgaagtcagaaggtgtgaatcactggagagaatcctccgttttctggaagacgagatgcaaaatgagattgtagttcagttgctcgagaaaagcccactgaccccgctcccacgggaaatgattaccctggagactgttctagaaaaactggaaggagagttacaggaagccaaccagaaccagcaggccttgaaacaaagcttcctagaactgacagaactgaaatacctcctgaagaaaacccaagacttctttgagacggaaaccaatttagctgatgatttctttactgaggacacttctggcctcctggagttgaaagcagtgcctgcatatatgaccggaaagttggggttcatagccggtgtgatcaacagggagaggatggcttcctttgagcggttactgtggcgaatctgccgaggaaacgtgtacttgaagttcagtgagatggacgcccctctggaggatcctgtgacgaaagaagaaattcagaagaacatattcatcatattttaccaaggagagcagctcaggcagaaaatcaagaagatctgtgatgggtttcgagccactgtctacccttgcccagagcctgcggtggagcgcagagagatgttggagagcgtcaatgtgaggctggaagatttaatcaccgtcataacacaaacagagtctcaccgccagcgcctgctgcaggaagccgctgccaactggcactcctggctcatcaaggtgcagaagatgaaagctgtctaccacatcctgaacatgtgcaacatcgacgtcacccagcagtgtgtcatcgccgagatctggttcccggtggcagatgccacacgtatcaagagggcactggagcaaggcatggaactaagtggctcctccatggcccccatcatgaccacagtgcaatctaaaacagcccctcccacatttaacaggaccaataaattcacagctggcttccagaatattgttgatgcctatggtgtcggcagctaccgggagataaacccagccccctacaccatcatcactttccccttcctgttcgctgtgatgtttggagactgtggtcatggaaccgtgatgctcctggctgcactttggatgattctgaatgagagacgcttgctctcccagaagacagacaatgagatttggaacaccttcttccacgggcgctatctgatcctacttatgggcatcttctccatctacacgggtttgatctacaatgactgcttctccaagtccttgaacatctttggctcttcttggagtgtccaacccatgttcagaaacggcacatggaatactcatgtaatggaggaaagtctatatctgcagctggacccagccataccaggagtgtattttggaaatccatacccgtttgggattgatccgatttggaacttggcttcaaacaaactcacatttctgaactcgtataaaatgaagatgtcggtgatcctgggaattgtccagatggttttcggtgtcatcctcagccttttcaatcacatatacttcagaagaactctcaacatcattctgcaatttatccctgagatgatttttatcctgtgtctgtttggatacctggttttcatgatcattttcaaatggtgctgctttgacgtccatgtatctcagcacgcccccagcatcctcatccacttcatcaacatgtttctgtttaactacagtgactcttccaacgcacccctctacaaacatcagcaagaagtccaaagtttctttgtggttatggctttgatttctgtgccgtggatgcttctgattaagccgtttattcttagagccagtcatcggaaatcccagctgcaggcatccaggatccaagaagatgccactgagaacattgaaggtgatagctccagcccttctagccgttctggccagaggacttctgcagatacccacggggctctggacgaccatggagaagagttcaactttggagacgtctttgtccaccaagccatccacaccatcgagtactgcctgggctgcatttcaaacacagcctcctacctgcggctctgggccctcagcctggctcatgcacaactgtctgaagtgctctggactatggtgatgaacagcggccttcagacgcgaggctggggaggaatcgtcggggtttttattatttttgccgtatttgctgtcctgacagtagccatccttctgatcatggagggcctctctgctttcctgcacgccctgcgactgcactgggttgagttccagaacaagttctatgtcggggatggttacaagttttctccattctcctttaaacacatcctggatggcacagccgaggagtaggctgagggctgcacctcccacggtggtcaccatgccaatgaaggaagttcagtcttgtctttgatatcagcccctgcaaggcgctcaatgggaaggttgttcttggctcacctgaagcatgaaactgtgtattatttggacgtcagcctgtggatttgatacgacttaaccacgtcagaggaaggactttggcaagtgatattgtcttcatgtggggtattaattctcaaataataaagtaattgacaaatgaggggagaatgctaaacagatgtcttcttgcaatattttaaatattgtatttgagaaaataaacatctgagtcattcaaaaaaaaaaaaaaaaa

SEQ ID NO: 3926 - DNA, 3097 bp, Homo sapiens
tagaagcggcaggagcagcgttggcaccggcgaaccatggctgggattttctatttcgccctattttcgtgtctcttcgggatttgcgacgctgtcacaggttccagggtataccccgcgaatgaagttaccttattggattccagatctgttcagggagaacttgggtggatagcaagccctctggaaggagggtgggaggaagtgagtatcatggatgaaaaaaatacaccaatccgaacctaccaagtgtgcaatgtgatggaacccagccagaataactggctacgaactgattggatcacccgagaaggggctcagagggtgtatattgagattaaattcaccttgagggactgcaatagtcttccgggcgtcatggggacttgcaaggagacgtttaacctgtactactatgaatcagacaacgacaaagagcgtttcatcagagagaaccagtttgtcaaaattgacaccattgctgctgatgagagcttcacccaagtggacattggtgacagaatcatgaagctgaacaccgagatccgggatgtagggccattaagcaaaaaggggttttacctggcttttcaggatgtgggggcctgcatcgccctggtatcagtccgtgtgttctataaaaagtgtccactcacagtccgcaatctggcccagtttcctgacaccatcacaggggctgatacgtcttccctggtggaagttcgaggctcctgtgtcaacaactcagaagagaaagatgtgccaaaaatgtactgtggggcagatggtgaatggctggtacccattggcaactgcctatgcaacgctgggcatgaggagcggagcggagaatgccaagcttgcaaaattggatattacaaggctctctccacggatgccacctgtgccaagtgcccaccccacagctactctgtctgggaaggagccacctcgtgcacctgtgaccgaggctttttcagagctgacaacgatgctgcctctatgccctgcacccgtccaccatctgctcccctgaacttgatttcaaatgtcaacgagacatctgtgaacttggaatggagtagccctcagaatacaggtggccgccaggacatttcctataatgtggtatgcaagaaatgtggagctggtgaccccagcaagtgccgaccctgtggaagtggggtccactacaccccacagcagaatggcttgaagaccaccaaagtctccatcactgacctcctagctcataccaattacacctttgaaatctgggctgtgaatggagtgtccaaatataaccctaacccagaccaatcagtttctgtcactgtgaccaccaaccaagcagcaccatcatccattgctttggtccaggctaaagaagtcacaagatacagtgtggcactggcttggctggaaccagatcggcccaatggggtaatcctggaatatgaagtcaagtattatgagaaggatcagaatgagcgaagctatcgtatagttcggacagctgccaggaacacagatatcaaaggcctgaaccctctcacttcctatgttttccacgtgcgagccaggacagcagctggctatggagacttcagtgagcccttggaggttacaaccaacacagtgccttcccggatcattggagatggggctaactccacagtccttctggtctctgtctcgggcagtgtggtgctggtggtaattctcattgcagcttttgtcatcagccggagacggagtaaatacagtaaagccaaacaagaagcggatgaagagaaacatttgaatcaaggtgtaagaacatatgtggacccctttacgtacgaagatcccaaccaagcagtgcgagagtttgccaaagaaattgacgcatcctgcattaagattgaaaaagttataggagttggtgaatttggtgaggtatgcagtgggcgtctcaaagtgcctggcaagagagagatctgtgtggctatcaagactctgaaagctggttatacagacaaacagaggagagacttcctgagtgaggccagcatcatgggacagtttgaccatccgaacatcattcacttggaaggcgtggtcactaaatgtaaaccagtaatgatcataacagagtacatggagaatggctccttggatgcattcctcaggaaaaatgatggcagatttacagtcattcagctggtgggcatgcttcgtggcattgggtctgggatgaagtatttatctgatatgagctatgtgcatcgtgatctggccgcacggaacatcctggtgaacagcaacttggtctgcaaagtgtctgattttggcatgtcccgagtgcttgaggatgatccggaagcagcttacaccaccaggggtggcaagattcctatccggtggactgcgccagaagcaattgcctatcgtaaattcacatcagcaagtgatgtatggagctatggaatcgttatgtgggaagtgatgtcgtacggggagaggccctattgggatatgtccaatcaagatgtgattaaagccattgaggaaggctatcggttaccccctccaatggactgccccattgcgctccaccagctgatgctagactgctggcagaaggagaggagcgacaggcctaaatttgggcagattgtcaacatgttggacaaactcatccgcaaccccaacagcttgaagaggacagggacggagagctccagacctaacactgccttgttggatccaagctcccctgaattctctgctgtggtatcagtgggcgattggctccaggccattaaaatggaccggtataaggataacttcacagctgctggttataccacactagaggctgtggtgcacgtgaaccaggaggacctggcaagaattggtatcacagccatcacgcaccagaataagattttgagcagtgtccaggcaatgcgaacccaaatgcagcagatgcacggcagaatggttcccgtctgagccagtactgaataaactcaaaactcttgaaattagtttacctcatccatgcactttaattgaagaactgcactttttttacttcgtcttcgccctctga

SEQ ID NO: 3927 - DNA, 3701 bp, Homo sapiens
tcttaccgggttgtcttcttcctgaagagcaatggagccgcttttacttggaagaggactaatcgtatatctaatgttcctcctgttaaaattctcaaaagcaattgaaataccatcttcagttcaacaggttccaacaatcataaaacagtcaaaagtccaagttgcctttcccttcgatgagtattttcaaattgaatgtgaagctaaaggaaatccagaaccaacattttcgtggactaaggatggcaaccctttttatttcactgaccatcggataattccatcgaacaattcaggaacattcaggatcccaaacgaggggcacatatctcactttcaagggaaataccgctgctttgcttcaaataaactgggaatcgctatgtcagaagaaatagaatttatagttccaagtgttccaaaattcccaaaagaaaaaattgaccctcttgaagtggaggagggagatccaattgtcctcccatgcaatcctcccaaaggcctcccacctttacacatttattggatgaatattgaattagaacacatcgaacaagatgaaagagtatacatgagccaaaagggagatctatacttcgcaaacgtggaagaaaaggacagtcgcaatgactactgttgctttgctgcatttccaagattaaggactattgtacagaaaatgccaatgaaactaacagttaacagttcaaattccatcaagcaaagaaaacccaaactgctgttgcctcccactgagagtggcagtgagtcttcaattaccatcctcaaaggggaaatcttgctgcttgagtgttttgctgaaggcttgccaactccacaggttgattggaacaaaattggtggtgacttaccaaaggggagagaagcaaaagaaaattatggcaagactttgaagatagagaatgtctcctaccaggacaaaggaaattatcgctgcacagccagcaatttcttgggaacagccactcacgattttcacgttatagtagaagagcctcctcgctggacaaagaagcctcagagtgctgtgtatagcaccggaagcaatggcatcttgttatgtgaggctgaaggagaacctcaacccacaatcaagtggagagtcaatggctccccagttgacaatcatccatttgctggtgatgttgtcttccccagggaaatcagttttaccaaccttcaaccaaatcatactgctgtgtaccagtgtgaagcctcaaatgtccatggaactatccttgccaatgccaatattgatgttgtggatgtccgtccattgatacaaaccaaagatggagaaaattacgctacagtggttgggtacagtgctttcttacattgcgagttctttgcttcacctgaggcagtcgtgtcctggcagaaggtggaagaagtgaaacccctggagggcaggcggtatcatatctatgaaaatggcacattgcagatcaacagaaccaccgaagaagatgctgggtcttactcatgttgggtagaaaatgctataggaaaaactgcagtcacagccaatttggatattagaaatgctacaaaacttagagtttctcctaagaatcctcgtatccccaaattgcatatgcttgaattacattgtgaaagcaaatgtgactcacatttgaaacacagtttgaagttgtcctggagtaaagatggagaagcctttgaaattaatggcacagaagatggcaggataattattgatggagctaatttgaccatatctaatgtaactttagaggaccaaggtatttactgctgttcagctcatactgctctagacagtgctgccgatataactcaagtaactgttcttgatgttccggatccaccagaaaaccttcacttgtctgaaagacagaacaggagtgttcggctgacctgggaagctggagctgaccacaacagcaatattagcgagtatattgttgaatttgaaggaaacaaagaagagcctggaaggtgggaggaactgaccagagtccaaggaaagaaaaccacagttatcttacctttggctccatttgtgagataccagttcagggtcatagccgtgaacgaagtagggagaagtcagcctagccagccgtcagaccatcatgaaacaccaccagcagctccagataggaatccacaaaacataagggttcaagcctctcaacccaaggaaatgattataaagtgggagcctttgaaatccatggagcagaatggaccaggcctagagtacagagtgacctggaagccacagggagccccagtggagtgggaagaagaaacagtcacaaaccacacattgcgggtgatgacgcctgctgtctatgccccttatgatgtcaaggtccaggctatcaatcaactaggatctgggcctgaccctcagtcagtgactctctattctggagaagactatcctgatacagctccagtgatccatggggtggacgttataaacagtacattagttaaagttacctggtcaacagttccaaaggacagagtacatggacgtctgaaaggctatcagataaattggtggaaaacaaaaagtctgttggatggaagaacacatcccaaagaagtgaacattctaagattttcaggacaaagaaactctggaatggttccttccttagatgcctttagtgaatttcatttaacagtcttagcctataactctaaaggagctggtcctgaaagtgagccttatatatttcaaacaccagaaggagtacctgaacagccaacttttctaaaggtcatcaaagttgataaagacactgccactttatcttggggactacctaagaaattaaatggaaacttaactggctatcttttgcaatatcagataataaatgacacctacgagattggagaattaaatgatattaacattacaactccatcaaagcccagctggcacctctcaaacctgaatgcaactaccaagtacaaattctacttgagggcttgcacttcacagggctgtggaaaaccgatcacggaggaaagctccaccttaggagaagggagtaaaggtatcgggaagatatcaggagtaaatcttactcaaaagactcacccagtagaggtatttgagccgggagctgaacatatagttcgcctaatgactaagaattggggcgataacgatagcatttttcaagatgtaattgagacaagagggagagaatatgctggtttatatgatgacatctccactcaaggctggtttattggactgatgtgtgcgattgctcttctcacactactattattaactgtttgctttgtgaagaggaatagaggtggaaagtactcagttaaagaaaaggaagatttgcatccagacccagaaattcagtcagtaaaagatgaaacctttggtgaatacagtgacagtgatgaaaagcctctcaaaggaagccttcggtcccttaatagggatatgcagcctactgaaagtgctgacagcttagtcgaatacggagagggagaccatggtctcttcagtgaagatggatcatttattggtgcctacgctggatctaaggagaagggatctgttgaaagcaatggaagttctacagcaacttttccccttcgggcataaacacaacatatgtaagcaacgctactggttcaccccaaccttc

SEQ ID NO: 3928 - DNA, 1230 bp, Homo sapiens
tgcttccagtcccaggagcacaaacatcacatggtgtgtgggatacaagaggctgctgagaattacaggaagttattccaggaaatattgaacacatcgagggagaaacttgaagcagctaaaagcatattgactgatgagcaagaaagaatggcgatgattcaggaagaggaacaaaattttaaaaagatgattgagtctgagtatagtatgagactccggttgttgaatgaagagtgtgagcagaatctccagagacagcaggaatgcatatctgacttgaacctgagagaaacccttctgaatcaagcgatcaagcttgccaccgagctagaggagatgttccaggaaatgctacagagactgggccgtgtggggagagagaacatggagaaactgaaggagagtgaagccagggcttctgaacaggtccgcagcctcctaaagctcatcgtggagcttgagaaaaagtgtggggaaggcaccttggcattgctcaagaatgcaaaatactctttagaaaggagcaagtcactgctgcttgagcatctggagcccgctcatatcacagacctgagtttatgccacataagaggactcagcagcatgttcagagtactccagagacatttaacattggatcctgaaacagctcatccctgcctggcactatctgaggacctgagaactatgagattgagacatgggcagcaggatggggctggcaacccagaaagattggatttcagtgccatggtgctggctgcggagagcttcacctcagggaggcactactgggaggtggacgtggaaaaggcaaccaggtggcaagtgggcatataccacggctctgcagacgcgaagggcagcacggccagagcttccggagagaaagtcttgctcacggggtcggtgatggggaccgagtggactctctgggtcttcccccctctgaaaaggctcttcctggaaaagaagttggacacagttggggttttccttgactgcgaacacgggcagatatcattctacaatgtgactgagatgtccctcatttacaatttctcccattgcgccttccaaggagctctcaggcctgtgttttccctctgtatcccaaatggagacacaagtccagactccctcaccatcttacaacatggtccttcttgtgatgctactgttagcccttaatcttctgtgtgtaaaatccaagaccacgagacacca

SEQ ID NO: 3929 - DNA, 1230 bp, Homo sapiens; identical to SEQ ID NO: 3928

SEQ ID NO: 3930 - DNA, 4955 bp, Homo sapiens
tccactccctcctcttggcatgagactgtatacaggatccacccgaggacaatgattgcggagcccgctcacttttacctgtttggattaatatgtctctgttcaggctcccgtcttcgtcaggaagattttccacctcgcattgttgaacacccttcagacctgattgtctcaaaaggagaacctgcaactttgaactgcaaagctgaaggccgccccacacccactattgaatggtacaaagggggagagagagtggagacagacaaagatgaccctcgctcacaccgaatgttgctgccgagtggatctttatttttcttacgtatagtacatggacggaaaagtagacctgatgaaggagtctatgtctgtgtagcaaggaattaccttggagaggctgtgagccacaatgcatcgctggaagtagccatacttcgggatgacttcagacaaaacccttcggatgtcatggttgcagtaggagagcctgcagtaatggaatgccaacctccacgaggccatcctgagcccaccatttcatggaagaaagatggctctccactggatgataaagatgaaagaataactatacgaggaggaaagctcatgatcacttacacccgtaaaagtgacgctggcaaatatgtttgtgttggtaccaatatggttggggaacgtgagagtgaagtagccgagctgactgtcttagagagaccatcatttgtgaagagacccagtaacttggcagtaactgtggatgacagtgcagaatttaaatgtgaggcccgaggtgaccctgtacctacagtacgatggaggaaagatgatggagagctgcccaaatccagatatgaaatccgagatgatcataccttgaaaattaggaaggtgacagctggtgacatgggttcatacacttgtgttgcagaaaatatggtgggcaaagctgaagcatctgctactctgactgttcaagttgggtctgaacctccacattttgttgtgaaaccccgtgaccaggttgttgctttgggacggactgtaacttttcagtgtgaagcaaccggaaatcctcaaccagctattttctggaggagagaagggagtcagaatctacttttctcatatcaaccaccacagtcatccagccgattttcagtctcccagactggcgacctcacaattactaatgtccagcgatctgatgttggttattacatctgccagactttaaatgttgctggaagcatcatcacaaaggcatatttggaagttacagatgtgattgcagatcggcctcccccagttattcgacaaggtcctgtgaatcagactgtagccgtggatggcactttcgtcctcagctgtgtggccacaggcagtccagtgcccaccattctgtggagaaaggatggagtcctcgtttcaacccaagactctcgaatcaaacagttggagaatggagtactgcagatccgatatgctaagctgggtgatactggtcggtacacctgcattgcatcaacccccagtggtgaagcaacatggagtgcttacattgaagttcaagaatttggagttccagttcagcctccaagacctactgacccaaatttaatccctagtgccccatcaaaacctgaagtgacagatgtcagcagaaatacagtcacattatcatggcaaccaaatttgaattcaggagcaactccaacatcttatattatagaagccttcagccatgcatctggtagcagctggcagaccgtagcagagaatgtgaaaacagaaacatctgccattaaaggactcaaacctaatgcaatttaccttttccttgtgagggcagctaatgcatatggaattagtgatccaagccaaatatcagatccagtgaaaacacaagatgtcctaccaacaagtcagggggtggaccacaagcaggtccagagagagctgggaaatgctgttctgcacctccacaaccccaccgtcctttcttcctcttccatcgaagtgcactggacagtagatcaacagtctcagtatatacaaggatataaaattctctatcggccatctggagccaaccacggagaatcagactggttagtttttgaagtgaggacgccagccaaaaacagtgtggtaatccctgatctcagaaagggagtcaactatgaaattaaggctcgccctttttttaatgaatttcaaggagcagatagtgaaatcaagtttgccaaaaccctggaagaagcacccagtgccccaccccaaggtgtaactgtatccaagaatgatggaaacggaactgcaattctagttagttggcagccacctccagaagacactcaaaatggaatggtccaagagtataaggtttggtgtctgggcaatgaaactcgataccacatcaacaaaacagtggatggttccaccttttccgtggtcattccctttcttgttcctggaatccgatacagtgtggaagtggcagccagcactggggctgggtctggggtaaagagtgagcctcagttcatccagctggatgcccatggaaaccctgtgtcacctgaggaccaagtcagcctcgctcagcagatttcagatgtggtgaagcagccggccttcatagcaggtattggagcagcctgttggatcatcctcatggtcttcagcatctggctttatcgacaccgcaagaagagaaacggacttactagtacatacgcgggtatcagaaaagtaacttaccagagaggaggcgaagctgtcagcagtggagggaggcctggacttctcaacatcagtgaacctgccgcgcagccatggctggcagacacgtggcctaatactggcaacaaccacaatgactgctccatcagctgctgcacggcaggcaatggaaacagcgacagcaacctcactacctacagtcgcccagctgattgtatagcaaattataacaaccaactggataacaaacaaacaaatctgatgctccctgagtcaactgtttatggtgatgtggaccttagtaacaaaatcaatgagatgaaaaccttcaatagcccaaatctgaaggatgggcgttttgtcaatccatcagggcagcctactccttacgccaccactcagctcatccagtcaaacctcagcaacaacatgaacaatggcagcggggactctggcgagaagcactggaaaccactgggacagcagaaacaagaagtggcaccagttcagtacaacatcgtggagcaaaacaagctgaacaaagattatcgagcaaatgacacagttcctccaactatcccatacaaccaatcatacgaccagaacacaggaggatcctacaacagctcagaccggggcagtagtacatctgggagtcaggggcacaagaaagggggggcaagaacacccaaggtaccaaaacagggtggcatgaactgggcagacctgcttcctcctcccccagcacatcctcctccacacagcaatagcgaagagtacaacatttctgtagatgaaagctatgaccaagaaatgccatgtcccgtgccaccagcaaggatgtatttgcaacaagatgaattagaagaggaggaagatgaacgaggccccactccccctgttcggggagcagcttcttctccagctgccgtgtcctatagccatcagtccactgccactctgactccctccccacaggaagaactccagcccatgttacaggattgtccagaggagactggccacatgcagcaccagcccgacaggagacggcagcctgtgagtcctcctccaccaccacggccgatctcccctccacatacctatggctacatttcaggacccctggtctcagatatggatacggatgcgccagaagaggaagaagacgaagccgacatggaggtagccaagatgcaaaccagaaggcttttgttacgtgggcttgagcagacacctgcctccagtgttggggacctggagagctctgtcacggggtccatgatcaacggctggggctcagcctcagaggaggacaacatttccagcggacgctccagtgttagttcttcggacggctcctttttcactgatgctgactttgcccaggcagtcgcagcagcggcagagtatgctggtctgaaagtagcacgacggcaaatgcaggatgctgctggccgtcgacattttcatgcgtctcagtgccctaggcccacaagtcccgtgtctacagacagcaacatgagtgccgccgtaatgcagaaaaccagaccagccaagaaactgaaacaccagccaggacatctgcgcagagaaacctacacagatgatcttccaccacctcctgtgccgccacctgctataaagtcacctactgcccaatccaagacacagctggaagtacgacctgtagtggtgccaaaactcccttctatggatgcaagaacagacagatcatcagacagaaaaggaagcagttacaaggggagagaagtgttggatggaagacaggttgttgacatgcgaacaaatccaggtgatcccagagaagcacaggaacagcaaaatgacgggaaaggacgtggaaacaaggcagcaaaacgagaccttccaccagcaaagactcatctcatccaagaggatattctaccttattgtagacctacttttccaacatcaaataatcccagagatcccagttcctcaagctcaatgtcatcaagaggatcaggaagcagacaaagagaacaagcaaatgtaggtcgaagaaatattgcagaaatgcaggtacttggaggatatgaaagaggagaagataataatgaagaattagaggaaactgaaagctgaagacaaccaagaggcttatgagatctaatgtgaaaatcatcactcaagatgcctcctgtcagatgacacatgacgccaga

SEQ ID NO: 3931 - DNA, 3556 bp, Homo sapiens; identical to SEQ ID NO: 1974

SEQ ID NO: 3932 - DNA, 1678 bp, Homo sapiens; identical to SEQ ID NO: 645

SEQ ID NO: 3933 - DNA, 778 bp, Homo sapiens; identical to SEQ ID NO: 446

SEQ ID NO: 3934 - DNA, 951 bp, Homo sapiens; identical to SEQ ID NO: 1517

SEQ ID NO: 3935 - DNA, 1560 bp, Homo sapiens; identical to SEQ ID NO: 622

SEQ ID NO: 3936 - DNA, 3390 bp, Homo sapiens; identical to SEQ ID NO: 420

SEQ ID NO: 3937 - DNA, 2646 bp, Homo sapiens; identical to SEQ ID NO: 674

SEQ ID NO: 3938 - DNA, 4665 bp, Homo sapiens; identical to SEQ ID NO: 2331

SEQ ID NO: 3939 - DNA, 6930 bp, Homo sapiens; identical to SEQ ID NO: 1519

SEQ ID NO: 3940 - DNA, 5218 bp, Homo sapiens; identical to SEQ ID NO: 2467

SEQ ID NO: 3941 - DNA, 4010 bp, Homo sapiens
attggttgcggcggatgcctcgcgggccggtggctatggaggcggcggcggttgatggttgaccgttggctccggggtgggggtcgccgttcgagtgatctgctcagacccgaccagagggcgcgggctgctgatgcttggcttggagcccgtgggggagacctagttcggctccgccatgccggccgccgggagtaacgagccggacggcgtcctcagctatcagagaccagatgaagaagctgtggtggatcagggtgggaccagtacaattctcaacattcactatgaaaaagaagagctggaaggtcacagaactctgtatgtgggagttcggatgccgcttggccggcagagccatcggcatcaccgcactcatggccagaagcaccggagacgagggcggggcaaaggagccagccagggggaggaaggcctggaagccctggcccacgacacaccatctcagcgtgttcagttcattcttggcaccgaggaagatgaagagcatgtgcctcatgagctgtttacagagctggatgagatctgtatgaaagagggagaagatgctgagtggaaggaaacagccaggtggctgaagtttgaagaagatgttgaagatgggggagaacgctggagcaagccttatgtggcaaccctttcattgcacagcctgtttgagctaaggagctgccttattaatggaacagtcctcctggatatgcatgcaaatagcatagaagaaatttcagacctgatcctggatcagcaagaactgtccagtgacctgaatgacagcatgagggttaaagtgcgggaagcccttctcaaaaagcatcatcatcagaatgaaaagaagagaaacaacctcattcccattgttcgctcctttgctgaggttggcaagaagcagtctgatcctcatttgatggataaacatggtcaaaccgtgtctcctcagtctgttccaactacaaatcttgaagtaaaaaatggagtgaattgtgaacatagtcctgtggatttaagcaaggtagaccttcatttcatgaaaaaaattcctactggggccgaggcctccaatgtcctggttggagaggtggatattttggaccgtcccattgttgcctttgtgaggctgtctccagctgttcttctctcaggcctaacagaagtgccaatcccaacaagatttttgtttatcttattgggtccagtagggaaaggtcagcagtaccatgagattggcagatccatggccaccatcatgacagatgagatttttcatgacgtagcatataaggcaaaagagcgagatgatctcctggcggggattgatgagttcctagaccaggtgacggtgctccctccaggagagtgggatccctccattagaattgagccacccaaaaatgtcccttcccaggagaaaaggaaaatgcctggagttccaaatggaaatgtttgccacatagaacaggaaccacatgggggtcacagtgggccagaacttcagcgcactgggcggctatttgggggcttggtgctggacatcaagcggaaggccccctggtactggagcgactaccgagatgcactcagcttacagtgtttggcttcctttctgttcctgtactgtgcctgcatgtcacctgtcatcacctttgggggactgcttggagaagccactgagggacgcataagtgcaattgaatccttgtttggagcttccatgactgggattgcttattccttgtttgcgggacaggctctcaccatcctgggaagtactggaccagtgcttgtgtttgaaaagattttgttcaaattctgcaaagactatgctctttcatacctctccctgcgagcttgtattggactgtggaccgctttcctgtgtattgtccttgtggcaactgatgccagttcccttgtctgctacattacccgtttcactgaagaagcatttgcctccctaatttgcattattttcatctatgaagcaatagaaaaactgattcacctggcagagacctaccccatccacatgcacagccagctggaccaccttagcctctattactgcaggtgtactctgccagagaatccaaacaatcacaccctccagtactggaaggaccacaacatcgtgacagcagaagtccactgggctaacctgactgtcagtgaatgccaggagatgcatggagagttcatgggatctgcgtgcggccatcatggaccctacactcctgatgtcctcttttggtcctgtattctctttttcaccaccttcatcctctcaagcaccttaaagacgtttaagacgagccgttatttcccaaccagagtacgctccatggtgagtgactttgctgttttcctcactatcttcacaatggtgattattgattttttgattggagtcccatcaccaaagcttcaagttcccagtgtgttcaagccaacaagggatgatcgcggatggattattaatcccattggccccaatccctggtggactgtgatagctgcaattatcccagctcttctctgtactatcttgatattcatggatcagcagatcacagccgtcattattaacaggaaggaacataagctcaagaaaggctgtggctaccacctggacctactgatggtggccatcatgctgggtgtctgctccatcatgggcctgccctggtttgtagctgcaactgtcttgtccatcacacatgtgaacagcctcaagctagaatctgaatgctctgctcctggagaacagcccaagttcctgggcatccgagaacagagagtgacaggccttatgatctttgtgctgatgggctgctcagtcttcatgacggctatcttaaagtttattccaatgccagtactctacggagttttcctttacatgggagtttcttcactacagggaattcagttctttgatcgtctaaagctctttgggatgcccgcaaagcaccagccagatttcatctacctgcggcatgtgccgctgcgcaaagtgcacctcttcaccctcatccagttgacctgtctcgtcctgctctgggtcatcaaggcatctccagctgccattgttttcccaatgatggttttggccttggtctttgtcaggaaagtcatggatctctgtttctctaagcgagagctgagctggctagatgatctcatgcctgaaagcaaaaagaagaagttggatgatgccaaaaagaaggccaaggaggaagaggtcatagtccttgcaccaactgtatacctgggggcctcaaattacagaacataggaagggtcatgtgaaaagtcagcatgtctggaatcccgagggttatatttaggagctgggaagattacccccaaagatgttctcagctaagaatggattagggattcttgcttctgtctgttcttaatttttgggtttgacaaccacttattttttcctttgtttacaatctactcaccaggctcatacctacaatgtgaacatacagtatgcccttattagcagattcaatggctcacattctttcaaaaggtctaatttgacaaatacataagacccattatttcctagaatgtttgtaatatatctaattgcaaatggtgctgtggttggcaccatgcaaagataacttgcataggactttctgtcttttttcatttccctcagcacttggcatcttgtcatctacacaatggaccctcaataaatggcctatatgtgcaaagaaagaatgtgtagcaaatgaaaataccagaccaagaaatgagtgagctgggaagtgtttccaaatacagttagtgcctaaaatagtgtcctttgaaaaaacttttaaaagacttttttttaggccaggcataatgggttatccctgtaattccagggcttttgggagttgaagctggaggattacttgaggccagaagtttgagactagcctaggcaatataatgagaccctgtctctacaaaaaaaaaaa

SEQ ID NO: 3942 - DNA, 1641 bp, Homo sapiens; identical to SEQ ID NO: 677

SEQ ID NO: 3943 - DNA, 8169 bp, Homo sapiens; identical to SEQ ID NO: 210

SEQ ID NO: 3944 - DNA, 1560 bp, Homo sapiens
ctccctgtgttggtggaggatgtctgcagcagcatttaaattctgggagggcttggttgtcagcagcagcaggaggaggcagagcacagcatcgtcgggaccagactcgtctcaggccagttgcagccttctcagccaaacgccgaccaaggaaaactcactaccatgagaattgcagtgatttgcttttgcctcctaggcatcacctgtgccataccagttaaacaggctgattctggaagttctgaggaaaagcagaatgctgtgtcctctgaagaaaccaatgactttaaacaagagacccttccaagtaagtccaacgaaagccatgaccacatggatgatatggatgatgaagatgatgatgaccatgtggacagccaggactccattgactcgaacgactctgatgatgtagatgacactgatgattctcaccagtctgatgagtctcaccattctgatgaatctgatgaactggtcactgattttcccacggacctgccagcaaccgaagttttcactccagttgtccccacagtagacacatatgatggccgaggtgatagtgtggtttatggactgaggtcaaaatctaagaagtttcgcagacctgacatccagtaccctgatgctacagacgaggacatcacctcacacatggaaagcgaggagttgaatggtgcatacaaggccatccccgttgcccaggacctgaacgcgccttctgattgggacagccgtgggaaggacagttatgaaacgagtcagctggatgaccagagtgctgaaacccacagccacaagcagtccagattatataagcggaaagccaatgatgagagcaatgagcattccgatgtgattgatagtcaggaactttccaaagtcagccgtgaattccacagccatgaatttcacagccatgaagatatgctggttgtagaccccaaaagtaaggaagaagataaacacctgaaatttcgtatttctcatgaattagatagtgcatcttctgaggtcaattaaaaggagaaaaaatacaatttctcactttgcatttagtcaaaagaaaaaatgctttatagcaaaatgaaagagaacatgaaatgcttctttctcagtttattggttgaatgtgtatctatttgagtctggaaataactaatgtgtttgataattagtttagtttgtggcttcatggaaactccctgtaaactaaaagcttcagggttatgtctatgttcattctatagaagaaatgcaaactatcactgtattttaatatttgttattctctcatgaatagaaatttatgtagaagcaaacaaaatacttttacccacttaaaaagagaatataacattttatgtcactataatcttttgttttttaagttagtgtatattttgttgtgattatctttttgtggtgtgaataaatcttttatcttgaatgtaataagaatttggtggtgtcaattgcttatttgttttcccacggttgtccagcaattaataaaacataaccttttttactgcctaaaaaaaaaaaaaaaaa

SEQ ID NO: 3945 - DNA, 134 bp, Homo sapiens; identical to SEQ ID NO: 469

SEQ ID NO: 3946 - DNA, 1805 bp, Homo sapiens; identical to SEQ ID NO: 583

SEQ ID NO: 3947 - DNA, 1363 bp, Homo sapiens
gacgggtcatgagcgcggtattactgctggccctcctggggttcatcctcccactgccaggagtgcaggcgctgctctgccagtttgggacagttcagcatgtgtggaaggtgtccgacctgccccggcaatggacccctaagaacaccagctgcgacagcggcttggggtgccaggacacgttgatgctcattgagagcggaccccaagtgagcctggtgctctccaagggctgcacggaggccaaggaccaggagccccgcgtcactgagcaccggatgggccccggcctctccctgatctcctacaccttcgtgtgccgccaggaggacttctgcaacaacctcgttaactccctcccgctttgggccccacagcccccagcagacccaggatccttgaggtgcccagtctgcttgtctatggaaggctgtctggaggggacaacagaagagatctgccccaaggggaccacacactgttatgatggcctcctcaggctcaggggaggaggcatcttctccaatctgagagtccagggatgcatgccccagccaggttgcaacctgctcaatgggacacaggaaattgggcccgtgggtatgactgagaactgcaataggaaagattttctgacctgtcatcgggggaccaccattatgacacacggaaacttggctcaagaacccactgattggaccacatcgaataccgagatgtgcgaggtggggcaggtgtgtcaggagatgctgctgctcatagatgtaggactcacatcaaccctggtggggacaaaaggctgcagcactgttggggctcaaaattcccagaagaccaccatccactcagcccctcctggggtgcttgtggcctcctatacccacttctgctcctcggacctgtgcaatagtgccagcagcagcagcgttctgctgaactccctccctcctcaagctgcccctgtcccaggagaccggcagtgtcctacctgtgtgcagccccttggaacctgttcaagtggctccccccgaatgacctgccccaggggcgccactcattgttatgatgggtacattcatctctcaggaggtgggctgtccaccaaaatgagcattcagggctgcgtggcccaaccttccagcttcttgttgaaccacaccagacaaatcgggatcttctctgcgcgtgagaagcgtgatgtgcagcctcctgcctctcagcatgagggaggtggggctgagggcctggagtctctcacttgaggggtggggctggcactggccccagcgctgtggtggggagtggtttgcccttcctgctaactctattacccccacgattcttcaccgctgctgaccaccca

SEQ ID NO: 3948 - DNA, 5027 bp, Homo sapiens
gaagttatcagtcgacgtgtgtggcttcatacatttggggaccctatttccactccctcctcttggcatgagactgtatacaggatccacccgaggacaatgattgcggagcccgctcacttttacctgtttggattaatatgtctctgttcaggctcccgtcttcgtcaggaagattttccacctcgcattgttgaacacccttcagacctgattgtctcaaaaggagaacctgcaactttgaactgcaaagctgaaggccgccccacacccactattgaatggtacaaagggggagagagagtggagacagacaaagatgaccctcgctcacaccgaatgttgctgccgagtggatctttatttttcttacgtatagtacatggacggaaaagtagacctgatgaaggagtctatgtctgtgtagcaaggaattaccttggagaggctgtgagccacaatgcatcgctggaagtagccatacttcgggatgacttcagacaaaacccttcggatgtcatggttgcagtaggagagcctgcagtaatggaatgccaacctccacgaggccatcctgagcccaccatttcatggaagaaagacggctctccactggatgataaagatgaaagaataactatacgaggaggaaagctcatgatcacttacacccgtaaaagtgacgctggcaaatatgtttgtgttggtaccaatatggttggggaacgtgagagtgaagtagccgagctgactgtcttagagagaccatcatttgtgaagagaccgagtaacttggcagtaactgtggatgacagtgcagaatttaaatgtgaggcccgaggtgaccctgtacctacagtacgatggaggaaagatgatggagagctgcccaaatccagatatgaaatccgagatgatcataccttgaaaattaggaaggtgacagctggtgacatgggttcatacacttgtgttgcagaaaatatggtgggcaaagctgaagcatctgctactctgactgttcaagttgggtctgaacctccacattttgttgtgaaaccccgtgaccaggttgttgctttgggacggactgtaacttttcagtgtgaagcaaccggaaatcctcaaccagctattttctggaggagagaagggagtcagaatctacttttctcatatcaaccaccacagtcatccagccgattttcagtctcccagactggcgacctcacaattactaatgtccaacgatctgatgttggttattacatctgccagactttaaatgttgctggaagcatcatcacaaaggcatatttggaagttacagatgtgattgcagatcggcctcccccagttattcgacaaggtcctgtgaatcagactgtagccgtggatggcactttcgtcctcagctgtgtggccacaggcagtccagtgcccaccattctgtggagaaaggatggagtcctcgtttcaacccaagactctcgaatcaaacagttggagaatggagtactgcagatccgatatgctaagctgggtgatactggtcggtacacctgcattgcatcaacccccagtggtgaagcaacatggagtgcttacattgaagttcaagaatttggagttccagttcagcctccaagacctactgacccaaatttaatccctagtgccccatcaaaacctgaagtgacagatgtcagcagaaatacagtcacattatcgtggcaaccaaatttgaattcaggagcaactccaacatcttatattatagaagccttcagccatgcatctggtagcagctggcagaccgtagcagagaatgtgaaaacagaaacatctgccattaaaggactcaaacctaatgcaatttaccttttccttgtgagggcagctaatgcatatggaattagtgatccaagccaaatatcagatccagtgaaaacacaagatgtcctaccaacaagtcagggggtggaccacaagcaggtccagagagagctgggaaatgctgttctgcacctccacaaccccaccgtcctttctccctcttccatcgaagtgcactggacagtagatcaacagtctcagtatatacaaggatataaaattctctatcggccatctggagccaaccacggagaatcagactggttagtttttgaagtgaggacgccagccaaaaacagtgtggtaatccctgatctcagaaagggagtcaactatgaaattaaggctcgccctttttttaatgaatttcaaggagcagatagtgaaatcaagtttgccaaaaccctggaagaagcacccagtgccccaccccaaggtgtaactgtatccaagaatgatgggaacggaactgcaattctagttagttggcagccacctccagaagacactcaaaatggaatggtccaagagtataaggtttggtgtctgggcaatgaaactcgataccacatcaacaaaacagtggatggttccaccttttccgtggtcattccctttcttgttcctggaatccgatacagtgtggaagtggcagccagcactggggctgggtctggggtaaagagtgagcctcagttcatccagctggatgcccatggaaaccctgtgtcacctgaggaccaagtcagcctcgctcagcagatttcagatgtggtgaagcagccggccttcatagcaggtattggagcggcctgttggatcatcctcatggtcttcagcatctggctttatcgacaccgcaagaagagaaacggacttactagtacctacgcgggtatcagaaaagtaacttaccagagaggaggcgaagctgtcagcagtggagggaggcctggacttctcaacatcagtgaacctgccgcgcagccatggctggcagacacgtggcctaatactggcaacaaccacaatgactgctccatcagctgctgcacggcaggcaatggaaacagcgacagcaacctcactacctacagtcgcccagctgattgtatagcaaattataacaaccaactggataacaaacaaacaaatctgatgctccctgagtcaactgtttatggtgatgtggaccttagtaacaaaatcaatgagatgaaaaccttcaatagcccaaatctgaaggatgggcgttttgtcaatccatcagggcagcctactccttacgccaccactcagctcatccagtcaaacctcagcaacaacatgaacaatggcagcggggactctggcgagaagcactggaaaccactgggacagcagaaacaagaagtggcaccagttcagtacaacatcgtggagcaaaacaagctgaacaaagattatcgagcaaatgacacagttcctccaactatcccatacaaccaatcatacgaccagaacacaggaggatcctacaacagctcagaccggggcagtagtacatctgggagtcaggggcacaagaaaggggcaagaacacccaaggtaccaaaacagggtggcatgaactgggcagacccgcttcctcctcccccagcacatcctcctccacacagcaatagcgaagagtacaacatttctgtagatgaaagctatgaccaagaaatgccatgtcccgtgccaccagcaaggatgtatttgcaacaagatgaattagaagaggaggaagatgaacgaggccccactccccctgttcggggagcagcttcttctccagctgccgtgtcctatagccatcagtccactgccactctgactccctccccacaggaagaactccagcccatgttacaggattgtccagaggagactggccacatgcagcaccagcccgacaggagacggcagcctgtgagtcctcctccaccaccacggccgatctcccctccacatacctatggctacatttcaggacccctggtctcagatatggatacggatgcgccagaagaggaagaagacgaagccgacatggaggtagccaagatgcaaaccagaaggcttttgttacgtgggcttgagcagacacctgcctccagtgttggggacctggagagctctgtcacggggtccatgatcaacggctggggctcagcctcagaggaggacaacatttccagcggacgctccagtgttagttcttcggacggctcctttttcactgatgctgactttgcccaggcagtcgcagcagcggcagagtatgctggtctgaaagtagcacgacggcaaatgcaggatgccgctggccgtcgacattttcatgcgtctcagtgccctaggcccacaagtcccgtgtctacagacagcaacatgagtgccgccgtaatgcagaaaaccagaccagccaagaagctgaaacaccagccagggcatctgcgcagagaaacctacacagatgatcttccaccacctcctgtgccgccacctgctataaagtcacctactgcccaatccaagacacagctggaagtacgacctgtagtggtgccaaaactcccttctatggatgcaagaacagacagatcatcagacagaaaaggaagcagttacaaggggagagaagtgttggatggaagacaggttgttgacatgcgaacaaatccaggtgatcccagagaagcacaggaacagcaaaatgacgggaaaggacgtggaaacaaggcagcaaaacgagaccttccaccagcaaagactcatctcatccaagaggatattctaccttattgtagacctacttttccaacatcaaataatcccagagatcccagttcctcaagctcaatgtcatcaagaggatcaggaagcagacaaagagaacaagcaaatgtaggtcgaagaaatattgcagaaatgcaggtacttggaggatatgaaagaggagaagataataatgaagaattagaggaaactgaaagctgaagacaaccaagaggcttatgagatctaatgtgaaaatcatcactcaagatgcctcctgtcagatgacacattacgccagataaaatgttcaaagctttctagaccat

SEQ ID NO: 3949 - DNA, 4862 bp, Homo sapiens
gaagttatcagtcgacgtgtgtggcttcatacatttggggaccctatttccactccctcctcttggcatgagactgtatacaggatccacccgaggacaatgattgcggagcccgctcacttttacctgtttggattaatatgtctctgttcaggctcccgtcttcgtcaggaagattttccacctcgcattgttgaacacccttcagacctgattgtctcaaaaggagaacctgcaactttgaactgcaaagctgaaggccgccccacacccactattgaatggtacaaagggggagagagagtggagacagacaaagatgaccctcgctcacaccgaatgttgctgccgagtggatctttatttttcttacgtatagtacatggacggaaaagtagacctgatgaaggagtctatgtctgtgtagcaaggaattaccttggagaggctgtgagccacaatgcatcgctggaagtagccatacttcgggatgacttcagacaaaacccttcggatgtcatggttgtagtaggagagcctgcagtaatggaatgccaacctccacgaggccatcctgagcccaccatttcatggaagaaagatggctctccactggatgataaagatgaaagaataactatacgaggaggaaagctcatgatcacttacacccgtaaaagtgacgctggcaaatatgtttgtgttggtaccaatatggttggggaacgtgagagtgaagtagccgagctgactgtcttagagagaccatcatttgtgaagagacccagtaacttggcagtaactgtggatgacagtgcagaatttaaatgtgaggcccgaggtgaccctgtacctacagtacgatggaggaaagatgatggagagctgcccaaatccagatatgaaatccgagatgatcataccttgaaaattaggaaggtgacagctggtgacatgggttcatacacttgtgttgcagaaaatatggtgggcaaagctgaagcatctgctactctgactgttcaagttgggtctgaacctccacattttgttgtgaaaccccgtgaccaggttgttgctttgggacggactgtaacttttcagtgtgaagcaaccggaaatcctcaaccagctattttctggaggagagaagggagtcagaatctacttttctcatatcaaccaccacagtcatccagccgattttcagtctcccagactggcgacctcacaattactaatgtccagcgatctgatgttggttattacatctgccagactttaaatgttgctggaagcatcatcacaaaggcatatttggaagttacagatgtgattgcagatcggcctcccccagttattcgacaaggtcctgtgaatcagactgtagccgtggatggcactttcgtcctcagctgtgtggccacaggcagtccagtgcccaccattctgtggagaaaggatggagtcctcgtttcaacccaagactctcgaatcaaacagttggagaatggagtactgcagatccgatatgctaagctgggtgatactggtcggtacacctgcattgcatcaacccccagtggtgaagcaacatggagtgcttacattgaagttcaagaatttggagttccagttcagcctccaagacctactgacccaaatttaatccctagtgccccatcaaaacctgaagtgacagatgtcagcagaaatacagtcacattatcgtggcaaccaaatttgaattcaggagcaactccaacatcttatattatagaagccttcagccatgcatctggtagcagctggcagaccgtagcagagaatgtgaaaacagaaacatctgccattaaaggactcaaacctaatgcaatttaccttttccttgtgagggcagctaatgcatatggaattagtgatccaagccaaatatcagatccagtgaaaacacaagatgtcctaccaacaagtcagggggtggaccacaagcaggtccagagagagctgggaaatgctgttctgcacctccacaaccccaccgtcctttcttcctcttccatcgaagtgcactggacagtagatcaacagtctcagtatatacaaggatataaaattctctatcggccatctggagccaaccacggagaatcagactggttagtttttgaagtgaggacgccagccaaaaacagtgtggtaatccctgatctcagaaagggagtcaactatgaaattaaggctcgccctttttttaatgaatttcaaggagcagatagtgaaatcaagtttgccaaaaccctggaagaagcacccagtgccccaccccaaggtgtaactgtatccaagaatgatggaaacggaactgcaattctagttagttggcagccacctccagaagacactcaaaatggaatggtccaagagtataaggtttggtgtctgggcaatgaaactcgataccacatcaacaaaacagtggatggttccaccctttccgtggtcattccctttcttgttcctggaatccgatacagtgtggaagtggcagccagcactggggctgggtctggggtaaagagtgagcctcagttcatccagctggatgcccatggaaaccctgtgtcacctgaggaccaagtcagcctcgctcagcagatttcagatgtggtgaagcagccggccttcatagcaggtattggagcagcctgttggatcatcctcatggtcttcagcatctggctttatcgacaccgcaagaagagaaacggacttactagtacctacgcgggtatcagaaaagtaacttaccagagaggaggcgaagctgtcagcagtggagggaggcctggacttctcaacatcagtgaacctgccgcgcagccatggctggcagacacgtggcctaatactggcaacaaccacaatgactgctccatcagctgctgcacggcaggcaatggaaacagcgacagcaacctcactacctacagtcgcccagggcagcctactccttacgccaccactcagctcatccagtcaaacctcagcaacaacatgaacaatggcagcggggactctggcgagaagcactggaaaccactgggacagcagaaacaagaagtggcaccagttcagtacaacatcgtggagcaaaacaagctgaacaaagattatcgagcaaatgacacagttcctccaactatcccatacaaccaatcatacgaccagaacacaggaggatcctacaacagctcagaccggggcagtagtacatctgggagtcaggggcacaagaaaggggcaagaacacccaaggtaccaaaacagggtggcatgaactgggcagacctgcttcctcctcccccagcacatcctcctccacacagcaatagcgaagagtacaacatttctgtagatgaaagctatgaccaagaaatgccatgtcccgtgccaccagcaaggatgtatttgcaacaagatgaattagaagaggaggaagatgaacgaggccccactccccctgttcggggagcagcctcttctccagctgccgtgtcctatagccatcagtccactgccactctgactccctccccacaggaagaactccagcccatgttacaggattgtccagaggagactggccacatgcagcaccagcccgacaggagacggcagcctgtgagtcctcctccaccaccacggccgatctcccctccacatacctatggctacatttcaggacccctggtctcagatatggatacggatgcgccagaagaggaagaagacgaagccgacatggaggtagccaagatgcaaaccagaaggcttttgttacgtgggcttgagcagacacctgcctccagtgttggggacctggagagctctgtcacggggtccatgatcaacggctggggctcagcctcagaggaggacaacatttccagcggacgctccagtgttagttcttcggacggctcctttttcactgatgctgactttgcccaggcagtcgcagcagcggcagagtatgctggtctgaaagtagcacgacggcaaatgcaggatgctgctggccgtcgacattttcatgcgtctcagtgccctaggcccacaagtcccgtgtctacagacagcaacatgagtgccgccgtaatgcagaaaaccagaccagccaagaaactgaaacaccagccaggacatctgcgcagagaaacctacacagatgatcttccaccacctcctgtgccgccacctgctataaagtcacctactgcccaatccaagacacagctggaagtacgacctgtagtggtgccaaaactcccttctatggatgcaagaacagacagatcatcagacagaaaaggaagcagttacaaggggagagaagtgttggatggaagacaggttgttgacatgcgaacaaatccaggtgatcccagagaagcacaggaacagcaaaatgacgggaaaggacgtggaaacaaggcagcaaaacgagaccttccaccagcaaagactcatctcatccaagaggatattctaccttattgtagacctacttttccaacatcaaataatcccagagatcccagttcctcaagctcaatgtcatcaagaggatcaggaagcagacaaagagaacaagcaaatgtaggtcgaagaaatattgcagaaatgcaggtacttggaggatatgaaagaggagaagataataatgaagaattagaggaaactgaaagctgaagacaaccaagaggcttatgagatctaatgtgaaaatcatcactcaagatgcctcctgtcagatgacacatgacgccagataaaatgttcaaagctttctagaccat

SEQ ID NO: 3950 - DNA, 2607 bp, Homo sapiens
agaggactcccagcggctggagcagaagtgttagcggccagagctcccagacccctacccacagccaggcgggacgcgcacagtccctccacgcggaaagaagtaccttcgccggtcaccggctcctgcagggtgcaaatatatacagagcttcataatcagcccaagaccacatagagcaaacatgaatgatatttcccaaaaggctgagattctgctttcttcatctaaacctgtcccaaaaacctatgtaccaaaacttggcaagggtgatgtaaaggataagtttgaagccatgcagagagccagggaagaaagaaatcaaaggagatctagagacgaaaaacaaagaagaaaagaacaatatattagagagagagaatggaacaggagaaagcaggagattaaagaaatgcttgcttctgatgatgaggaagatgtatcttctaaagtagaaaaggcttatgttccaaaattaacaggaactgtgaagggtagatttgctgaaatggagaaacaaagacaagaggaacaaaggaagagaacggaggaggaacgaaaacgcagaattgagcaggatatgttagaaaagaggaaaatacagcgtgaattagcaaaaagggctgaacagattgaggacataaacaatacgggaactgaatcagcatcagaggaaggagatgattcactacttataactgtggtacctgtcaaatcatataaaacatctggaaaaatgaaaaagaattttgaggatctagaaaaagaacgtgaagagaaagaaaggatcaagtacgaggaagataaaagaataagatatgaagaacaacgaccatctctcaaggaagcaaagtgtctttcattagttatggatgatgaaatagaaagtgaagcaaaaaaagaatcactttctcccggaaaattgaaactaacttttgaagaactggagcgacaaagacaagaaaaccgaaagaagcaagctgaagaggaagcaagaaaacgtttagaagaagagaagcgtgcttttgaagaagcaaggcggcaaatggtaaatgaagatgaggaaaaccaagacacagcaaaaatttttaaagggtaccgccctggtaaactcaaactcagttttgaagaaatggaaaggcaaagaagagaagatgaaaaaaggaaagcagaagaagaagccagaaggagaatagaggaagaaaagaaggcgtttgctgaagcaaggagaaatatggtagtagatgatgactccccagagatgtataagacaatctctcaagaatttcttacaccgggaaaactggaaattaattttgaagaattattaaaacaaaaaatggaagaagaaaaacgacgaacagaggaggaacggaagcataagctagaaatggagaaacaagaatttgaacaactgagacaggaaatgggagaggaagaggaagaaaatgaaacctttggattgagcagagaatatgaagaactgatcaaattaaaaaggagtggctctattcaagctaaaaacctaaaaagcaagtttgaaaaaattggacagttgtctgaaaaagaaatacagaaaaaaatagaagaagagcgagcaagaaggagagcaattgaccttgaaattaaagagcgagaagctgaaaattttcatgaggaagatgatgttgatgttaggcctgcaagaaaaagcgaggctccatttactcacaaagtgaatatgaaagctagatttgaacaaatggctaaggcaagagaagaagaagaacaaagaagaattgaagaacaaaagttactacgcatgcagtttgaacaaagggaaattgatgcagcactacaaaagaaaagagaagaggaggaggaggaagaaggtagcatcatgaatggctccactgctgaagatgaagagcaaaccagatcaggagctccatggttcaagaagcctcttaaaaacacatcagttgtagacagtgagccagtcagatttacggttaaagtaacaggagaacccaaaccagaaattacatggtggtttgaaggagaaatactgcaggatggagaagactatcaatatattgaaaggggagaaacttactgcctttacttaccagaaactttcccagaagatggaggagagtatatgtgtaaagcagtcaacaataaaggatctgcagctagtacctgtattcttaccattgaaagtaagaattaatcactctttttatcttttattctattaatttttttttccttaaaatcacttttcttcttctcttttttagctgatgactactagctcccctcccctctccctggaactttctctttcactccaactttcttactacatccatcttttctgtggcggggccaaaaaaggaaaccaggagtgccactatgctgacttcttattccttttcataacagtcttcaaagcacagctcatctaaagaatgcctacttcttttccaaataagcatcagatttatcgcctattatgcagtaacagtcaataaaatgtacttatgggggggaattactcaattattctatcagaacctattataaagactgtatttcccatagacgtttacagcaactatgttt

SEQ ID NO: 3951 - DNA, 2989 bp, Homo sapiens; identical to SEQ ID NO: 595

SEQ ID NO: 3952 - DNA, 2980 bp, Homo sapiens
ggggggagcgcgccgggcgcagggagctgagtggacggctcgagacggcggcgcgtgcagcagctccagaaagcagcgagttggcagagcagggctgcatttccagcaggagctgcgagcacagtgctggctcacaacaagatgctcaaggtgtcagccgtactgtgtgtgtgtgcagccgcttggtgcagtcagtctctcgcagctgccgcggcggtggctgcagccggggggcggtcggacggcggtaattttctggatgataaacaatggctcaccacaatctctcagtatgacaaggaagtcggacagtggaacaaattccgagacgatgattatttccgcacttggagtccaggaaaacccttcgatcaggctttagatccagctaaggatccatgcttaaagatgaaatgtagtcgccataaagtatgcattgctcaagattctcagactgcagtctgcattagtcaccggaggcttacacacaggatgaaagaagcaggagtagaccataggcagtggaggggtcccatattatccacctgcaagcagtgcccagtggtctatcccagccctgtttgtggttcagatggtcatacctactcttttcagtgcaaactagaatatcaggcatgtgtcttaggaaaacagatctcagtcaaatgtgaaggacattgcccatgtccttcagataagcccaccagtacaagcagaaatgttaagagagcatgcagtgacctggagttcagggaagtggcaaacagattgcgggactggttcaaggcccttcatgaaagtggaagtcaaaacaagaagacaaaaacattgctgaggcctgagagaagcagattcgataccagcatcttgccaatttgcaaggactcacttggctggatgtttaacagacttgatacaaactatgacctgctattggaccagtcagagctcagaagcatttaccttgataagaatgaacagtgtaccaaggcattcttcaattcttgtgacacatacaaggacagtttaatatctaataatgagtggtgctactgcttccagagacagcaagacccaccttgccagactgagctcagcaatattcagaagcggcaaggggtaaagaagctcctaggacagtatatccccctgtgtgatgaagatggttactacaagccaacacaatgtcatggcagtgttggacagtgctggtgtgttgacagatatggaaatgaagtcatgggatccagaataaatggtgttgcagattgtgctatagattttgagatctccggagattttgctagtggcgattttcatgaatggactgatgatgaggatgatgaagacgatattatgaatgatgaagatgaaattgaagatgatgatgaagatgaaggggatgatgatgatggtggtgatgaccatgatgtatacatttgattgatgacagttgaaatcaataaattctacatttctaatatttacaaaaatgatagcctatttaaaattatcttcttccccaataacaaaatgattctaaacctcacatatattttgtataattatttgaaaaattgcagctaaagttatagaactttatgtttaaataagaatcatttgctttgagtttttatattccttacacaaaaagaaaatacatatgcagtctagtcagacaaaataaagttttgaagtgctactataataagtttttcacgagaacaaactttgtaaatcttccataagcaaaatgacagctagtgcttgggatcgtacatgttaattttctgaaagataattctaagtgaaatttaaaataaataaatttttaatgacctgggtcttaaggatttaggaaaaatatgcatgctttaattgcatttccaaagtagcatcttgctagacctagttgagtcaggataacagagagataccacatggcaagaaaaacaaagtgacaattgtagagtcctcaattgtgtttacattaatagtggtgtttttacctatgaaattattctggatctaataggacattttacaaaatggcaagtatggaaaaccatggattctgaaagttaaaaatttagttgttctccccaatgtgtattttaatttggatggcagtctcatgcagattttttaaaagattctttaataacatgatttgtttgcctttctagatttctttatctttctgaccagcaacttagggagcagaatttaaattaggaagacaaagggaaagattcatttaaaccatatttttacaaagtttgtcatttgccccaaggtcaaattttaaattcttaattttcattttatttcccattttaggtaaaagtttgcatttaatcttagaattatgttatttttgttagtagtgtggaaacttagagaacttattgtatggtgccttgcaaaaatagagatagaaagattttagcatgcataccaatatagtatattacgcaatatataagcacacctaattaacagattaatatcagtaaaggtattgctgctggaatgaagaaaatgggatacgtttgtttctttttttctattgttacataattgccatgtggacttgtttatgattattgtgtagagtagcatttaagatttaactgtagcaaaaattactttaaccgctgtatttaagttagcatgttaattaattgtgtagacattttggcacaccatcacttttaactatatcataccaatggttttgtgcccataataaaaatggaaaaacctgttgaatgttacgtattggtatctttaatttcaacagtgggtaaactggtttcccagtatacaattcattgaaagcaaaattgattaattatttccatttaatttatacacactcaatacaaaatttaatgttgactttacgtaataaagtataatgcattttcttttttactgtttatgtatagtttacaaaataaagaatcttgtaaccaaa

SEQ ID NO: 3953 - DNA, 11579 bp, Homo sapiens
gcggccgccaggtgctcctggagtgcagcgcctatcgccggggcgtgtgggggccacaccgagcaccagcttctccgacgccgggaagccgctgtcgccgccgctacctctccctgttgccgccgcctcagatctcttcatgccgctgtaagctcggaggccaaggatgcggagtaggcttcccccagcgcttgccgccctgggcgcggccctgctcctgtcttccattgaggcagaagttgacccaccttcagacttgaattttaaaattatagatgaaaatactgttcatatgtcatgggcaaaaccagttgatccaattgtgggttacagaataacggtggaccctacaacggatgggcctactaaagaatttaccctttcagctagtaccactgaaactttattgtcagaacttgtacctgaaacagagtatgtggtgacaataacttcatatgatgaagtagaagaaagtgtaccagttataggacaactaacaattcaaacaggtagttcgacaaagccagtggagaagaaacctggaaaaaccgagatacaaaaatgctctgtcagtgcctggactgatttggttttcctcgtggatggctcttggagtgtgggaagaaataatttcaagtacattttagacttcattgctgctcttgtgtctgcttttgacattggggaagagaagacaagagttggagttgttcaatacagctctgataccaggactgaatttaacttaaatcagtactaccaaagggatgaacttcttgctgcaataaaaaaaattccatataaaggtggcaacacaatgacaggggatgccattgattatttagttaaaaatactttcacggaatctgctggggcaagagttggctttcctaaagtggcaattattattacggatggaaaatcccaggatgaagtggaaattccagcaagagagcttcgtaatgttggagttgaagttttctccttgggcattaaagctgcagatgcaaaagaactcaaacaaattgcctccacaccttcactgaaccatgttttcaatgtggccaactttgatgcaattgtggatattcagaatgagatcatctcccaggtgtgctcaggtgttgatgaacaacttggtgaattggttagtggagaagaagttgttgagcctccttcaaatttgattgccatggaagtctcttcaaaatatgttaagctaaattggaatccatctcctagtccagtgactggctacaaagtcatcctcacaccaatgactgcaggaagccgacagcacgctctgagtgtggggcctcagacaaccacgctcagtgttcgcgacctctcagcagacacagaataccagatcagtgtttccgccatgaagggaatgacatccagtgaacccatttcaataatggagaagactcagccaatgaaagttcaagtggaatgctcacgtggtgtggatataaaagccgatattgtgtttttggttgatggctcctatagcattgggattgcaaactttgttaaagttagagcctttttggaagttcttgtaaaaagttttgaaatttcaccaaatagggtccagattagtcttgtgcaatacagccgggatcctcatactgagttcactttgaaaaaattcaccaaagttgaagatataattgaagcaataaacaccttcccttacagaggaggatctacaaatactggcaaagcaatgacttatgtcagagagaaaatatttgtgcctagcaagggatcaagaagcaatgtgccaaaggtcatgattcttatcacggatgggaaatcatcagatgctttcagagatcctgcgataaaactgaggaattcagatgttgaaatctttgcagttggtgtgaaggatgccgttcgctcagaattggaagctattgcctctcctcctgcagagacccatgtgttcacagtggaagattttgatgcttttcagaggatatcttttgaactcacacagtctatctgccttagaattgagcaagaattggcagctataaagaagaaagcttacgtccctccaaaggatcttagtttttcagaagtgacttcttatggtttcaaaaccaactggtctccagctggagaaaatgttttttcatatcacatcacctacaaggaagcggctggggatgatgaggtcactgtggtggagccagcatcgagcaccagtgttgttctcagcagcctgaagccagagaccttgtatttggtcaatgtgactgcggagtatgaggatggcttcagcattcccttagctggagaggagaccaccgaagaagtaaaaggagcacctcgaaacctaaaggtgacagatgagactacagatagtttcaaaattacttggactcaagctccagggagagttttaagatatcgaattatatatagaccagttgctggtggagagagcagagaagttaccaccccacccaatcagaggaggagaacactggagaacttgattccagacacgaaatatgaagtatctgtaattcctgaatatttctcaggacctggtactccattaactggaaatgcagccactgaagaagttagagggaatccaagagacttaagagtttctgaccctacgacgtctactatgaaattatcttggagtggggcaccaggaaaagtgaaacagtatctcgtcacatataccccagtggcagggggtgaaactcaagaggtcactgtgaggggagatacaaccaatacggtgctgcagggattgaaggaagggacacaatacgccttatctgtgacagccttgtatgcgtctggggctggagacgccctctttggtgaaggaacaacacttgaagaacgtggttctcctcaagatttagttactaaagacatcactgacacatcaattggggcttattggacatctgctccaggaatggttcgcggttacagggtctcatggaaatcactttatgatgatgttgacactggagagaaaaatctgcctgaagatgcaattcatacgatgatagaaaatctgcagccagagaccaaatacagaatttcagtatttgccacttacagcagtggagaaggagaacctttgactggagatgccacaactgaattatctcaagattccaaaaccctgaaagtagatgaagaaacagaaaacacaatgagagttacatggaaaccagcaccagggaaagtcgtcaactaccgtgttgtctatcgccctcatgggagagggaagcaaatggttgctaaggtgccccccacagtcacttcgacagtgttaaagcgacttcagccacagaccacatatgacatcacagttcttcctatttacaagatgggagaaggaaagcttaggcaaggatcaggaacaacagcttctcggtttaagtctcctagaaacctcaaaacatctgacccaaccatgtcaagcttccgagtgacttgggagcctgcccctggggaagtgaagggttataaagtcacattccaccctacgggggatgacagaagactgggggagttagtggttggaccctatgacaacacagttgttttggaggaacttagggctggtaccacctataaagtaaatgtttttggaatgtttgatggaggagaaagctcaccacttgttggacaagaaatgacaaccctttccgacacaactgttatgccaattttatcttctgggatggagtgtctcaccagagctgaggcagacattgtgttgctggtggatggatcatggagcatcggccgggcaaattttagaaccgtgaggagtttcatttctcgtattgtggaagtctttgacattggccccaaaagagtacaaattgctcttgctcagtatagtggggatcccagaacagagtggcagttaaatgcacacagagacaagaagagcttgttgcaagctgtggcaaacttgccgtacaaaggaggcaatactctcacaggcatggctttgaatttcattcgccaacagaacttcaggacccaagctggcatgagacctcgagctcgaaaaattggtgtgctcattactgatggaaaatcacaagacgatgttgaagcaccttcaaagaaactcaaggatgagggagtggagctgtttgctattggtattaaaaatgctgatgaagtcgaattaaagatgattgcaactgatcctgatgatacccatgcatacaatgtggcagattttgagtcactctccaggatagtggatgatctcaccattaatttgtgtaacagtgtcaaaggtccaggtgatttggaagcaccttctaacttagttatttctgagcgaacccatcgttcttttagagtgagctggacaccaccttctgacagtgtggatcgatataaggtggaatactatccagtttctggagggaaacgtcaagaattttatgtgagtcgaatggaaactagcacagtgctgaaagatctgaaacctgaaactgaatatgttgtcaatgtgtattctgtggtagaagatgaatatagtgagcctctgaaggggacagaaaaaaccttgccagtgcctgtagtcagcctgaatatttatgatgttggccctaccaccatgcatgtgcagtggcagcctgtgggaggagctactggctacatcttgtcatacaaacctgttaaggacacagagccaacaagacccaaagaggtgcgtttggggccaacagtgaatgacatgcagctgactgaccttgttcccaacacggagtatgcagtcacagtccaggctgtcctgcacgacctcactagtgaacctgtcactgttcgggaagtcaccttgcctttacccagacctcaggatctgaaactcagagatgtgactcacagcactatgaatgtcttttgggaacctgtgcctggaaaagtgcgtaaatatattgttcgatacaaaacaccagaagaggatgtcaaagaggtagaggtggacagatcagagaccagcacttccctcaaagacctcttctcacagaccttgtacacagtcagcgtttctgcagtacatgacgagggggagtctcctccagtgactgctcaagaaactacccgacccgtgccagccccaacaaacttaaagattactgaagtaacatcagagggtttcagagggacttgggatcatggagcttcagatgtgtctctctacagaataacttgggcaccttttggaagctcagataagatggagaccatcttaaatggagatgaaaacactttggtgttcgaaaacctgaaccccaacaccatctatgaagtttccattactgccatctatcctgatgagtcagaaagtgatgacctgattggcagtgagcgcacactgcctatcttaacaacacaagctcccaaaagtggcccacgaaaccttcaagtgtacaatgcaacatctaacagcctgactgttaagtgggatcctgctagtggtcgtgtgcagaaatataggatcacttatcagccttccacaggggaaggcaatgagcaaacgaccacaataggaggacggcagaacagtgtggtcctgcagaaactgaagccagacactccttacactatcaccgtatcctctctgtatcctgatggtgaaggaggtcggatgacgggaagaggcaagaccaaacctctaaacactgtaaggaacctgagagtgtatgacccttctaccagcaccttgaatgtccgctgggaccatgcagagggaaatcctcgtcagtacaagctcttctatgcaccagcagcaggtggtccagaggaactggtaccaatccccgggaataccaattatgccattcttaggaatctgcagccagatacctcatacactgtgactgtagttcccgtttatactgaaggtgatgggggacgcacatcagatactggaaggacattgatgagaggactggcaagaaatgtccaagtatacaatcctacacctaacagcctcgatgttcgctgggaccctgctccaggacctgtgctgcaatatcgcgttgtgtattctcctgtggatggcacaagaccctcagaatctatagtagtgccaggaaacacgcgcatggtgcatctggagcggctgattccggacacactctattccgtgaaccttgtggctctgtactcggatggagagggaaatcccagccctgcccagggccgaacgctaccacgcagtggaccaaggaacctgagagtctttggtgaaacaaccaatagcctctcggtagcctgggatcatgctgatgggccagttcagcagtacaggatcatctattctcccactgttggtgatccaattgatgaatataccacagtcccaggcagaagaaacaatgtaatactgcagcccctgcaacctgacactccatataaaattactgttattgctgtttatgaagatggagatggtggccatctaacaggaaatggaagaactgtgggactccttcctcctcagaacatacacatctctgacgaatggtatacaagattcagggtgtcctgggatccttcaccttctccagttcttggatataaaatagtatataagccagtgggttccaatgagcccatggaagcctttgttggagaaatgacatcatataccttacacaatctcaatcccagcaccacctacgatgtgaatgtttatgctcaatatgattctggactcagtgtccccttgacagatcaaggcactacattatatttaaatgtaacagatctgaaaacttaccagattgggtgggatacattctgtgtcaaatggtcacctcaccgggcagccacctcctacaggctaaaactaagccctgcagatggaacaaggggacaagaaattacagtgcgtggatcagaaaccagtcactgcttcactggcctttcaccagacactgattatggtgtcactgtttttgtgcagacaccaaatctcgagggaccaggagtctctgttaaagaacataccactgtgaaaccaacagaagcccctacagagccacccacacctcctccccctcccaccattccaccagcccgggatgtatgcaaaggggccaaggcagatattgtgttcttgactgatgcctcctggagcattggggacgataattttaacaaagttgtaaaattcatcttcaatactgtgggaggctttgatgaaatcagtcctgctgggattcaggtttcatttgtgcaatacagcgatgaggtcaagtctgagttcaagctgaacacgtacaatgacaaggccctagcccttggggccctccagaatattaggtacagaggaggaaacacaagaacaggcaaggccctcacgtttatcaaggagaaagtcttgacttgggagagcggcatgaggaagaatgtccctaaggtgttggttgtggtcacggacggtcggtcccaggatgaggtcaagaaggcggctttggtcatccagcagtcagggttcagtgtctttgtagttggtgtggctgatgtcgactacaatgagcttgccaacattgccagcaaaccaagtgaacggcacgtgttcattgtggacgactttgaatcttttgagaagatcgaagacaatcttattacatttgtttgtgaaactgccacttcaagttgtcctctcatttatttggatggctacacctcaccaggttttaaaatgcttgaagcatacaacctgacagaaaagaattttgcttctgtacaaggagtatctttggagtcagggtctttccccagctactcagcatacaggattcagaagaatgcgtttgtgaatcagcctacagcagacctacacccaaatggactccctccttcatacacgattatattattattcagacttctcccagaaactcccagtgacccttttgcaatttggcaaatcacagacagagactacaaaccacaagttggagtgattgcagatccttctagcaagacgttatcattctttaacaaggatacaagaggcgaggtgcaaactgttacatttgacacagaagaagtaaagacattattttatggaagttttcacaaggttcatattgtagtgacctcaaaaagtgttaagatttacattgactgctatgaaattatagaaaaagacatcaaggaagctggaaatataacaactgatggttatgaaattcttggaaaactccttaaaggggaaaggaaatcagccgcattccaaatccagagttttgacattgtctgcagtccagtgtggaccagtagagacagatgctgtgatattccctctaggagagatgagggaaaatgccctgcttttccaaattcttgcacatgtacacaggacagcgttggacctccaggacctccaggccctgcaggaggacctggtgctaaaggtcccagaggtgaaagaggtatcagtggggcaattgggccccctggtcctcgtggagacataggtcctccaggcccccagggtcctccaggccctcagggacccaatggactctctattccgggagagcaaggtcgccaagggatgaaaggtgatgctggagagccaggacttccaggccgaacaggaaccccaggattacctggcccaccaggaccaatgggacctccaggagacagaggcttcactggaaaagacggtgcaatgggacccaggggcccaccagggccgccgggaagcccaggctccccaggagtcacaggaccaagtgggaagccaggaaaacctggagatcatggcagaccaggtccatctgggttgaaaggagaaaaaggtgataggggagacattgcttcccagaacatgatgcgagcagttgcaagacaagtctgtgaacaattgataagtggtcagatgaacagattcaatcagatgctgaatcagattccaaatgattaccagtccagtcgcaaccagccaggcccgccgggtccaccgggacctcctggtagcgcaggagccagaggagaacctgggcctggggggcggccaggcttcccgggcacaccagggatgcagggaccccctggggaacgaggtttgccaggagagaaaggtgaaaggggtactggatcttcaggacctcgggggctgcctggccccccaggtccacaaggagaatccagaacaggtccaccagggtccacaggttcaagaggtccccctggcccccctggccgtcctggaaactcaggtatccgaggacccccaggtcctcctggatactgtgattcttctcagtgtgccagcatcccatacaacgggcaaggctatccaggttccggctaacacattttctaagtcgccagtgctgcttacagtttgaatacatgaaaatcctgtttctgagatgtttgcgcacgtgcttattaggaaatgagtctgtatggaaatctcaccacagataatggttaacgaaccgggtcgacatcacaaaggagggtggagactctttttactaacttgaatgagacaaaagcagtggtgtcagtttataatcctgatgcatttcagtaataatgtagaaaaacattattttaaaaaagttccaacacacagccatgaggagcctcagttttgaaagaggtgcataataaaactactaaccagaggagtctatgccattttaagaaaaacaattaacctggttaaagagaaatgtcttatgtaaataataaactaattgtggcttgtaaatgatttgtatgtgatcctgtcgactaaaatcacttaacaattctacaataagcttctgcatcaaagcctgccgcttgctctatgccggaataacaccaaatggaatctcctcatctcttgcttgttagcgatgtgtctgattcagggcatctgtctttttgttacttttttgtccgtgtcctctcatttgggttttgtaactgcaattttcaaaccaaagtttaaaatcaccttttcttcctgttttgctgtagtcactggtgttcctcacccaccagctgtaactcagtttgtgtgaggtacagccacagaagatgtcatgtactgtatattacctggtgatagttgcttttcaccccccgagttcagtttctaggagccaatgaaacttcccctcacctcctcatctttccaagttgttctttgaattgaggagtttgaaggcataaacagttacttggggatttgcgaaaatcctacttagttactgcgtttacagttctttggcccagtctctgacccttcccaagtatttgtgcaatgattgtgtttactgctggatttttgaaggtttttttttttaagaaagtgccatttcattatttgattatcaccaaattatctggaaataattgggacattgtaacttatctatttatagttatgagattaagactggagtgccatcaccgcgggtgatgatttagcttttgctgtgtgtgtgtgtgtgtgccttccaaatcatgccataattgtaatgttgaatcggacagagccttacgtgcccgagggcggggcctacctgcctgagcgcgagcccttcatcgtgccggtggagcccgagcggacagcggaatacgaggactacggcgcagacgagcctgcagaggagcctcctgagccccaccggcgctggcggcgcgccctgccccacggacccgggcagtgaaccagagatcacgcgccgcgccgcgaggcttgggggaggtgttgaaattctcatttacaggtcagatagagcagtgtacgtcttttctgaggtgtttcttccagcgttgctcatccaggagtaccctttctgattgtagagaaccttgtttctgcaggaagcctagctccaagcacgcagtctgtagacatttttgcctttgcccttgaaatgcttgcaaaatactttgttaacaaaagctgcaaagagagaacatgccgtgtgcctttagttagcacagcgggcagcctcagtgaaactcttaggttaagcagttaagtcctggaacccagagctgctgtgtatttcgagcgggcagtttatcttttgctatacttattttcaattcaattacaccacgattcaaataattcccctcctaaaaccaaaaaggagggaaacgtcaactccattgcaattacttatcttcctcttctatctctgttatacgccggggcatagaatgctcgtatacatctctttaacaaccacaaaccttaagccatgtagatgaagttagtgcatcaacgggatacagttccatattgccttaaacctccttgttttagacacactaacatttataccaaattgcagattattctgcagagagggaattgcatgtttgtgttgtatatttagtatgaacttttttcagaatataatatttcttagttatcaaaagtagttggaaaacatttgcaagactatgaacatagaattgctgcttttatattttaactgcagattgtgaatttcactgccttatattatttatttctgaaacaaaagaggcatttttcaataaaactactgaaaatttga

SEQ ID NO: 3954 - DNA, 8087 bp, Homo sapiens; identical to SEQ ID NO: 712

SEQ ID NO: 3955 - DNA, 4077 bp, Homo sapiens; identical to SEQ ID NO: 2456

SEQ ID NO: 3956 - DNA, 4131 bp, Homo sapiens; identical to SEQ ID NO: 1962

SEQ ID NO: 3957 - DNA, 3634 bp, Homo sapiens; identical to SEQ ID NO: 634

SEQ ID NO: 3958 - DNA, 2290 bp, Homo sapiens
ggaaaaaaggaaagtgcacttggaagagatccaagtgggcaacttgaagaacaagtgccaaatagcacttctgtcatgctggatgtcagggctctttgtccactttgtatagccgctggcttatagaaggtgctcgataaatctcttgaatttaaaaatcaattaggatgcctctatagtgaaaaagatacagtaaagatgagggataatcaatttaaaaaatgagtaagtacacacaaagcactttatccattcttatgacacctgttacttttttgctgtgtttgtgtgtatgcatgccatgttatagtttgtgggaccctcaaagcaagctggggagagtatatactgaatttagcttctgagacatgatgctcttcctttttaattaacccagaacttagcagcttatctatttctctaatctcaaaacatccttaaactgggggtgatacttgagtgagagaattttgcaggtattaaatgaactatcttctttttttttttctttgagacagagtcttgctctgtcacccaggctggagtgcagtggcgtgatctcagctcactgcaacctccgcctcccgggttcaagtgattctcctgcctcagcctcctgagtagctgggattacaggtgcgtgccaccgtgcccagctaatttttgtgtttttagtagagacggggtttcaccatgttggccatgctggtcttgaactcctgacctcgtgatctgcccacctcggcctcccaaagtgctggaattataggcgtgagccaccgcgcccagcaaagaacttctaaccttcataacctgacaggtgttctcgaggccagggtctctctttctgtcctttcacgatgctctgcatcccttggatgtgccagtttctgggggaagagtagtcctttgttacatgcatgagtcagtgaacagggaatgggtgaatgacatttgtgggtaggttatttctagaagttaggtgggcagcttggaaggcagaggcacttctacagactattccttggggccacacgtaggttcttgaatcccgaatggaaaggggagattgataactggtgtgtttatgttcttacaagtcttctgccttttaaaatccagtcccaggacatcaaagctctgcagaaagaactcgagcaatttgccaagctcctgaagcagaagaggatcaccctgggatatacacaggccgatgtggggctcaccctgggggttctatttggtgggttcccctctgcagattctgaccgcatctcccctctaaggagtatccctgaacctagtggggaggggcaggggcagactaccctcacccatgaagaggagtagggagagggagaagatgctttgagctccctctgggaagaggtggtaagcttggatctcagggtcacaagggccctgcgtgctccctcactttgcttctcttttgactggcctcccccagggaaggtattcagccaaacgaccatctgccgctttgaggctctgcagcttagcttcaagaacatgtgtaagctgcggcccttgctgcagaagtgggtggaggaagctgacaacaatgaaaatcttcaggagatatgcaaagcagaaaccctcgtgcaggcccgaaagagaaagcgaaccagtatcgagaaccgagtgagaggcaacctggagaatttgttcctacagtgcccgaaacccacactgcagcagatcagccacatcgcccagcagcttgggctcgagaaggatgtggtccgagtgtggttctgtaaccggcgccagaagggcaagcgatcaagcagcgactatgcacaacgagaggattttgaggctgctgggtctcctttctcagggggaccagtgtcctttcctctggccccagggccccattttggtaccccaggctatgggagccctcacttcactgcactgtactcctcggtccctttccctgagggggaagcctttccccctgtctccgtcaccactctgggctctcccatgcattcaaactgaggtgcctgcccttctaggaatgggggacagggggaggggaggagctagggaaagaaaacctggagtttgtgccagggtttttgggattaagttcttcattcactaaggaaggaattgggaacacaaagggtgggggcaggggagtttggggcaactggttggagggaaggtgaagttcaatgatgctcttgattttaatcccacatcatgtatcacttttttcttaaataaagaagcctgggacacagtaaaaaaaaaaaaaaaa

SEQ ID NO: 3959 - DNA, 1056 bp, Homo sapiens
ggttgccgggaatctggacctgagcgagaagcacgatccccggccgcccccgctcttgcatccccctggtcctactgctgtgcttgctggcgacggttcgttccggaagtcagtcccaggacatcaaagctctgcagaaagaactcgagcaatttgccaagctcctgaagcagaagaggatcaccctgggatatacacaggccgatgtggggctcaccctgggggttctatttgggaaggtattcagccaaacgaccatctgccgctttgaggctctgcagcttagcttcaagaacatgtgtaagctgcggcccttgctgcagaagtgggtggaggaagctgacaacaatgaaaatcttcaggagatatgcaaagcagaaaccctcgtgcaggcccgaaagagaaagcgaaccagtatcgagaaccgagtgagaggcaacctggagaatttgttcctgcagtgcccgaaacccacactgcagcagatcagccacatcgcccagcagcttgggctcgagaaggatgtggtccgagtgtggttctgtaaccggcgccagaagggcaagcgatcaagcagcgactatgcacaacgagaggattttgaggctgctgggtctcctttctcagggggaccagtgtcctttcctctggccccagggccccattttggtaccccaggctatgggagccctcacttcactgcactgtactcctcggtccctttccctgagggggaagcctttccccctgtctctgtcaccactctgggctctcccatgcattcaaactgaggtgcctgcccttctaggaatgggggacagggggaggggaggagctagggaaagaaaacctggagtttgtgccagggtttttgggattaagttcttcattcactaaggaaggaattgggaacacaaagggtgggggcaggggagtttggggcaactggttggagggaaggtgaagttcaatgatgctcttgattttaatcccacatcatgtatcacttttttcttaaataaagaagcctgggacacagtaaaaaaaaaaaaaaaa

SEQ ID NO: 3960 - DNA, 836 bp, Homo sapiens; identical to SEQ ID NO: 2545

SEQ ID NO: 3961 - DNA, 848 bp, Homo sapiens
ccagccttcagccggagaaccgtttactcgctgctgtgcccatctatcagcaggctccgggctgaagattgcttctcttctctcctccaaggtctagtgacggagcccgcgcgcggcgccaccatgcggcagaaggcggtatcgcttttcttgtgctacctgctgctcttcacttgcagtggggtggaggcaggtgagaatgcgggtaagaaaaagtgctcggagagctcggacagcggctccgggttctggaaggccctgaccttcatggccgtcggaggaggactcgcagtcgccgggctgcccgcgctgggcttcaccggcgccggcatcgcggccaactcggtggctgcctcgctgatgagctggtctgcgatcctgaatgggggcggcgtgcccgccggggggctagtggccacgctgcagagcctcggggctggtggcagcagcgtcgtcataggtaatattggtgccctgatgggctacgccacccacaagtatctcgatagtgaggaggatgaggagtagccagcagctcccagaacctcttcttccttcttggcctaactcttccagttaggatctagaactttgcctttttttttttttttttttttttgagatgggttctcactatattgtccaggctagagtgcagtggctattcacagatgcgaacatagtacactgcagcctccaactcctagcctcaagtgatcctcctgtctcaacctcccaagtaggattacaagcatgcgccgacgatgcccagaatccagaactttgtctatcactctccccaacaacctagatgtgaaaacagaataaacttcacccagaaaacactt

SEQ ID NO: 3962 - DNA, 860 bp, Homo sapiens
ccagccttcagccggagaaccgtttactcgctgctgtgcccatctatcagcaggctccgggctgaagattgcttctcttctctcctccaaggtctagtgacggagcccgcgcgcggcgccaccatgcggcagaaggcggtatcgcttttcttgtgctacctgctgctcttcacttgcagtggggtggaggcaggtgagaatgcgggtaaggatgcaggtaagaaaaagtgctcggagagctcggacagcggctccgggttctggaaggccctgaccttcatggccgtcggaggaggactcgcagtcgccgggctgcccgcgctgggcttcaccggcgccggcatcgcggccaactcggtggctgcctcgctgatgagctggtctgcgatcctgaatgggggcggcgtgcccgccggggggctagtggccacgctgcagagcctcggggctggtggcagcagcgtcgtcataggtaatattggtgccctgatgggctacgccacccacaagtatctcgatagtgaggaggatgaggagtagccagcagctcccagaacctcttcttccttcttggcctaactcttccagttaggatctagaactttgcctttttttttttttttttttttttgagatgggttctcactatattgtccaggctagagtgcagtggctattcacagatgcgaacatagtacactgcagcctccaactcctagcctcaagtgatcctcctgtctcaacctcccaagtaggattacaagcatgcgccgacgatgcccagaatccagaactttgtctatcactctccccaacaacctagatgtgaaaacagaataaacttcacccagaaaacactt

SEQ ID NO: 3963 - DNA, 12926 bp, Homo sapiens; identical to SEQ ID NO: 739

SEQ ID NO: 3964 - DNA, 75 bp, Homo sapiens; identical to SEQ ID NO: 1446

SEQ ID NO: 3965 - DNA, 2181 bp, Homo sapiens; identical to SEQ ID NO: 1901

SEQ ID NO: 3966 - DNA, 1634 bp, Homo sapiens; identical to SEQ ID NO: 1930

SEQ ID NO: 3967 - DNA, 4810 bp, Homo sapiens
ggtcgccgcggtgctgctgctcagtgggagcgggtcttcgcaactgtctccgcgtggcgcgcgcctctagccgcccttcccctggcggctacggccggagggagcggaggcgagcgggagtcgggctccatggagagcggcggacaactgggcagaggcggagctttcatctcggcaccctggttccagtgacccgcgctagcgtcccgtcccgcccgcgtcggagcggccgccggccccgggactgaccggcctcgccgcacctcccgcaccgactagcgctcccgggcgctcctgcgcccgactcgccctcgcccccactccccggcggggtggcggcggccgggcccccacggcggcggccggagcagcagcagcagcagcaggagcccgcctctatgatgaagttcaagcccaaccagacgcggacctacgaccgcgagggcttcaagaagcgggcggcgtgcctgtgcttccggagcgagcaggaggacgaggtgctgctggtgagtagcagccggtacccagaccagtggattgtcccaggaggaggaatggaacccgaggaggaacctggcggtgctgccgtgagggaagtttatgaggaggctggagtcaaaggaaaactaggcagacttctgggcatatttgagaaccaagaccgaaagcacagaacatatgtttatgttctaacagtcactgaaatattagaagattgggaagattctgttaatattggaaggaagagagagtggttcaaagtagaagatgctatcaaagttctccagtgtcataaacctgtacatgcagagtatctggaaaagctaaagctgggttgttccccagccaatggaaattctacagtcccttcccttccggataataatgccttgtttgtaaccgctgcacagacctctgggttgccatctagtgtaagatagagagaactgggtaggcctctcccaccatgtgcagtctcatggggagaggcttctttcgtttcctcgtcaaacatctgattgacgcttgcaaactgtctgaatttgccatgcaaggttttcaaacaatttgcatgtttttcagatgctttcaaatctttttttaaaaaaatagtgtaaaatattttaataagccaaagccatgtggaatttttgtttagatgccttaactgtgccacaccccacaaccccctatattattttggttgtctatttctcacagcatattttcagttttttgtccatttgacatcagtctgtggtttattttgtcatcagattacttgtgggtatacctaccccaaaattgttttctcattcacagcattagcatattcagcaaatccatctgtggtgggaattaaaaatattattggtattaaagaaatccattcaccccaaaacttgttttacaggattacaattttaattcaaaatttccagatttgggctatttctgtatgatccaataacttattttgtcacagggcttaatttgccatttttggggatttgtcgactcattttgtctgaattttcacaactggtattatgtcactagctacctgatacggctatttcccttataactcaatagtaccttaacacaaagtataactctgtagagttggtgaatattttagggaaatattagcaaaatgcatgtagtaaagacatcttatgaaaactgtattcatggaatttgatttagcatgctcagttgccagttcccattatcgatactctttctttgcagaataccttagaaccgttatttccctcagtgtagattgctcttaaaatgtattcagttatttagtggcccccacaggagtggagtcttgaaatctaattctaaatgccagtcagtgatgatcgcatcacagttgagtgaaatggccttcctgttcagctgttagagactgaagattgttagggcaccttagaatgtctcatcttttctaggttgtcaacaggtactatttgtcacataactaactttcgaggcactggaacatacctgaactaagaattaaatcttttactttatactcacttaaaatcaagaatcccatctaaaacacataggtaccttatctgaaactcttgcacttccccaaccagggcagaaatgaggtgggagaagtttgactaaaatgagggatgggggaaagtaaaagatgtttttttttttttgagactcgctttgtcacccaggctggagtgcaatggcacaatctcaactcaccgcaacctccgcctcccgggttcaagcgattctcctgcctcagcctcccgagtagttgggattacaggcgcctgcctccatgcctggctaattttgtatttttagtagagacagggtttcttcatgttggtcaggctggtctcaaactcctaacctcgtgatccgcctgcctcgacctcccaaagtgctgggattacaggcatgagccaccatgcccagccaaagatcatttttttatatagacttcagccctttgtaaatattgtaactggggagtatagagtagaaaaaaagtatagttaaaacatttgttctacaaattaacctttaaaaatataattactgctaaaaatagagtgctgttacacttaaggaaaattagtgccattttggaaatgagatcttgtgccataaatacagctgaactgaatataaatgttcacaaattaatgctgtcaaaggaatgagtaaagcagaaaaacttttaaccagcaacatttcaagtacgtagtgtgatcaaacatgatcatccagaatttttatatttttttctttgtacagaggttacatattctgggtgttcttttataaaggaaacattttaaatcccacaaattgacactttctatcttcaatggactaagatttttttggtcagtaatctctgaaatttccttaaattatatacttaacatagcagagaaactggattgtttttgtatataagactgcttccacctgaaatgctgtcataagtactgggggggtgggggagtgcccatcttgtacatgatattcttagaggtaataaggtaatgatgcatgaatttattttataaactcttggactatgtatttgacatgtaaaatatgtacagtattaacgtcaaccatctctttaaagttagcctataaatattgttgtataattttctttggtcagaaacacttggactgaatagtgacactcggtaaggattttcagtgccatttagcaaaacgtctttagtctatgcaactagcaaaaatctgcataatgcaacaacacagttttcacacttcaaattttacatgaggggttcttcacgattctcctggaacccagtctagcaaaatgagaggaaaggccctagggagatttatttctgttaaatagttaactctgctgagtatgacaaatagtgtctactatctcaaccctccaaaatttgcagagtgttgggactgtcatttgtgattttttttttttttttttggtggggtagttgaataaaattgggcagctaaatttttcagttccatgtgcctcccaaataaaaaacagaaaataagtagtttttgtgaattgacttgcagacaaagtagaaactgtgctgcatgatgttattttgtaaacagatgacattttctgaccaggcacatgccatccaattttctgtcaatcacactgttgtataaagcagcagaactgaaggggaaaaatgattgttgtatacactgaattgctttgcatggtctcatttgagataattgatgtaagaatcctgacttttttatatttggaaacatcaaataaaaatggaaaaaatgatcatggctttaaaaaaaaaacaaaaacacacacacatgaactcagatttgcaaaccaggtttctgaaactttgggtaaggtgtatgcttttaactttgaaatgtataaacacccagcggaaacgtatacctttcagtgcatagtgcattgtgtgcttaccctgggttgtttaaacttgtgttcaaatattccccctccaagtgaaagcctgtcgggaattccacagtaacacctttactgttctcccattgatgatcatatacgttacctcttcctagcggtacatttgtatgatccttactactggaattaccgggttaaaaggaaatgcttaccactaagatgtcagtattctcctcatggatattttcagtctcaatgttgccagtctaatagtatagtatgtggttgctttactgctgttctccccacccccgtggagttgtgtcattattttaatgaatgtgagctcttgacttactctagaattctaatacagatactttctgcactagtatcacttttattattgcagttccatttaaaagcataactggctaagtcaccgccccacccgccgcattacatttcctaaaacatactgctgccaaagaccaactgtagaatccttaagtcctgttcaagtgtcacttcattttttattaggggtttcttagttggagggcatgagaaacttggccctttccaatgttgtcttcacattggagtataagaattctctataggactctttaatttttttttttttttggtagagatggggtcttgctgtgttgcccaggctggtctcaaactcctaggcttaagcagtcctccagcctcagccttctcaaagtgctaggatgattggcatgagccacctcgtctggcctgcaggtctttttaagcatttgctgttcaataataagcatcttctttatgcctagtatttgtgataagagcacaaaacaa

SEQ ID NO: 3968 - DNA, 4813 bp, Homo sapiens; identical to SEQ ID NO: 600

SEQ ID NO: 3969 - DNA, 3220 bp, Homo sapiens; identical to SEQ ID NO: 666

SEQ ID NO: 3970 - DNA, 2108 bp, Homo sapiens
tcactggagaggaggcagggacagacccagcagcacccacctgagcgagaagagcagacaccgtgctcctggaatcacccagcatgttgcaaggtctcctgccagtcagtctcctcctctctgttgcagtaagtgctataaaagaactccctggggtgaagaagtatgaagtggtttatcctataagacttcatccactgcataaaagagaggccaaagagccagagcaacaggaacaatttgaaactgaattaaagtataaaatgacaattaatggaaaaattgcagtgctttatttgaaaaaaaacaagaacctccttgcaccaggctacacggaaacatattataattccactggaaaggagatcaccacaagcccacaaattatggatgattgttattatcaaggacatattcttaatgaaaaggtttctgacgctagcatcagcacatgtaggggtctaaggggctacttcagtcagggggatcaaagatactttattgaacctttaagccccatacatcgggatggacaggagcatgcactcttcaagtataaccctgatgaaaagaattatgacagcacctgtgggatggatggtgtgttgtgggcccacgatttgcagcagaacattgccctacctgccaccaaactagtaaaattgaaagacaggaaggttcaggaacatgagaaatacatagaatattatttggtcctggataatggtgagtttaaaaggtacaatgagaatcaagatgagatcagaaagagggtatttgagatggctaattatgtcaacatgctttataaaaagctcaatactcatgtggccttagttggtatggaaatctggactgacaaggataagataaagataaccccaaatgcaagcttcaccttggagaatttttctaaatggagggggagtgttctctcaagaagaaagcgtcatgatattgctcagttaatcacagcaacagaacttgctggaacgactgtgggtcttgcatttatgtctacaatgtgttctccttattctgttggcgttgttcaggaccacagcgataatcttcttagagttgcagggacaatggcacatgaaatgggccacaactttggaatgtttcatgacgactattcttgcaagtgtccttctacaatatgtgtgatggacaaagcactgagcttctatatacccacagacttcagttcctgcagccgtctcagctatgacaagttttttgaagataaattatcaaattgcctctttaatgctccattgcctacagatatcatatccactccaatttgtgggaaccagttggtggaaatgggagaggactgtgattgtgggacatctgaggaatgtaccaatatttgctgtgatgctaagacatgtaaaatcaaagcaacttttcaatgtgcattaggagaatgttgtgaaaaatgccaatttaaaaaggctgggatggtgtgcagaccagcaaaagatgagtgcgacctgcctgaaatgtgtaatggtaaatctggtaattgtcctgatgatagattccaagtcaatggcttcccttgccatcacgggaagggccactgcttgatggggacatgccccacactgcaggagcagtgcacagagctgtggggaccaggtaggaggacaaatcctttcccctgtgcatgtgcgaaggaaaatcatttcagatgacagtgtttaaccatggtcaaaggaccattctgtcctatccttcttagaagctttgaactcaaaatcatggaaaggttttaagatttgaggttggttttagggttgctagatttagcaagtaaaaataaggatggccccgttaaattttaacttaaaattaacaagttttttgttaattttttgttttttgtctcagcatcagtatatcccatgcaatatttgaggtgtgctcatactaaaattatttgtgtatctgaaattcaaattaaactgggtgtctttttcttttcatctggcaaccctactaagatcataaacccttggaaatctgtgtgtgtgcgggtgtgtgtgtgtgtgtgtgtgcaggggtggcagaagtactgtgggatgggacagaaataa

SEQ ID NO: 3971 - DNA, 2605 bp, Homo sapiens; identical to SEQ ID NO: 2302

SEQ ID NO: 3972 - DNA, 8082 bp, Homo sapiens; identical to SEQ ID NO: 149

SEQ ID NO: 3973 - DNA, 5672 bp, Homo sapiens; identical to SEQ ID NO: 1495

SEQ ID NO: 3974 - DNA, 1459 bp, Homo sapiens; identical to SEQ ID NO: 763

SEQ ID NO: 3975 - DNA, 2672 bp, Homo sapiens; identical to SEQ ID NO: 728

SEQ ID NO: 3976 - DNA, 14121 bp, Homo sapiens; identical to SEQ ID NO: 587

SEQ ID NO: 3977 - DNA, 5061 bp, Homo sapiens; identical to SEQ ID NO: 1647

SEQ ID NO: 3978 - DNA, 3476 bp, Homo sapiens; identical to SEQ ID NO: 715

SEQ ID NO: 3979 - DNA, 3334 bp, Homo sapiens
gggtcgtcgcggccgccgaaccggggggcggggggccggggtgagcgctaagatggccgccccggctcgggctgttttcagatgcttcaagtgttgtgaacagagacttgtttggattatgcatttctcagctagactaaataaatgctagcaatggatacgtgcaaacatgttgggcagctgcagcttgctcaagaccattccagcctcaaccctcagaaatggcactgtgtggactgcaacacgaccgagtccatttgggcttgccttagctgctcccatgttgcctgtggaagatatattgaagagcatgcactcaagcactttcaagaaagcagtcatcctgttgcattggaggtgaatgagatgtacgttttttgttacctttgtgatgattatgttctgaatgataacacaactggagacctgaagttactacgacgtacattaagtgccatcaaaagtcaaaattatcactgcacaactcgtagtgggaggtttttacggtccatgggtacaggtgatgattcttatttcttacatgacggtgcccaatctctgcttcaaagtgaagatcaactgtatactgctctttggcacaggagaaggatactaatgggtaaaatctttcgaacatggtttgaacaatcacccattggaagaaaaaagcaagaagaaccatttcaggaaaaaatagtagtaaaaagagaagtaaagaaaagacggcaggaattggagtatcaagttaaagcagaattggaaagtatgcctccaagaaagagtttacgtttacaagggctcgctcagtcgaccataatagaaatagtttctgttcaggtgccagcacaaacgccagcatcaccagcaaaagataaagtactctctacctcagaaaatgaaatatctcaaaaagtcagtgactcctcagttaaacgaaggccaatagtaactcctggtgtaacaggattgagaaatttgggaaatacttgctatatgaattctgttcttcaggtgttgagtcatttacttatttttcgacaatgttttttaaagcttgatctgaaccaatggctggctatgactgctagcgagaagacaagatcttgtaagcatccaccagtcacagatacagtagtatatcaaatgaatgaatgtcaggaaaaagatacaggttttgtttgctccagacaatcaagtctgtcatcaggactaagtggtggagcatcaaaaggtagaaagatggaacttattcagccaaaggagccaacttcacagtacatttctctttgtcatgaattgcatactttgttccaagtcatgtggtctggaaagtgggcgttggtctcaccatttgctatgctacactcagtgtggagactcattcctgcctttcgtggttacgcccaacaagacgctcaggaatttctttgtgaacttttagataaaatacaacgtgaattagagacaactggtaccagtttaccagctcttatccccacttctcaaaggaaactcatcaaacaagttctgaatgttgtaaataacatttttcatggacaacttcttagtcaggttacatgtcttgcatgtgacaacaaatcaaataccatagaacctttctgggacttgtcattggagtttccagaaaggtatcaatgcagtggaaaagatattgcttcccagccatgtctggttactgaaatgttggccaaatttacagaaactgaagctttagaaggaaaaatctacgtatgtgaccagtgtaactcaaagcgtagaaggttttcctccaaaccagttgtactcacagaagcccagaaacaacttatgatatgccacctacctcaggttctcagactgcacctcaaacgattcaggtggtcaggacgtaataaccgagagaagattggtgttcatgttggctttgaggaaatcttaaacatggagccctattgctgcagggagaccctgaaatccctcagaccagaatgctttatctatgacttgtccgcggtggtgatgcaccatgggaaaggatttggctcagggcactacactgcctactgctataattctgaaggagggttctgggtacactgcaatgattccaaactaagcatgtgcactatggatgaagtatgcaaggctcaagcttatatcttgttttatacccaacgagttactgagaatggacattctaaacttttgcctccagagctcctgttggggagccaacatcccaatgaagacgctgatacctcgtctaatgaaatccttagctgatccaaagacaatggggttttcttcctgtgatttatatatatactttttaaaagactgatgtaccattttaaacttcattttttcttgtgaatcagtgtatactacatttatacattttatatctaacaatttttttttttacaaagtataaatgtatatatcaactgaaggtaactacttttttcatatttggagttttaaacttttggtgtttacctcagactgatgttacctcttttatatttttatgtcttaattggctcggatgatgaacttgtgcaatcttctaccaacaaagttcaagtggcatcattttatatacatgtatctttttcaggtattttctatacaaattcttaatagatggaaaattagactctactttggtcactaatagtctttcatttgtatattgaagttaccttgccccttggagttattgaagtgacatgtcaaggtatcacctaaatattcttcagtcacactcactggtatttctgaggctttgtgtgttaacaggccttgtaattgacattattttggttaatgtaaccccaaaattgctttagtaattgctctttggcatagtcaaactataaatgaaaatggcagctttacaaatagtatatttaagtgaactctggaactatggacatgaaaaaaatgatggctgggatttatgatttttgtctggcagcaaacaggtttgtccagaagtctaataattaagcagtcataaaaagtctgaatttagtaaaccagtgtatgatgttattcaaatagtttaccttgggtatgagttcattttataatgtctgatgacattagatctcttaaaactttatgtattttttttagttcaaaggaatagagtcttgaagagaaaaaattatagggcagaaaagataagtgttcaaaattggcaactggactattattatgtctagcatctcattctaaataactaaagcttgatttactcttgctaggattatgtgactactaggtaggagcctcttaaaacactggccctgagcattaaaaaaaaaaa

SEQ ID NO: 3980 - DNA, 928 bp, Homo sapiens
taaaactttaggaaattagtaccagacttttatattggtcaacagcaaaatgaacattactactcagcctccaacacatgcagtttgcctataccagggatcctgtcaaaatatacaccacttatagcttcttaagtgcagttatcatagagcacagtccctgacatcacacagctgcagagatgaataaacaaagaggaacctactcagaagtgagtctggcccaggacccaaagaggcagcaaaggaaacttaagggcaataaaatctccatttcaggaaccaaacaggaaatattccaagtagaattaaaccttcaaaatgcttcttcggatcatcaagggaatgacaagacatatcactgcaaaggtttactgccacctccagagaagctcactgctgaggtcctaggaatcatttgcattgtcctgatggccactgtgttaaaaacaatagttcttattccttgtattggagtactggagcagaacaatttttccctgaatagaagaatgcagaaagcacgtcattgtggccattgtcctgaggagtggattacatattccaacagttgttattacattggtaaggaaagaagaacttgggaagaaagagtttgctggcctgtgcttcgaagaactctgatctgctttctatagataatgaggaagaaatggtaagacgtaaatgtttcaacactttactaaaagcttatttctgtcaatatcatatttgtagaaatcatccatatgtttatacatatatttacttcatatatttttaagtctgtgtagtattcaactgacttcataatatttttatattcatatactgttaatgcacatttggttatttccagttttgcttttcatggaaacccatgcttctataaatgtttttatcacaaaataaatataaagaaaactaa

SEQ ID NO: 3981 - DNA, 3968 bp, Homo sapiens; identical to SEQ ID NO: 1800

SEQ ID NO: 3982 - DNA, 4827 bp, Homo sapiens
tacgtgggcatttttggtcgaagagagctgaagtaatgagaagacatcatggaggcccagtcccacagctccacgaccactgaaaagaaaaaagttgagaattccatagtgaagtgctccactcgaacagatgtgagcgagaaagccgttgcctccagcaccacttctaatgaggatgaaagtcctggacagacttatcacagagagagaagaaacgcaatcactatgcagccacagaatgtccaggggctcagcaaagtcagtgaggaaccttcaacatcgagtgacgagagggcctcattgatcaagaaagagatccatgggtccctgccacacgtggcggagccctctgtgccgtaccgcgggacggtgtttgccatggaccccaggaatggttacatggagccccactaccaccctcctcatcttttccctgccttccatcctcctgtaccaattgatgccagacatcatgagggccgttaccattacgatccatctccgattcctccattgcatatgacttccgccttatctagtagccctacgtatccggacctgcccttcattaggatctccccacaccggaaccccgctgctgcttccgagtctcccttcagccctccacatccctacattaatccctacatggactatatccgctccttgcacagcagcccatcgctctccatgatctcagcaacccgtgggctgagccctacagatgcgccccatgcaggagtcagcccagcagaatactatcatcagatggccctgctaactggccagcgcagcccctatgcagacattattccctcagctgccaccgccggcacgggggccatccacatggaatatcttcatgctatggatagcaccagattctccagccccaggctgtcagccaggccgagccgaaaacgtacactgtccatatcaccactctccgatcatagctttgaccttcagaccatgataaggacgtctcccaactccttggtcacgattctcaataattcccgtagcagctcttcagcaagtggctcctatggtcacttatctgcaagtgcaatcagccctgccttgagcttcacctactcttccgcgcccgtctctctccacatgcatcagcagatcctaagccgacaacagagcttaggttcagcctttggacacagccctccactcatccaccctgccccaacttttccaacacagaggcctattccagggatccctacggttctgaaccccgtccaggtcagctccggcccttctgagtcctcacagaacaagcccacgagtgagtctgcagtgagcagcactggtgacccgatgcacaacaagaggtccaagatcaaacccgatgaagacctccccagcccaggggctcgggggcagcaggaacagcccgaaggaacaacccttgtcaaggaggaaggggacaaagatgaaagcaaacaggagcctgaagtcatctatgagacaaactgccactgggaaggctgcgcgagggagttcgacacccaagagcagcttgtgcaccatataaataacgaccatattcatggagagaagaaggagttcgtgtgcaggtggctggactgctcaagagagcagaaacccttcaaagcccagtatatgttggtagtgcatatgagaagacacacgggcgagaagcctcacaaatgcacttttgaaggttgcacaaaggcctactcgagactagaaaacttgaaaacacacttgagatctcacactggagagaaaccatacgtctgtgagcacgaaggttgcaacaaggctttctcaaatgcctctgatcgcgccaaacaccaaaacagaacgcattccaatgagaaaccatatgtgtgcaaaatcccaggctgcactaagcgttacacagacccaagctccctccggaaacatgtgaagacagtgcatggcccagaggctcatgtcaccaagaagcagcgaggggacatccatcctcggccgccacccccgagagattccggcagccattcacagtccaggtcgcctggccgaccgactcagggagcccttggtgagcagcaggacctcagcaacactacctcaaagcgggaagaatgcctccaggtgaaaaccgtcaaggcagagaagccaatgacatctcagccaagccctggtggtcagtcttcatgcagcagccaacagtcccccatcagcaactattccaacagtgggctcgagcttcctctgaccgatggaggtagtataggagacctcagtgccatcgatgaaaccccaatcatggactcaaccatttccactgcaaccacagcccttgctttgcaagccaggagaaacccggcagggaccaaatggatggagcacgtaaaactagaaaggctaaaacaagtgaatggaatgtttccgcgactgaaccccattctaccccctaaagcccctgcggtctctcctctcataggaaatggcacacagtccaacaacacctgcagcttgggtgggcccatgacgcttctcccgggcagaagcgacctctctggggtggacgtcactatgctgaacatgctcaacagaagggacagcagcgccagcaccatcagctcggcctacctgagcagccgccgctcctcagggatctcgccctgcttctccagccgccgctccagcgaggcgtcacaggccgagggccggccgcagaacgtgagcgtggccgactcctacgaccccatctccaccgacgcctcgcgccgctccagcgaagccagccagagcgacggcctgcccagcctgctcagcctcacgcccgcccagcagtaccgcctcaaggccaagtacgcggctgccacaggagggccgccgccgacgcccctgcccaacatggagaggatgagcctgaagacgcgcctggcgctgctcggggatgccctcgagcctggcgtggccctgcctccagttcatgccccgaggaggtgcagcgacgggggagcccacggctacgggcggcgccacctgcagccgcacgatgcgctgggccacggcgtgaggagggccagcgacccggtgcggacaggctccgagggcctggccctgcctcgtgtgccgcgcttcagcagcctcagcagctgcaaccccccggcgatggccacgtccgcggagaagcgcagtctcgtgcttcagaattacacgcggcccgagggcggccagtcccgaaacttccactcgtccccctgtcctcccagcatcaccgagaacgtcaccctggagtccctgaccatggacgctgatgccaacctgaacgatgaggatttcctgccggacgacgtggtgcagtatttaaattcccagaaccaagcagggtacgagcagcacttccccagcgccctcccggacgacagcaaagtgccccacgggcccggtgactttgacgcgcccgggctgccagacagccacgctggccagcagttccatgccctcgagcagccctgccccgagggcagcaaaaccgacctgcccattcagtggaacgaagtcagctccggaagcgccgacctgtcctcctccaagctcaagtgtgggccgcggcccgctgtgccgcagactcgcgcctttgggttctgcaacggcatggtcgtccacccgcagaaccccttgaggagcgggcctgctgggggctatcagaccctcggggagaacagcaacccctacggtggcccagagcacttgatgctccacaacagccccggaagtggcaccagtggaaacgccttccatgaacagccctgtaaggccccgcagtatgggaactgtctcaacaggcagccagtggcccctggtgcactcgacggtgcctgtggtgccgggattcaagcctcaaagctgaagagcacccccatgcaagggagcgggggccagctgaatttcggcctgccggtagcgccaaatgagtcagctggcagcatggtgaatggcatgcagaaccaggacccagtgggacaggggtacctggctcaccagctcctcggcgacagcatgcagcacccgggggcaggccgccccggtcagcagatgcttgggcagattagtgctacctcacacatcaacatctaccaagggccagagagctgcctgccaggggctcacggcatgggcagccagccgtcaagcttggcagttgtcaggggctaccagccatgtgccagctttgggggcagcaggcgccaggctatgccgagggacagccttgctctgcagtcaggacagctcagtgacacaagtcagacctgcagggtgaatggtatcaagatggagatgaaagggcagccccatccgctgtgctctaatctgcagaattactctggtcagttctatgaccaaaccgtgggcttcagtcagcaagacacgaaagctggttcattctctatttcagacgccagctgcctgctacaggggaccagcgccaaaaactctgagttactttccccaggtgctaatcaggtgacaagcacagtggacagcctcgacagccatgacctggaaggggtacagattgacttcgatgccatcatagacgatggggaccactccagcctgatgtcgggggccctgagcccaagtatcattcagaacctttcccatagctcctcccgcctcaccacgcctcgggcgtccctcccattcccagcgctgtccatgagcaccaccaacatggctatcggggacatgagttctttgctgacctccctagcggaagaaagcaaattccttgcagttatgcaataggctttaggaaaaaaagactgcaaccaacggaaatca

SEQ ID NO: 3983 - DNA, 7185 bp, Homo sapiens
acagggggaggagagggaaccccaggcgcgagcgggaagaggggacctgcagccacaacttctctggtcctctgcatcccttctgtccctccacccgtccccttccccaccctctggcccccaccttcttggaggcgacaacccccgggaggcattagaagggatttttcccgcaggttgcgaagggaagcaaacttggtggcaacttgcctcccggtgcgggcgtctctcccccaccgtctcaacatgcttaggggtccggggcccgggctgctgctgctggccgtcctgtgcctggggacagcggtgccctccacgggagcctcgaagagcaagaggcaggctcagcaaatggttcagccccagtccccggtggctgtcagtcaaagcaagcccggttgttatgacaatggaaaacactatcagataaatcaacagtgggagcggacctacctaggcaatgcgttggtttgtacttgttatggaggaagccgaggttttaactgcgagagtaaacctgaagctgaagagacttgctttgacaagtacactgggaacacttaccgagtgggtgacacttatgagcgtcctaaagactccatgatctgggactgtacctgcatcggggctgggcgagggagaataagctgtaccatcgcaaaccgctgccatgaagggggtcagtcctacaagattggtgacacctggaggagaccacatgagactggtggttacatgttagagtgtgtgtgtcttggtaatggaaaaggagaatggacctgcaagcccatagctgagaagtgttttgatcatgctgctgggacttcctatgtggtcggagaaacgtgggagaagccctaccaaggctggatgatggtagattgtacttgcctgggagaaggcagcggacgcatcacttgcacttctagaaatagatgcaacgatcaggacacaaggacatcctatagaattggagacacctggagcaagaaggataatcgaggaaacctgctccagtgcatctgcacaggcaacggccgaggagagtggaagtgtgagaggcacacctctgtgcagaccacatcgagcggatctggccccttcaccgatgttcgtgcagctgtttaccaaccgcagcctcacccccagcctcctccctatggccactgtgtcacagacagtggtgtggtctactctgtggggatgcagtggctgaagacacaaggaaataagcaaatgctttgcacgtgcctgggcaacggagtcagctgccaagagacagctgtaacccagacttacggtggcaactcaaatggagagccatgtgtcttaccattcacctacaatggcaggacgttctactcctgcaccacagaagggcgacaggacggacatctttggtgcagcacaacttcgaattatgagcaggaccagaaatactctttctgcacagaccacactgttttggttcagactcgaggaggaaattccaatggtgccttgtgccacttccccttcctatacaacaaccacaattacactgattgcacttctgagggcagaagagacaacatgaagtggtgtgggaccacacagaactatgatgccgaccagaagtttgggttctgccccatggctgcccacgaggaaatctgcacaaccaatgaaggggtcatgtaccgcattggagatcagtgggataagcagcatgacatgggtcacatgatgaggtgcacgtgtgttgggaatggtcgtggggaatggacatgcattgcctactcgcagcttcgagatcagtgcattgttgatgacatcacttacaatgtgaacgacacattccacaagcgtcatgaagaggggcacatgctgaactgtacatgcttcggtcagggtcggggcaggtggaagtgtgatcccgtcgaccaatgccaggattcagagactgggacgttttatcaaattggagattcatgggagaagtatgtgcatggtgtcagataccagtgctactgctatggccgtggcattggggagtggcattgccaacctttacagacctatccaagctcaagtggtcctgtcgaagtatttatcactgagactccgagtcagcccaactcccaccccatccagtggaatgcaccacagccatctcacatttccaagtacattctcaggtggagacctaaaaattctgtaggccgttggaaggaagctaccataccaggccacttaaactcctacaccatcaaaggcctgaagcctggtgtggtatacgagggccagctcatcagcatccagcagtacggccaccaagaagtgactcgctttgacttcaccaccaccagcaccagcacacctgtgaccagcaacaccgtgacaggagagacgactcccttttctcctcttgtggccacttctgaatctgtgaccgaaatcacagccagtagctttgtggtctcctgggtctcagcttccgacaccgtgtcgggattccgggtggaatatgagctgagtgaggagggagatgagccacagtacctggatcttccaagcacagccacttctgtgaacatccctgacctgcttcctggccgaaaatacattgtaaatgtctatcagatatctgaggatggggagcagagtttgatcctgtctacttcacaaacaacagcgcctgatgcccctcctgacccgactgtggaccaagttgatgacacctcaattgttgttcgctggagcagaccccaggctcccatcacagggtacagaatagtctattcgccatcagtagaaggtagcagcacagaactcaaccttcctgaaactgcaaactccgtcaccctcagtgacttgcaacctggtgttcagtataacatcactatctatgctgtggaagaaaatcaagaaagtacacctgttgtcattcaacaagaaaccactggcaccccacgctcagatacagtgccctctcccagggacctgcagtttgtggaagtgacagacgtgaaggtcaccatcatgtggacaccgcctgagagtgcagtgaccggctaccgtgtggatgtgatccccgtcaacctgcctggcgagcacgggcagaggctgcccatcagcaggaacacctttgcagaagtcaccgggctgtcccctggggtcacctattacttcaaagtctttgcagtgagccatgggagggagagcaagcctctgactgctcaacagacaaccaaactggatgctcccactaacctccagtttgtcaatgaaactgattctactgtcctggtgagatggactccacctcgggcccagataacaggataccgactgaccgtgggccttacccgaagaggccagcccaggcagtacaatgtgggtccctctgtctccaagtaccccctgaggaatctgcagcctgcatctgagtacaccgtatccctcgtggccataaagggcaaccaagagagccccaaagccactggagtctttaccacactgcagcctgggagctctattccaccttacaacaccgaggtgactgagaccaccattgtgatcacatggacgcctgctccaagaattggttttaagctgggtgtacgaccaagccagggaggagaggcaccacgagaagtgacttcagactcaggaagcatcgttgtgtccggcttgactccaggagtagaatacgtctacaccatccaagtcctgagagatggacaggaaagagatgcgccaattgtaaacaaagtggtgacaccattgtctccaccaacaaacttgcatctggaggcaaaccctgacactggagtgctcacagtctcctgggagaggagcaccaccccagacattactggttatagaattaccacaacccctacaaacggccagcagggaaattctttggaagaagtggtccatgctgatcagagctcctgcacttttgataacctgagtcccggcctggagtacaatgtcagtgtttacactgtcaaggatgacaaggaaagtgtccctatctctgataccatcatcccagctgttcctcctcccactgacctgcgattcaccaacattggtccagacaccatgcgtgtcacctgggctccacccccatccattgatttaaccaacttcctggtgcgttactcacctgtgaaaaatgaggaagatgttgcagagttgtcaatttctccttcagacaatgcagtggtcttaacaaatctcctgcctggtacagaatatgtagtgagtgtctccagtgtctacgaacaacatgagagcacacctcttagaggaagacagaaaacaggtcttgattccccaactggcattgacttttctgatattactgccaactcttttactgtgcactggattgctcctcgagccaccatcactggctacaggatccgccatcatcccgagcacttcagtgggagacctcgagaagatcgggtgccccactctcggaattccatcaccctcaccaacctcactccaggcacagagtatgtggtcagcatcgttgctcttaatggcagagaggaaagtcccttattgattggccaacaatcaacagtttctgatgttccgagggacctggaagttgttgctgcgacccccaccagcctactgatcagctgggatgctcctgctgtcacagtgagatattacaggatcacttacggagaaacaggaggaaatagccctgtccaggagttcactgtgcctgggagcaagtctacagctaccatcagcggccttaaacctggagttgattataccatcactgtgtatgctgtcactggccgtggagacagccccgcaagcagcaagccaatttccattaattaccgaacagaaattgacaaaccatcccagatgcaagtgaccgatgttcaggacaacagcattagtgtcaagtggctgccttcaagttcccctgttactggttacagagtaaccaccactcccaaaaatggaccaggaccaacaaaaactaaaactgcaggtccagatcaaacagaaatgactattgaaggcttgcagcccacagtggagtatgtggttagtgtctatgctcagaatccaagcggagagagtcagcctctggttcagactgcagtaaccactattcctgcaccaactgacctgaagttcactcaggtcacacccacaagcctgagcgcccagtggacaccacccaatgttcagctcactggatatcgagtgcgggtgacccccaaggagaagaccggaccaatgaaagaaatcaaccttgctcctgacagctcatccgtggttgtatcaggacttatggtggccaccaaatatgaagtgagtgtctatgctcttaaggacactttgacaagcagaccagctcagggtgttgtcaccactctggagaatgtcagcccaccaagaagggctcgtgtgacagatgctactgagaccaccatcaccattagctggagaaccaagactgagacgatcactggcttccaagttgatgccgttccagccaatggccagactccaatccagagaaccatcaagccagatgtcagaagctacaccatcacaggtttacaaccaggcactgactacaagatctacctgtacaccttgaatgacaatgctcggagctcccctgtggtcatcgacgcctccactgccattgatgcaccatccaacctgcgtttcctggccaccacacccaattccttgctggtatcatggcagccgccacgtgccaggattaccggctacatcatcaagtatgagaagcctgggtctcctcccagagaagtggtccctcggccccgccctggtgtcacagaggctactattactggcctggaaccgggaaccgaatatacaatttatgtcattgccctgaagaataatcagaagagcgagcccctgattggaaggaaaaagacaggacaagaagctctctctcagacaaccatctcatgggccccattccaggacacttctgagtacatcatttcatgtcatcctgttggcactgatgaagaacccttacagttcagggttcctggaacttctaccagtgccactctgacaggcctcaccagaggtgccacctacaacatcatagtggaggcactgaaagaccagcagaggcataaggttcgggaagaggttgttaccgtgggcaactctgtcaacgaaggcttgaaccaacctacggatgactcgtgctttgacccctacacagtttcccattatgccgttggagatgagtgggaacgaatgtctgaatcaggctttaaactgttgtgccagtgcttaggctttggaagtggtcatttcagatgtgattcatctagatggtgccatgacaatggtgtgaactacaagattggagagaagtgggaccgtcagggagaaaatggccagatgatgagctgcacatgtcttgggaacggaaaaggagaattcaagtgtgaccctcatgaggcaacgtgttatgatgatgggaagacataccacgtaggagaacagtggcagaaggaatatctcggtgccatttgctcctgcacatgctttggaggccagcggggctggcgctgtgacaactgccgcagacctgggggtgaacccagtcccgaaggcactactggccagtcctacaaccagtattctcagagataccatcagagaacaaacactaatgttaattgcccaattgagtgcttcatgcctttagatgtacaggctgacagagaagattcccgagagtaaatcatctttccaatccagaggaacaagcatgtctctctgccaagatccatctaaactggagtgatgttagcagacccagcttagagttcttctttctttcttaagccctttgctctggaggaagttctccagcttcagctcaactcacagcttctccaagcatcaccctgggagtttcctgagggttttctcataaatgagggctgcacattgcctgttctgcttcgaagtattcaataccgctcagtattttaaatgaagtgattctaagatttggtttgggatcaataggaaagcatatgcagccaaccaagatgcaaatgttttgaaatgatatgaccaaaattttaagtaggaaagtcacccaaacacttctgctttcacttaagtgtctggcccgcaatactg

SEQ ID NO: 3984 - DNA, 2764 bp, Homo sapiens
tcagggctgccagaatggcttttgctgagtgcatagcaccagcgtgtgtcatgtcttggctgcgtttctggggcccatggcccctccttacgtggcaactattgtctttactagtcaaggaggctcagcctctggtgtgggtcaaggacccgctccagctgacctctaaccccctggggccacctgagccctggtcttcccgctcctcccatctcccatgggaatctccccatgcacctgctcccccagcagccccgggggactttgattacctggggccctctgcttcttcgcagatgtcagccctgcctcaggaaccaactgaaaatttggctccattcctgaaggaattggattcagctggagagctgcccctggggccagagccgttcttggctgcacatcaggacttaaatgacaagcggactccagaagaaaggctcccagaggtggttccgcttctcaaccgggatcagaaccaggccctagttcagcttcctcgcctcaagtgggttcaaactacagatctagatcgggctgcaggtcatcaggcagatgaaatacttgttccactagacagtaaggtttcaagaccaaccaaatttgttgtttcgcccaagaacctgaagaaagatctagctgaacgttggagccttcctgagattgttgggattccacaccaattatccaaacctcagcgtcagaaacagactttgccagatgattatttgagtatggacacactgtatcccggcagcctacctccagaactccgggtgaacgcagatgagcctccagggcctcctgagcaagttggactttctcaattccatctagagcccaaaagtcaaaatccagagacccttgaagacatccagtcctcttcactccaggaagaagccccagcgcagcttctacagctccctcaggaggtagaaccttcaacccagcaggaggccccagctctgcctccagagtcctctatggagagtctagctcaaactccactgaatcatgaagtgacagttcaacctccaggtgaggatcaagctcattataatttgcccaagtttacagtcaaacctgcagatgtggaggttaccatgacttcagagcctaaaaatgagacagaatctacccaagcccagcaggaggccccaattcagcctcccgaggaggcggaaccttcttctacagccctgaggactacagatcctcctccagaacaccctgaggtgacacttccaccttcagacaagggtcaggctcagcattcacacctgactgaagccacagttcaacctctggacctggagcttagcataactacagagcctactacagaggttaaaccgtctccaaccacggaggaaacctcagctcagcctccagacccggggcttgccataactccagaacccactacagagattggacattccacagccctggagaagactagagctcctcatccagaccaggttcagactctgcatcgaagcctgactgaagtcacaggtccacctacaaagttagaatcttcgcaggattcattggtgcagtctgaaactgcaccagaggaacagaaggcctccacaagcaccaacatatgtgagctctgcacctgcggagatgagactctgtcatgtgttggtctcagcccaaagcagaggctccgccaagtgcctgtgccagagcccgacacctacaatggcatcttcaccaccttaaatttccaaggaaactatatttcataccttgatggaaatgtatggaaagcatacagttggaccgagaaactaattctcagtgaaaattatttgactgaattacctaaggattcatttgaaggcctgctatacctccagtatttaattctcaatcgcaatcctctgactactgtcgaagatccatatctctttgaactgccggcattaaaatatctagacatgggaacaacacacatcacacttacaacacttaagaacattctcacgatgactgttgaactggaaaaactgatcttacctagccatatggcctgctgcctctgccaatttaaaaatagcattgaggctgtctgcaagacagtcaagctgcattgcaacactgcatgtctgactaacagcatacattgtcctgaagaagcatctgtagggaatccagaaggagcgttcatgaagatgttacaagcccggaagcagcacatgagcactcagctgactattgagtcggaggcgccctcagacagcagtggcatcaacttgtcaggctttgggggtgatcagcttgaaattcagctaaccgagcagctacggtccctcatccccaacgaggatgtgagaaagttcatgtctcatgttatccggaccttgaaaatggaatgttcagaaacacatgtgcaagggagctgtgccaagctcatgttgcgaacaggcctcctgatgaagcttctcagcgagcagcaggaagcaaaggcattgaatgtagaatgggatacggaccaacaaaaaacaaattatattaatgagaacatggaacagaatgaacagaaagagcagaagtcaagtgagctcatgaaagaagttccaggagatgactataagaacaaactcatcttcgcaatatctgtgactgtaatactaataattttgattataattttttgtcttatagaggtgaattcacataaaagggcatcagaaaaatacaaagacaacccatcaatatcaggagcctgagcatgagttaaagcatgtggatg

SEQ ID NO: 3985 - DNA, 4694 bp, Homo sapiens
cagacactgcgcggttccctcggagcagcaagctaaagaaagcccccagtgccggcgaggaaggaggcggcggggaaagatgcgcggcgttggctggcagatgctgtccctgtcgctggggttagtgctggcgatcctgaacaaggtggcaccgcaggcgtgcccggcgcagtgctcttgctcgggcagcacagtggactgtcacgggctggcgctgcgcagcgtgcccaggaatatcccccgcaacaccgagagactggatttaaatggaaataacatcacaagaattacgaagacagattttgctggtcttagacatctaagagttcttcagcttatggagaataagattagcaccattgaaagaggagcattccaggatcttaaagaactagagagactgcgtttaaacagaaatcaccttcagctgtttcctgagttgctgtttcttgggactgcgaagctatacaggcttgatctcagtgaaaaccaaattcaggcaatcccaaggaaagctttccgtggggcagttgacataaaaaatttgcaactggattacaaccagatcagctgtattgaagatggggcattcagggctctccgggacctggaagtgctcactctcaacaataacaacattactagactttctgtggcaagtttcaaccatatgcctaaacttaggacttttcgactgcattcaaacaacctgtattgtgactgccacctggcctggctctccgactggcttcgccaaaggcctcgggttggtctgtacactcagtgtatgggcccctcccacctgagaggccataatgtagccgaggttcaaaaacgagaatttgtctgcagtggtcaccagtcatttatggctccttcttgtagtgttttgcactgccctgccgcctgtacctgtagcaacaatatcgtagactgtcgtgggaaaggtctcactgagatccccacaaatcttccagagaccatcacagaaatacgtttggaacagaacacaatcaaagtcatccctcctggagctttctcaccatataaaaagcttagacgaattgacctgagcaataatcagatctctgaacttgcaccagatgctttccaaggactacgctctctgaattcacttgtcctctatggaaataaaatcacagaactccccaaaagtttatttgaaggactgttttccttacagctcctattattgaatgccaacaagataaactgccttcgggtagatgcttttcaggatctccacaacttgaaccttctctccctatatgacaacaagcttcagaccatcgccaaggggaccttttcacctcttcgggccattcaaactatgcatttggcccagaacccctttatttgtgactgccatctcaagtggctagcggattatctccataccaacccgattgagaccagtggtgcccgttgcaccagcccccgccgcctggcaaacaaaagaattggacagatcaaaagcaagaaattccgttgttcagctaaagaacagtatttcattccaggtacagaagattatcgatcaaaattaagtggagactgctttgcggatctggcttgccctgaaaagtgtcgctgtgaaggaaccacagtagattgctctaatcaaaagctcaacaaaatcccggagcacattccccagtacactgcagagttgcgtctcaataataatgaatttaccgtgttggaagccacaggaatctttaagaaacttcctcaattacgtaaaataaactttagcaacaataagatcacagatattgaggagggagcatttgaaggagcatctggtgtaaatgaaatacttcttacgagtaatcgtttggaaaatgtgcagcataagatgttcaagggattggaaagcctcaaaactttgatgttgagaagcaatcgaataacctgtgtggggaatgacagtttcataggactcagttctgtgcgtttgctttctttgtatgataatcaaattactacagttgcaccaggggcatttgatactctccattctttatctactctaaacctcttggccaatccttttaactgtaactgctacctggcttggttgggagagtggctgagaaagaagagaattgtcacgggaaatcctagatgtcaaaaaccatacttcctgaaagaaatacccatccaggatgtggccattcaggacttcacttgtgatgacggaaatgatgacaatagttgctccccactttctcgctgtcctactgaatgtacttgcttggatacagtcgtccgatgtagcaacaagggtttgaaggtcttgccgaaaggtattccaagagatgtcacagagttgtatctggatggaaaccaatttacactggttcccaaggaactctccaactacaaacatttaacacttatagacttaagtaacaacagaataagcacgctttctaatcagagcttcagcaacatgacccagctcctcaccttaattcttagttacaaccgtctgagatgtattcctcctcgcacctttgatggattaaagtctcttcgattactttctctacatggaaatgacatttctgttgtgcctgaaggtgctttcaatgatctttctgcattatcacatctagcaattggagccaaccctctttactgtgattgtaacatgcagtggttatccgactgggtgaagtcggaatataaggagcctggaattgctcgttgtgctggtcctggagaaatggcagataaacttttactcacaactccctccaaaaaatttacctgtcaaggtcctgtggatgtcaatattctagctaagtgtaacccctgcctatcaaatccgtgtaaaaatgatggcacatgtaatagtgatccagttgacttttaccgatgcacctgtccatatggtttcaaggggcaggactgtgatgtcccaattcatgcctgcatcagtaacccatgtaaacatggaggaacttgccacttaaaggaaggagaagaagatggattctggtgtatttgtgctgatggatttgaaggagaaaattgtgaagtcaacgttgatgattgtgaagataatgactgtgaaaataattctacatgtgtcgatggcattaataactacacatgcctttgcccacctgagtatacaggtgagttgtgtgaggagaagctggacttctgtgcccaggacctgaacccctgccagcacgattcaaagtgcatcctaactccaaagggattcaaatgtgactgcacaccagggtacgtaggtgaacactgcgacatcgattttgacgactgccaagacaacaagtgtaaaaacggagcccactgcacagatgcagtgaacggctatacgtgcatatgccccgaaggttacagtggcttgttctgtgagttttctccacccatggtcctccctcgtaccagcccctgtgataattttgattgtcagaatggagctcagtgtatcgtcagaataaatgagccaatatgtcagtgtttgcctggctatcagggagaaaagtgtgaaaaattggttagtgtgaattttataaacaaagagtcttatcttcagattccttcagccaaggttcggcctcagacgaacataacacttcagattgccacagatgaagacagcggaatcctcctgtataagggtgacaaagaccatatcgcggtagaactctatcgggggcgtgttcgtgccagctatgacaccggctctcatccagcttctgccatttacagtgtggagacaatcaatgatggaaacttccacattgtggaactacttgccttggatcagagtctctctttgtccgtggatggtgggaaccccaaaatcatcactaacttgtcaaagcagtccactctgaattttgactctccactctatgtaggaggcatgccagggaagagtaacgtggcatctctgcgccaggcccctgggcagaacggaaccagcttccacggctgcatccggaacctttacatcaacagtgagctgcaggacttccagaaggtgccgatgcaaacaggcattttgcctggctgtgagccatgccacaagaaggtgtgtgcccatggcacatgccagcccagcagccaggcaggcttcacctgcgagtgccaggaaggatggatggggcccctctgtgaccaacggaccaatgacccttgccttggaaataaatgcgtacatggcacctgcttgcccatcaatgcgttctcctacagctgtaagtgcttggagggccatggaggtgtcctctgtgatgaagaggaggatctgtttaacccatgccaggcgatcaagtgcaagcatgggaagtgcaggctttcaggtctggggcagccctactgtgaatgcagcagtggatacacgggggacagctgtgatcgagaaatctcttgtcgaggggaaaggataagagattattaccaaaagcagcagggctatgctgcttgccaaacaaccaagaaggtgtcccgattagagtgcagaggtgggtgtgcaggagggcagtgctgtggaccgctgaggagcaagcggcggaaatactctttcgaatgcactgacggctcctcctttgtggacgaggttgagaaagtggtgaagtgcggctgtacgaggtgtgtgtcctaaacacactcccggcagctctgtcttt

SEQ ID NO: 3986 - DNA, 1189 bp, Homo sapiens
ccttcgcaagccctcatttcaccaggcccccggcttggggcgccttccttccccatggcgggacacctggcttcagattttgccttctcgccccctccaggtggtggaggtgatgggccaggggggccggagccgggctgggttgatcctcggacctggctaagcttccaaggccctcctggagggccaggaatcgggccgggggttgggccaggctctgaggtgtgggggattcccccatgccccccgccgtatgagttctgtggggggatggcgtactgtgggccccaggttggagtggggctagtgccccaaggcggcttggagacctctcagcctgagggcgaagcaggagtcggggtggagagcaactccgatggggcctccccggagccctgcaccgtcacccctggtgccgtgaagctggagaaggagaagctggagcaaaacccggaggagtcccaggacatcaaagctctgcagaaagaactcgagcaatttgccaagctcctgaagcagaagaggatcaccctgggatatacacaggccgatgtggggctcaccctgggggttctatttgggaaggtattcagccaaacgaccatctgccgctttgaggctctgcagcttagcttcaagaacatgtgtaagctgcggcccttgctgcagaagtgggtggaggaagctgacaacaatgaaaatcttcaggagatatgcaaagcagaaaccctcgtgcaggcccgaaagagaaagcgaaccagtatcgagaaccgagtgagaggcaacctggagaatttgttcctgcagtgcccgaaacccacactgcagcagatcagccacatcgcccagcagcttgggctcgagaaggatgtggtccgagtgtggttctgtaaccggcgccagaagggcaagcgatcaagcagcgactatgcacaacgagaggattttgaggctgctgggtctcctttctcagggggaccagtgtcctttcctctggccccagggccccattttggtaccccaggctatgggagccctcacttcactgcactgtactcctcggtccctttccctgagggggaagcctttccccctgtctctgtcaccactctgggctctcccatgcattcaaactgaggtgcctgcccttctaggaatgggggacagggggaggggaggagctagggaa

SEQ ID NO: 3987 - DNA, 2206 bp, Homo sapiens
atttcattcctcgctccccacaggtccctctccccaaaatattcccatcttgtcctagcccatcccccagactatctcaaggaccagctgtccccacgcccccgacctccactaggcctgtgccacccgctgcctgcaggaagacgcccggtcccgggccgggttagccccatgggaacggggttcggtccgagcccggtgggaggctcccggagcgcagcctgggcccagcccaccccgcgccggcggccatggcaggcaccctggacctggacaagggctgcacggtggaggagctgctccgcgggtgcatcgaagccttcgatgactccgggaaggtgcgggacccgcagctggtgcgcatgttcctcatgatgcacccctggtacatcccctcctctcagctggcggccaagctgctccacatctaccaacaatcccggaaggacaactccaattccctgcaggtgaaaacgtgccacctggtcaggtactggatctccgccttcccagcggagtttgacttgaacccggagttggctgagcagatcaaggagctgaaggctctgctagaccaagaagggaaccgacggcacagcagcctaatcgacatagacagcgtccctacctacaagtggaagcggcaggtgactcagcggaaccctgtgggacagaaaaagcgcaagatgtccctgttgtttgaccacctggagcccatggagctggcggagcatctcacctacttggagtatcgctccttctgcaagatcctgtttcaggactatcacagtttcgtgactcatggctgcactgtggacaaccccgtcctggagcggttcatctccctcttcaacagcgtctcacagtgggtgcagctcatgatcctcagcaaacccacagccccgcagcgggccctggtcatcacacactttgtccacgtggcggagaagctgctacagctgcagaacttcaacacgctgatggcagtggtcgggggcctgagccacagctccatctcccgcctcaaggagacccacagccacgttagccctgagaccatcaagctctgggagggtctcacggaactagtgacggcgacaggcaactatggcaactaccggcgtcggctggcagcctgtgtgggcttccgcttcccgatcctgggtgtgcacctcaaggacctggtggccctgcagctggcactgcctgactggctggacccagcccggacccggctcaacggggccaagatgaagcagctctttagcatcctggaggagctggccatggtgaccagcctgcggccaccagtacaggccaaccccgacctgctgagcctgctcacggtgtctctggatcagtatcagacggaggatgagctgtaccagctgtccctgcagcgggagccgcgctccaagtcctcgccaaccagccccacgagttgcaccccaccaccccggcccccggtactggaggagtggacctcggctgccaaacccaagctggatcaggccctcgtggtggagcacatcgagaagatggtggagtctgtgttccggaactttgacgtcgatggggatggccacatctcacaggaagaattccagatcatccgtgggaacttcccttacctcagcgcctttggggacctcgaccagaaccaggatggctgcatcagcagggaggagatggtttcctatttcctgcgctccagctctgtgttgggggggcgcatgggcttcgtacacaacttccaggagagcaactccttgcgccccgtcgcctgccgccactgcaaagccctgatcctgggcatctacaagcagggcctcaaatgccgagcctgtggagtgaactgccacaagcagtgcaaggatcgcctgtcagttgagtgtcggcgcagggcccagagtgtgagcctggaggggtctgcaccctcaccctcacccatgcacagccaccatcaccgcgccttcagcttctctctgccccgccctggcaggcgaggctccaggcctccagagatccgtgaggaggaggtacagacggtggaggatggggtgtttgacatccacttgtaatagatgctgtggttggatcaaggactcattcctgccttggagaaaatacttcaaccagagcagggagcctgggggtgtcggggcaggaggctggggatgggggtgggatatgagggtggcatgca

SEQ ID NO: 3988 - DNA, 1189 bp, Homo sapiens
ccttcgcaagccctcatttcaccaggcccccggcttggggcgccttccttccccatggcgggacacctggcttcggatttcgccttctcgccccctccaggtggtggaggtgatgggccaggggggccggagccgggctgggttgatcctcggacctggctaagcttccaaggccctcctggagggccaggaatcgggccgggggttgggccaggctctgaggtgtgggggattcccccatgccccccgccgtatgagttctgtggggggatggcgtactgtgggccccaggttggagtggggctagtgccccaaggcggcttggagacctctcagcctgagggcgaagcaggagtcggggtggagagcaactccgatggggcctccccggagccctgcaccgtcacccctggtgccgtgaagctggagaaggagaagctggagcaaaacccggaggagtcccaggacatcaaagctctgcagaaagaactcgagcaatttgccaagctcctgaagcagaagaggatcaccctgggatatacacaggccgatgtggggctcaccctgggggttctatttgggaaggtattcagccaaacgaccatctgccgctttgaggctctgcagcttagcttcaagaacatgtgtaagctgcggcccttgctgcagaagtgggtggaggaagctgacaacaatgaaaatcttcaggagatatgcaaagcagaaaccctcgtgcaggcccgaaagagaaagcgaaccagtatcgagaaccgagtgagaggcaacctggagaatttgttcctgcagtgcccgaaacccacactgcagcagatcagccacatcgcccagcagcttgggctcgagaaggatgtggtccgagtgtggttctgtaaccggcgccagaagggcaagcgatcaagcagcgactatgcacaacgagaggattttgaggctgctgggtctcctttctcagggggaccagtgtcctttcctctggccccagggccccattttggtaccccaggctatgggagccctcacttcactgcactgtactcctcggtccctttccctgagggggaagcctttccccctgtctccgtcaccactctgggctctcccatgcattcaaactgaggtgcctgcccttctaggaatgggggacagggggaggggaggagctagggaa

SEQ ID NO: 3989 - DNA, 5782 bp, Homo sapiens
cgtcgagaacggaggacaccggcggtccagggtcctgggcagtcgcgccagagctgagcggagggcgcggcgcgagaacgaatctttgtgacattctctctcagcattctttatcccctgtttgctgaagacttcgaccaaagctggtcttagctgttggcattctcctgagaaaaggatagcttcagaaatcagaaaaacatttgggaggtgtctagcccagtggaccttctgaagagcaatgctaagaagacgtttggtttaaagaattaaaaggaagaacaacttaagagcttcttcaaagttccccgcatgaaaattacttaaacgttgcacacaacgtttcacaaaatcttttgtgaaagaagaaaaggaaattcagtgtgtgagtctcagcaggagttaagctaatgcagcttaaaataatgccgaaaaagaagcgcttatctgcgggcagagtgcccctgattctcttcctgtgccagatgattagtgcactggaagtacctcttgatccaaaacttcttgaagacttggtacagcctccaaccatcacccaacagtctccaaaagattacattattgaccctcgggagaatattgtaatccagtgtgaagccaaagggaaaccgcccccaagcttttcctggacccgtaatgggactcattttgacatcgataaagaccctctggtcaccatgaagcctggcacaggaacgctcataattaacatcatgagcgaagggaaagctgagacctatgaaggagtctatcagtgtacagcaaggaacgaacgcggagctgcagtttctaataacattgttgtccgcccatccagatcaccattgtggaccaaagaaaaacttgaaccaatcacacttcaaagtggtcagtctttagtacttccctgcagacccccaattggattaccaccacctataatattttggatggataattcctttcaaagacttccacaaagtgagagagtttctcaaggtttgaatggggacctttatttttccaatgtcctcccagaggacacccgcgaagactatatctgttatgctagatttaatcatactcaaaccatacagcagaagcaacctatttctgtgaaggtgatttcagctaaatcaagtagagagaggccaccaacatttttaactccagaaggcaatgcaagtaacaaagaggaattaagaggaaatgtgctttcactggagtgcattgcagaaggactgcctaccccaattatttactgggcaaaggaagatggaatgctacccaaaaacaggacagtttataagaactttgagaaaaccttgcagatcattcatgtttcagaagcagactctggaaattaccaatgtatagcaaaaaatgcattaggagccatccaccataccatttctgttagagttaaagcggctccatactggatcacagcccctcaaaatcttgtgctgtccccaggagaggatgggaccttgatctgcagagctaatggcaaccccaaacccagaattagctggttaacaaatggagtcccaatagaaattgcccctgatgaccccagcagaaaaatagatggcgataccattattttttcaaatgttcaagaaagatcaagtgcagtatatcagtgcaatgcctctaatgaatatggatatttactggcaaacgcatttgtaaatgtgctggctgagccaccacgaatcctcacacctgcaaacacactctaccaggtcattgcaaacaggcctgctttactagactgtgccttctttgggtctcctctcccaaccatcgagtggtttaaaggagctaaaggaagtgctcttcatgaagatatttatgttttacatgaaaatggaactttggaaattcctgtggcccaaaaggacagtacaggaacttatacgtgtgttgcaaggaataaattagggatggcaaagaatgaagttcacttagaaatcaaagatgctacatggatcgttaaacagcccgaatatgcagttgtgcaaagagggagcatggtgtcctttgaatgcaaagtgaaacatgatcacaccttatccctcactgtcctgtggctgaaggacaacagggaactgcccagtgatgaaaggttcactgttgacaaggatcatctagtggtagctgatgtcagtgacgatgacagcgggacctacacgtgtgtggccaacaccactctggacagcgtctccgccagcgctgtgcttagcgttgttgctcctactccaactccagctcccgtttacgatgtcccaaatcctccctttgacttagaactgacagatcaacttgacaaaagtgttcagctgtcatggaccccaggcgatgacaacaatagccccattacaaaattcatcatcgaatatgaagatgcaatgcacaagccagggctgtggcaccaccaaactgaagtttctggaacacagaccacagcccagctgaagctgtctccttacgtgaactactccttccgcgtgatggcagtgaacagcattgggaagagcttgcccagcgaggcctctgagcagtatttgacgaaagcctcagaaccagataaaaaccccacagctgtggaaggactgggatcagagcctgataatttggtgattacgtggaagcccttgaatggtttcgaatctaatgggccaggccttcagtacaaagttagctggcgccagaaagatggtgatgatgaatggacatctgtggttgtggcaaatgtatccaaatatattgtctcaggcacgccaacctttgttccatacctgatcaaagttcaggccctgaatgacatggggtttgcccccgagccagctgtagtcatgggacattctggagaagacctcccaatggtggctcctgggaacgtgcgtgtgaatgtggtgaacagtaccttagccgaggtgcactgggacccagtacctctgaaaagcatccgaggacacctacaaggctatcggatttactattggaagacccagagttcatctaaaagaaacagacgtcacattgagaaaaagatcctcaccttccaaggcagcaagactcatggcatgttgccggggctagagccctttagccactacacactgaatgtccgagtggtcaatgggaaaggggagggcccagccagccctgacagagtctttaatactccagaaggagtccccagtgctccctcgtctttgaagattgtgaatccaacactggactctctcactttggaatgggatccaccgagccacccgaatggcattttgacagagtacaccttaaagtatcagccaattaacagcacacatgaattaggccctctggtagatttgaaaattcctgccaacaagacacggtggactttaaaaaatttaaatttcagcactcgatataagttttatttctatgcacaaacatcagcaggatcaggaagtcaaattacagaggaagcagtaacaactgtggatgaagctggtattcttccacctgatgtaggtgcaggcaaagcgatggcaagccggcaggtggatattgcaactcagggctggttcattggtctgatgtgtgctgttgctctccttatcttaattttgctgattgtttgcttcatcagaagaaacaagggtggtaaatatccagttaaagaaaaggaagatgcccatgctgaccctgaaatccagcctatgaaggaagatgatgggacatttggagaatacagtgatgcagaagaccacaagcctttgaaaaaaggaagtcgaactccttcagacaggactgtgaaaaaagaagatagtgacgacagcctagttgactatggagaaggggttaatggccagttcaatgaggatggctcctttattggacaatacagtggtaagaaagagaaagagccggctgaaggaaacgaaagctcagaggcaccttctcctgtcaacgccatgaattcctttgtttaatttttaagctctttgccaatattccatttctctagaatgtttatcctaagcacttgtttgtcagccctctcatactatgaacatatgggtagagagtatattttctgctgtatgttagtattatgagaatagttacagcaaaaacataactcagtcaaatgatatgttaatatgaactggaatgcaaagtgcatactttttcattcaaaatgggtattcttgatttcctcagaactgataaaaaataatgcaacatcaccaacagatcctgttatttcctctgcaggatacagttcaatatgatgcatgaaaaatgctccacatttaaaggacatacccgtgtatgttatgaaaacatggtttgatactttgtttatactaccctcagctgaacccctatatatgaattccgttttcattgtcaagagtgttactgtagtattctctagaacttcaatgtctttgtggacattgttgtgaaattggtgactatgtatagctgtcgttagtctttttgggagactgttaggaacagtttgtacagtatatacttgctaaatgagttcattatgacagtcacattgctgatgcttactgagaactattacctactcttggctcctgttactccgtaggcttcttaatcttccaggcattacagcagcacagtgttctactttttacatcatttctatgttcggttgtttttaggcataaacaatgtgtattgcagtgcatttcggcatttgtgccatactgaaagaatcaaaaacaaatcatccaaattaaatttcaaacattatttcagagaacacagggcaagacacatacagtgccttcagatattaagcattccacaacatcgtgcattctgtatcagctggtccagtccattctgggtcctagattactgtcattgtctaaaagtaacttttaaaaagcagagttcatgaaaactgcaatgctgggaaaagaaggaaacatgaaaataaaaataagacagtttattagaaatagcatttcctcataagcataaaaagaaaatctttgttgccaactgaagcacatgatgattttgtggtcctttatggtttctattacatgcagtaagaaagatgtcaacatgctagaaaattaattttaaaactaagttattccaacactaaaagcatacaacagcatgccaacagtaatatattattctccaagactttacctatgtaagtgttcaaaactctgcagcattaaacaacgtgtatgcaaattgttatggatacatttcagaatctaagaaatcaggcaagtgcttaaaaggccaacggtccaagggattacatctgcagtttaaaaagtaaatatatattctatcgtattcataaacaatatctatcaaatgggttacctccaaatatgaaaatctataacaacctatggttgaaggaatgctcagtttcatttgccaataaattggtttctcataacttgcatcaagtttaattttaagtaaagctttttatatgtagatattttgttgaatttgtaaatacacttaaaatgtagatgctatatgcttataggtgttacatacaaataaacatgcaatgtttatgttgtactgtataagaggtaagctaattaatgcagtgaatgggattggaaagcatctacttaaatatctattgggttcccccctccccccaccttttttgctgtgaaactgaaatagtgaacttttctacgtattgacagcagatttttcgatgaaatcttcagagctttgcctatggggcaca

SEQ ID NO: 3990 - DNA, 2030 bp, Homo sapiens
tgtcaagtgacaagcttttaatgtcagaatggctcacctaaagcgactagtaaaattacacattaaaagacattaccataaaaagttctggaagcttggtgcagtaatttttttctttataatagttttggttttaatgcaaagagaagtaagtgttcaatattccaaagaggaatcaaggatggaaaggaacatgaaaaacaaaaacaagatgttggatttaatgctagaagctgtaaacaatattaaggatgccatgccaaaaatgcaaataggagcacctgtcaggcaaaacattgatgctggtgagagaccttgtttgcaaggatattatacagcagcagaattgaagcctgtccttgaccgtccacctcaggattcaaatgcacctggtgcttctggtaaagcattcaagacaaccaatttaagtgttgaagagcaaaaggaaaaggaacgtggggaagctaaacactgctttaatgctttcgcaagtgacaggatttctttgcaccgagatcttggaccagacactcgacctcctgaatgtattgaacaaaaatttaagcgctgccctcccctgcccaccaccagtgtcataatagtttttcataatgaagcgtggtccacgttgcttagaactgtccacagtgtgctctattcttcacctgcaatactgctgaaggaaatcattttggtggatgatgctagtgtagatgagtacttacatgataaactagatgaatatgtaaaacaattttctatagtaaaaatagtcagacaaagagaaagaaaaggtctgatcactgctcggttgctaggagcaacagtcgcaacagctgaaacgctcacatttttagatgctcactgtgagtgtttctatggttggctagaacctctgttggccagaatagctgagaactacacggctgtcgtaagtccagatattgcatccatagatctgaacacgtttgaattcaacaaaccttctccttatggaagtaaccataaccgtggaaattttgactggagtctttcatttggctgggagtcgcttcctgatcatgagaagcaaagaaggaaagatgaaacctacccaattaaaacacccacttttgcaggaggacttttttccatatcaaaagaatattttgagtatattggaagctatgatgaagaaatggaaatctggggaggtgaaaatatagaaatgtctttcagagtatggcaatgtggtgggcagttggagattatgccttgctctgttgttggacatgtttttcgcagcaaaagccctcatagctttccaaaaggcactcaggtgattgctagaaaccaagttcgccttgcagaagtctggatggatgaatacaaggaaatattttataggagaaatacagatgcagcaaaaattgttaaacaaaaagcatttggtgatctttcaaaaagatttgaaataaaacaccgccttcagtgtaaaaattttacatggtatctgaacaacatttatccagaggtgtatgtgccagaccttaatcctgttatatctggatacattaaaagcgttggtcagcctctatgtctggatgttggagaaaacaatcaaggaggcaaaccattaattatgtatacatgtcatggacttgggggaaaccagtactttgaatactctgctcaacatgaaattcggcacaacatccagaaggaattatgtcttcatgctgctcaaggtctcgttcagctgaaggcatgtacctacaaaggtcacaagacagttgtcactggagagcagatatgggagatccagaaggatcaacttctatacaatccattcttaaaaatgtgcctttcagcaaatggagagcatccaagtttagtgtcatgcaacccatcagatccactccaaaaatggatacttagccaaaatgattaagtgttccttaaaattaagttgaaaaaggaaatattctttctcataaaactgtgactaggcatacactgtagtttttgaaaattatgcaaaagcagctaaa

SEQ ID NO: 3991 - DNA, 4821 bp, Homo sapiens
tacgtgggcatttttggtcgaagagagctgaagtaatgagaagacatcatggaggcccagtcccacagctccacgaccactgaaaagaaaaaagttgagaattccatagtgaagtgctccactcgaacagatgtgagcgagaaagccgttgcctccagcaccacttctaatgaggatgaaagtcctggacagacttatcacagagagagaagaaacgcaatcactatgcagccacagaatgtccaggggctcagcaaagtcagtgaggaaccttcaacatcgagtgacgagagggcctcattgatcaagaaagagatccatgggtccctgccacacgtggcggagccctctgtgccgtaccgcgggacggtgtttgccatggaccccaggaatggttacatggagccccactaccaccctcctcatcttttccctgccttccatcctcctgtaccaattgatgccagacatcatgagggccgttaccattacgatccatctccgattcctccattgcatatgacttccgccttatctagtagccctacgtatccggacctgcccttcattaggatctccccacaccggaaccccgctgctgcttccgagtctcccttcagccctccacatccctacattaatccctacatggactatatccgctccttgcacagcagcccatcgctctccatgatctcagcaacccgtgggctgagccctacagatgcgccccatgcaggagtcagcccagcagaatactatcatcagatggccctgctaactggccagcgcagcccctatgcagacattattccctcagctgccaccgccggcacgggggccatccacatggaatatcttcatgctatggatagcaccagattctccagccccaggctgtcagccaggccgagccgaaaacgtacactgtccatatcaccactctccgatcatagctttgaccttcagaccatgataaggacgtctcccaactccttggtcacgattctcaataattcccgtagcagctcttcagcaagtggctcctatggtcacttatctgcaagtgcaatcagccctgccttgagcttcacctactcttccgcgcccgtctctctccacatgcatcagcagatcctaagccgacaacagagcttaggttcagcctttggacacagccctccactcatccaccctgccccaacttttccaacacagaggcctattccagggatccctacggttctgaaccccgtccaggtcagctccggcccttctgagtcctcacagaacaagcccacgagtgagtctgcagtgagcagcactggtgacccgatgcacaacaagaggtccaagatcaaacccgatgaagacctccccagcccaggggctcgggggcagcaggaacagcccgaaggaacaacccttgtcaaggaggaaggggacaaagatgaaagcaaacaggagcctgaagtcatctatgagacaaactgccactgggaaggctgcgcgagggagttcgacacccaagagcagcttgtgcaccatataaataacgaccatattcatggagagaagaaggagttcgtgtgcaggtggctggactgctcaagagagcagaaacccttcaaagcccagtatatgttggtagtgcatatgagaagacacacgggcgagaagcctcacaaatgcacttttgaaggttgcacaaaggcctactcgagactagaaaacttgaaaacacacttgagatctcacactggagagaaaccatacgtctgtgagcacgaaggttgcaacaaggctttctcaaatgcctctgatcgcgccaaacaccaaaacagaacgcattccaatgagaaaccatatgtgtgcaaaatcccaggctgcactaagcgttacacagacccaagctccctccggaaacatgtgaagacagtgcatggcccagaggctcatgtcaccaagaagcagcgaggggacatccatcctcggccgccacccccgagagattccggcagccattcacagtccaggtcgcctggccgaccgactcagggagcccttggtgagcagcaggacctcagcaacactacctcaaagcgggaagaatgcctccaggtgaaaaccgtcaaggcagagaagccaatgacatctcagccaagccctggtggtcagtcttcatgcagcagccaacagtcccccatcagcaactattccaacagtgggctcgagcttcctctgaccgatggaggtagtataggagacctcagtgccatcgatgaaaccccaatcatggactcaaccatttccactgcaaccacagcccttgctttgcaagccaggagaaacccggcagggaccaaatggatggagcacgtaaaactagaaaggctaaaacaagtgaatggaatgtttccgcgactgaaccccattctaccccctaaagcccctgcggtctctcctctcataggaaatggcacacagtccaacaacacctgcagcttgggtgggcccatgacgcttctcccgggcagaagcgacctctctggggtggacgtcactatgctgaacatgctcaacagaagggacagcagcgccagcaccatcagctcggcctacctgagcagccgccgctcctcagggatctcgccctgcttctccagccgccgctccagcgaggcgtcacaggccgagggccggccgcagaacgtgagcgtggccgactcctacgaccccatctccaccgacgcctcgcgccgctccagcgaagccagccagagcgacggcctgcccagcctgctcagcctcacgcccgcccagcagtaccgcctcaaggccaagtacgcggctgccacaggagggccgccgccgacgcccctgcccaacatggagaggatgagcctgaagacgcgcctggcgctgctcggggatgccctcgagcctggcgtggccctgcctccagttcatgccccgaggaggtgcagcgacgggggagcccacggctacgggcggcgccacctgcagccgcacgatgcgctgggccacggcgtgaggagggccagcgacccggtgcggacaggctccgagggcctggccctgcctcgtgtgccgcgcttcagcagcctcagcagctgcaaccccccggcgatggccacgtccgcggagaagcgcagtctcgtgcttcagaattacacgcggcccgagggcggccagtcccgaaacttccactcgtccccctgtcctcccagcatcaccgagaacgtcaccctggagtccctgaccatggacgctgatgccaacctgaacgatgaggatttcctgccggacgacgtggtgcagtatttaaattcccagaaccaagcagggtacgagcagcacttccccagcgccctcccggacgacagcaaagtgccccacgggcccggtgactttgacgcgcccgggctgccagacagccacgctggccagcagttccatgccctcgagcagccctgccccgagggcagcaaaaccgacctgcccattcagtggaacgaagtcagctccggaagcgccgacctgtcctcctccaagctcaagtgtgggccgcggcccgctgtgccgcagactcgcgcctttgggttctgcaacggcatggtcgtccacccgcagaaccccttgaggagcgggcctgctgggggctatcagaccctcggggagaacagcaacccctacggtggcccagagcacttgatgctccacaacagccccggaagtggcaccagtggaaacgccttccatgaacagccctgtaaggccccgcagtatgggaactgtctcaacaggcagccagtggcccctggtgcactcgacggtgcctgtggtgccgggattcaagcctcaaagctgaagagcacccccatgcaagggagcgggggccagctgaatttcggcctgccggtagcgccaaatgagtcagctggcagcatggtgaatggcatgcagaaccaggacccagtgggacaggggtacctggctcaccagctcctcggcgacagcatgcagcacccgggggcaggccgccccggtcagcagatgcttgggcagattagtgctacctcacacatcaacatctaccaagggccagagagctgcctgccaggggctcacggcatgggcagccagccgtcaagcttggcagttgtcaggggctaccagccatgtgccagctttgggggcagcaggcgccaggctatgccgagggacagccttgctctgcagtcaggacagctcagtgacacaagtcagacctgcagggtgaatggtatcaagatggagatgaaagggcagccccatccgctgtgctctaatctgcagaattactctggtcagttctatgaccaaaccgtgggcttcagtcagcaagacacgaaagctggttcattctctatttcagacgccagctgcctgctacaggggaccagcgccaaaaactctgagttactttccccaggtgctaatcaggtgacaagcacagtggacagcctcgacagccatgacctggaaggggtacagattgacttcgatgccatcatagacgatggggaccactccagcctgatgtcgggggccctgagcccaagtatcattcagaacctttcccatagctcctcccgcctcaccacgcctcgggcgtccctcccattcccagcgctgtccatgagcaccaccaacatggctatcggggacatgagttctttgctgacctccctagcggaagaaagcaaattccttgcagttatgcaataggctttaggaaaaaaagactgcaaccaacgg

SEQ ID NO: 3992 - DNA, 3594 bp, Homo sapiens
tgcacagaggttctccactttgttttctgaactcgcggtcaggatggttttctctgtcaggcagtgtggccatgttggcagaactgaagaagttttactgacgttcaagatattccttgtcatcatttgtcttcatgtcgttctggtaacatccctggaagaagatactgataattccagtttgtcaccaccacctgaggttgaaacaacaagcctcaatgatgttactttaagcttactcccttcaaacgaaacaggcgtcaaaccccagagaaatatctgcaatttgtcatctatttgcaatgactcagcattttttagaggtgagatcatgtttcaatatgataaagaaagcactgttccccagaatcaacatataacgaatggcaccttaactggagtcctgtctctaagtgaattaaaacgctcagagctcaacaaaaccctgcaaaccctaagtgagacttactttataatgtgtgctacagcagaggcccaaagcacattaaattgtacattcacaataaaactgaataatacaatgaatgcatgtgctgtaatagctgctttggaaagagtaaagattcgaccaatggaacactgctgctgttctgtcaggataccctgcccttcctccccagaagagttggaaaagcttcagtgtgacctgcaggatcccattgtctgtcttgctgaccatccacgtggcccaccattttcttccagccaatccatcccagtggtgcctcgggccactgtgctttcccaggtccccaaagctacctcttttgctgagcctccagattattcacctgtgacccacaatgttccctctccaataggggagattcaacccctttcaccccagccttcagctcccatagcttccagccctgccattgacatgcccccacagtctgaaacgatctcttcccctatgccccaaacccatgtctccggcaccccacctcctgtgaaagcctcattttcctctcccaccgtgtctgcccctgcgaatgtcaacactaccagcgcacctcctgtccagacagacatcgtcaacaccagcagtatttctgatcttgagaaccaagtgttgcagatggagaaggctctgtccttgggcagcctggagcctaacctcgcaggagaaatgatcaaccaagtcagcagactccttcattccccgcctgacatgctggcccctctggctcaaagattgctgaaagtagtggatgacattggcctacagctgaacttttcaaacacgactataagtctaacctccccttctttggctctggctgtgatcagagtgaatgccagtagtttcaacacaactacctttgtggcccaagaccctgcaaatcttcaggatgagttaacagtgagatgtgtattttgggacttgggcagaaatggtggcagaggaggctggtcagacaatggctgctctgtcaaagacaggagattgaatgaaaccatctgtacctgtagccatctaacaagcttcggcgttctgctggacctatctaggacatctgtgctgcctgctcaaatgatggctctgacgttcattacatatattggttgtgggctttcatcaatttttctgtcagtgactcttgtaacctacatagcttttgaaaagatccggagggattacccttccaaaatcctcatccagctgtgtgctgctctgcttctgctgaacctggtcttcctcctggactcgtggattgctctgtataagatgcaaggcctctgcatctcagtggctgtatttcttcattattttctcttggtctcattcacatggatgggcctagaagcattccatatgtacctggcccttgtcaaagtatttaatacttacatccgaaaatacatccttaaattctgcattgtcggttggggggtaccagctgtggttgtgaccatcatcctgactatatccccagataactatgggcttggatcctatgggaaattccccaatggttcaccggatgacttctgctggatcaacaacaatgcagtattctacattacggtggtgggatatttctgtgtgatatttttgctgaacgtcagcatgttcattgtggtcctggttcagctctgtcgaattaaaaagaagaagcaactgggagcccagcgaaaaaccagtattcaagacctcaggagtatcgctggccttacatttttactgggaataacttggggctttgccttctttgcctggggaccagttaacgtgaccttcatgtatctgtttgccatctttaataccttacaaggatttttcatattcatcttttactgtgtggccaaagaaaatgtcaggaagcaatggaggcggtatctttgttgtggaaagttacggctggctgaaaattctgactggagtaaaactgctactaatggtttaaagaagcagactgtaaaccaaggagtgtccagctcttcaaattccttacagtcaagcagtaactccactaactccaccacactgctagtgaataatgattgctcagtacacgcaagcgggaatggaaatgcttctacagagaggaatggggtctcttttagtgttcagaatggagatgtgtgccttcacgatttcactggaaaacagcacatgtttaacgagaaggaagattcctgcaatgggaaaggccgtatggctctcagaaggacttcaaagcggggaagcttacactttattgagcaaatgtgattcctttcttctaaaatcaaagcatgatgcttgacagtgtgaaatgtccaattttaccttttacacaatgtgagatgtatgaaaatcaactcattttattctcggcaacatctggagaagcataagctaattaagggcgatgattattattacaagaagaaaccaagacattacaccatggtttttagacatttctgatttggtttcttatctttcattttataagaaggttggttttaaacaatacactaagaatgactcctataaagaaaacaaaaaaaggtagtgaactttcagctaccttttaaagaggctaagttatctttgataacatcatataaagcaactgttgacttcagcctgttggtgagtttagttgtgcatgcctttgttgtatataagctaaattctagtgacccatgtgtcaaaaatcttacttctacatttttttgtatttattttctactgtgtaaatgtattcctttgtagaatcatggttgttttgtctcacgtgataattcagaaaatccttgctcgttccgcaaatcctaaagctccttttggagatgatataggatgtgaaatacagaaacctcagtgaaatcaagaaataatgatcccagccagactgagaaaatgtaagcagacagtgccacagttagctcatacagtgcctttgagcaagttaggaaaagatgcccccactgggcagacacagccctatgggctcatggtttgacaaacagagtggagagaccatattttagccccactcaccctcttgggtgcacgacctgtacagccaaacacagcatccaatatgaatacccatcccctgaccgcatccccagtag

SEQ ID NO: 3993 - DNA, 5746 bp, Homo sapiens
cgtcgagaacggaggacaccggcggtccagggtcctgggcagtcgcgccagagctgagcggagggcgcggcgcgagaacgaatctttgtgacattctctctcagcattctttatcccctgtttgctgaagacttcgaccaaagctggtcttagctgttggcattctcctgagaaaaggatagcttcagaaatcagaaaaacatttgggaggtgtctagcccagtggaccttctgaagagcaatgctaagaagacgtttggtttaaagaattaaaaggaagaacaacttaagagcttcttcaaagttccccgcatgaaaattacttaaacgttgcacacaacgtttcacaaaatcttttgtgaaagaagaaaaggaaattcagtgtgtgagtctcagcaggagttaagctaatgcagcttaaaataatgccgaaaaagaagcgcttatctgcgggcagagtgcccctgattctcttcctgtgccagatgattagtgcactggaagtacctcttgatccaaaacttcttgaagacttggtacagcctccaaccatcacccaacagtctccaaaagattacattattgaccctcgggagaatattgtaatccagtgtgaagccaaagggaaaccgcccccaagcttttcctggacccgtaatgggactcattttgacatcgataaagaccctctggtcaccatgaagcctggcacaggaacgctcataattaacatcatgagcgaagggaaagctgagacctatgaaggagtctatcagtgtacagcaaggaacgaacgcggagctgcagtttctaataacattgttgtccgcccatccagatcaccattgtggaccaaagaaaaacttgaaccaatcacacttcaaagtggtcagtctttagtacttccctgcagacccccaattggattaccaccacctataatattttggatggataattcctttcaaagacttccacaaagtgagagagtttctcaaggtttgaatggggacctttatttttccaatgtcctcccagaggacacccgcgaagactatatctgttatgctagatttaatcatactcaaaccatacagcagaagcaacctatttctgtgaaggtgatttcagctaaatcaagtagagagaggccaccaacatttttaactccagaaggcaatgcaagtaacaaagaggaattaagaggaaatgtgctttcactggagtgcattgcagaaggactgcctaccccaattatttactgggcaaaggaagatggaatgctacccaaaaacaggacagtttataagaactttgagaaaaccttgcagatcattcatgtttcagaagcagactctggaaattaccaatgtatagcaaaaaatgcattaggagccatccaccataccatttctgttagagttaaagcggctccatactggatcacagcccctcaaaatcttgtgctgtccccaggagaggatgggaccttgatctgcagagctaatggcaaccccaaacccagaattagctggttaacaaatggagtcccaatagaaattgcccctgatgaccccagcagaaaaatagatggcgataccattattttttcaaatgttcaagaaagatcaagtgcagtatatcagtgcaatgcctctaatgaatatggatatttactggcaaacgcatttgtaaatgtgctggctgagccaccacgaatcctcacacctgcaaacacactctaccaggtcattgcaaacaggcctgctttactagactgtgccttctttgggtctcctctcccaaccatcgagtggtttaaaggagctaaaggaagtgctcttcatgaagatatttatgttttacatgaaaatggaactttggaaattcctgtggcccaaaaggacagtacaggaacttatacgtgtgttgcaaggaataaattagggatggcaaagaatgaagttcacttagaaatcaaagatgctacatggatcgttaaacagcccgaatatgcagttgtgcaaagagggagcatggtgtcctttgaatgcaaagtgaaacatgatcacaccttatccctcactgtcctgtggctgaaggacaacagggaactgcccagtgatgaaaggttcactgttgacaaggatcatctagtggtagctgatgtcagtgacgatgacagcgggacctacacgtgtgtggccaacaccactctggacagcgtctccgccagcgctgtgcttagcgttgttgctcctactccaactccagctcccgtttacgatgtcccaaatcctccctttgacttagaactgacagatcaacttgacaaaagtgttcagctgtcatggaccccaggcgatgacaacaatagccccattacaaaattcatcatcgaatatgaagatgcaatgcacaagccagggctgtggcaccaccaaactgaagtttctggaacacagaccacagcccagctgaagctgtctccttacgtgaactactccttccgcgtgatggcagtgaacagcattgggaagagcttgcccagcgaggcctctgagcagtatttgacgaaagcctcagaaccagataaaaaccccacagctgtggaaggactgggatcagagcctgataatttggtgattacgtggaagcccttgaatggtttcgaatctaatgggccaggccttcagtacaaagttagctggcgccagaaagatggtgatgatgaatggacatctgtggttgtggcaaatgtatccaaatatattgtctcaggcacgccaacctttgttccatacctgatcaaagttcaggccctgaatgacatggggtttgcccccgagccagctgtagtcatgggacattctggagaagacctcccaatggtggctcctgggaacgtgcgtgtgaatgtggtgaacagtaccttagccgaggtgcactgggacccagtacctctgaaaagcatccgaggacacctacaaggctatcggatttactattggaagacccagagttcatctaaaagaaacagacgtcacattgagaaaaagatcctcaccttccaaggcagcaagactcatggcatgttgccggggctagagccctttagccactacacactgaatgtccgagtggtcaatgggaaaggggagggcccagccagccctgacagagtctttaatactccagaaggagtccccagtgctccctcgtctttgaagattgtgaatccaacactggactctctcactttggaatgggatccaccgagccacccgaatggcattttgacagagtacaccttaaagtatcagccaattaacagcacacatgaattaggccctctggtagatttgaaaattcctgccaacaagacacggtggactttaaaaaatttaaatttcagcactcgatataagttttatttctatgcacaaacatcagcaggatcaggaagtcaaattacagaggaagcagtaacaactgtggatgaagcgatggcaagccggcaggtggatattgcaactcagggctggttcattggtctgatgtgtgctgttgctctccttatcttaattttgctgattgtttgcttcatcagaagaaacaagggtggtaaatatccagttaaagaaaaggaagatgcccatgctgaccctgaaatccagcctatgaaggaagatgatgggacatttggagaatacagtgatgcagaagaccacaagcctttgaaaaaaggaagtcgaactccttcagacaggactgtgaaaaaagaagatagtgacgacagcctagttgactatggagaaggggttaatggccagttcaatgaggatggctcctttattggacaatacagtggtaagaaagagaaagagccggctgaaggaaacgaaagctcagaggcaccttctcctgtcaacgccatgaattcctttgtttaatttttaagctctttgccaatattccatttctctagaatgtttatcctaagcacttgtttgtcagccctctcatactatgaacatatgggtagagagtatattttctgctgtatgttagtattatgagaatagttacagcaaaaacataactcagtcaaatgatatgttaatatgaactggaatgcaaagtgcatactttttcattcaaaatgggtattcttgatttcctcagaactgataaaaaataatgcaacatcaccaacagatcctgttatttcctctgcaggatacagttcaatatgatgcatgaaaaatgctccacatttaaaggacatacccgtgtatgttatgaaaacatggtttgatactttgtttatactaccctcagctgaacccctatatatgaattccgttttcattgtcaagagtgttactgtagtattctctagaacttcaatgtctttgtggacattgttgtgaaattggtgactatgtatagctgtcgttagtctttttgggagactgttaggaacagtttgtacagtatatacttgctaaatgagttcattatgacagtcacattgctgatgcttactgagaactattacctactcttggctcctgttactccgtaggcttcttaatcttccaggcattacagcagcacagtgttctactttttacatcatttctatgttcggttgtttttaggcataaacaatgtgtattgcagtgcatttcggcatttgtgccatactgaaagaatcaaaaacaaatcatccaaattaaatttcaaacattatttcagagaacacagggcaagacacatacagtgccttcagatattaagcattccacaacatcgtgcattctgtatcagctggtccagtccattctgggtcctagattactgtcattgtctaaaagtaacttttaaaaagcagagttcatgaaaactgcaatgctgggaaaagaaggaaacatgaaaataaaaataagacagtttattagaaatagcatttcctcataagcataaaaagaaaatctttgttgccaactgaagcacatgatgattttgtggtcctttatggtttctattacatgcagtaagaaagatgtcaacatgctagaaaattaattttaaaactaagttattccaacactaaaagcatacaacagcatgccaacagtaatatattattctccaagactttacctatgtaagtgttcaaaactctgcagcattaaacaacgtgtatgcaaattgttatggatacatttcagaatctaagaaatcaggcaagtgcttaaaaggccaacggtccaagggattacatctgcagtttaaaaagtaaatatatattctatcgtattcataaacaatatctatcaaatgggttacctccaaatatgaaaatctataacaacctatggttgaaggaatgctcagtttcatttgccaataaattggtttctcataacttgcatcaagtttaattttaagtaaagctttttatatgtagatattttgttgaatttgtaaatacacttaaaatgtagatgctatatgcttataggtgttacatacaaataaacatgcaatgtttatgttgtactgtataagaggtaagctaattaatgcagtgaatgggattggaaagcatctacttaaatatctattgggttcccccctccccccaccttttttgctgtgaaactgaaatagtgaacttttctacgtattgacagcagatttttcgatgaaatcttcagagctttgcctatggggcaca

SEQ ID NO: 3994 - DNA, 3750 bp, Homo sapiens
tgcacagaggttctccactttgttttctgaactcgcggtcaggatggttttctctgtcaggcagtgtggccatgttggcagaactgaagaagttttactgacgttcaagatattccttgtcatcatttgtcttcatgtcgttctggtaacatccctggaagaagatactgataattccagtttgtcaccaccacctgaggttgaaacaacaagcctcaatgatgttactttaagcttactcccttcaaacgaaacagaaaaaactaaaatcactatagtaaaaaccttcaatgcatcaggcgtcaaaccccagagaaatatctgcaatttgtcatctatttgcaatgactcagcattttttagaggtgagatcatgtttcaatatgataaagaaagcactgttccccagaatcaacatataacgaatggcaccttaactggagtcctgtctctaagtgaattaaaacgctcagagctcaacaaaaccctgcaaaccctaagtgagacttactttataatgtgtgctacagcagaggcccaaagcacattaaattgtacattcacaataaaactgaataatacaatgaatgcatgtgctgtaatagctgctttggaaagagtaaagattcgaccaatggaacactgctgctgttctgtcaggataccctgcccttcctccccagaagagttggaaaagcttcagtgtgacctgcaggatcccattgtctgtcttgctgaccatccacgtggcccaccattttcttccagccaatccatcccagtggtgcctcgggccactgtgctttcccaggtccccaaagctacctcttttgctgagcctccagattattcacctgtgacccacaatgttccctctccaataggggagattcaacccctttcaccccagccttcagctcccatagcttccagccctgccattgacatgcccccacagtctgaaacgatctcttcccctatgccccaaacccatgtctccggcaccccacctcctgtgaaagcctcattttcctctcccaccgtgtctgcccctgcgaatgtcaacactaccagcgcacctcctgtccagacagacatcgtcaacaccagcagtatttctgatcttgagaaccaagtgttgcagatggagaaggctctgtccttgggcagcctggagcctaacctcgcaggagaaatgatcaaccaagtcagcagactccttcattccccgcctgacatgctggcccctctggctcaaagattgctgaaagtagtggatgacattggcctacagctgaacttttcaaacacgactataagtctaacctccccttctttggctctggctgtgatcagagtgaatgccagtagtttcaacacaactacctttgtggcccaagaccctgcaaatcttcaggtttctctggaaacccaagctcctgagaacagtattggcacaattactcttccttcatcgctgatgaataatttaccagctcatgacatggagctagcttccagggttcagttcaatttttttgaaacacctgctttgtttcaggatccttccctggagaacctctctctgatcagctacgtcatatcatcgagtgttgcaaacctgaccgtcaggaacttgacaagaaacgtgacagtcacattaaagcacatcaacccgagccaggatgagttaacagtgagatgtgtattttgggacttgggcagaaatggtggcagaggaggctggtcagacaatggctgctctgtcaaagacaggagattgaatgaaaccatctgtacctgtagccatctaacaagcttcggcgttctgctggacctatctaggacatctgtgctgcctgctcaaatgatggctctgacgttcattacatatattggttgtgggctttcatcaatttttctgtcagtgactcttgtaacctacatagcttttgaaaagatccggagggattacccttccaaaatcctcatccagctgtgtgctgctctgcttctgctgaacctggtcttcctcctggactcgtggattgctctgtataagatgcaaggcctctgcatctcagtggctgtatttcttcattattttctcttggtctcattcacatggatgggcctagaagcattccatatgtacctggcccttgtcaaagtatttaatacttacatccgaaaatacatccttaaattctgcattgtcggttggggggtaccagctgtggttgtgaccatcatcctgactatatccccagataactatgggcttggatcctatgggaaattccccaatggttcaccggatgacttctgctggatcaacaacaatgcagtattctacattacggtggtgggatatttctgtgtgatatttttgctgaacgtcagcatgttcattgtggtcctggttcagctctgtcgaattaaaaagaagaagcaactgggagcccagcgaaaaaccagtattcaagacctcaggagtatcgctggccttacatttttactgggaataacttggggctttgccttctttgcctggggaccagttaacgtgaccttcatgtatctgtttgccatctttaataccttacaaggatttttcatattcatcttttactgtgtggccaaagaaaatgtcaggaagcaatggaggcggtatctttgttgtggaaagttacggctggctgaaaattctggaaatgcttctacagagaggaatggggtctcttttagtgttcagaatggagatgtgtgccttcacgatttcactggaaaacagcacatgtttaacgagaaggaagattcctgcaatgggaaaggccgtatggctctcagaaggacttcaaagcggggaagcttacactttattgagcaaatgtgattcctttcttctaaaatcaaagcatgatgcttgacagtgtgaaatgtccaattttaccttttacacaatgtgagatgtatgaaaatcaactcattttattctcggcaacatctggagaagcataagctaattaagggcgatgattattattacaagaagaaaccaagacattacaccatggtttttagacatttctgatttggtttcttatctttcattttataagaaggttggttttaaacaatacactaagaatgactcctataaagaaaacaaaaaaaggtagtgaactttcagctaccttttaaagaggctaagttatctttgataacatcatataaagcaactgttgacttcagcctgttggtgagtttagttgtgcatgcctttgttgtatataagctaaattctagtgacccatgtgtcaaaaatcttacttctacatttttttgtatttattttctactgtgtaaatgtattcctttgtagaatcatggttgttttgtctcacgtgataattcagaaaatccttgctcgttccgcaaatcctaaagctccttttggagatgatataggatgtgaaatacagaaacctcagtgaaatcaagaaataatgatcccagccagactgagaaaatgtaagcagacagtgccacagttagctcatacagtgcctttgagcaagttaggaaaagatgcccccactgggcagacacagccctatgggctcatggtttgacaaacagagtggagagaccatattttagccccactcaccctcttgggtgcacgacctgtacagccaaacacagcatccaatatgaatacccatcccctgaccgcatccccagtag

SEQ ID NO: 3995 - DNA, 2526 bp, Homo sapiens
tcacccaggagtggatttgtggtttggcttcaccatggcttcctgccgtgcctggaaccttagggtgctggtggctgtcgtgtgtggactactgactggcatcattttgggactgggcatctggaggattgtgatcaggatccaaagaggaaaatctacttcctcatcaagcacccctacagagttctgcaggaatggtggaacctgggaaaatggcagatgtatttgtacagaagagtggaaaggactgagatgtacaattgctaatttttgtgaaaatagtacctatatgggttttacttttgccagaatcccagtgggcagatatggaccatccttgcaaacatgtggcaaggatactccaaatgcgggcaatccaatggcagtccggttgtgcagtctctctctatatggagagatagaattacaaaaagtgacaataggaaattgcaatgaaaatctggaaaccctggaaaagcaggtaaaggatgtcacagcaccacttaataacatttcttctgaagtccagattttaacatctgatgccaataaattaactgctgagaacatcactagtgctacgcgagtggttggacagatattcaacacttccagaaatgcttcacctgaggcaaagaaagttgccatagtaacagtgagtcaactcctagatgccagtgaagatgcttttcaaagagttgctgctactgctaatgatgatgcccttacaacgcttattgagcaaatggagacttattccttgtctttgggtaatcaatcagtggtggaacctaacatagcaatacagtcagcaaatttctcttcagaaaatgcggtggggccttcaaatgttcgcttctctgtgcagaaaggagctagcagttctctagtttctagttcaacatttatacatacaaatgtggatggccttaacccagatgcacagactgagcttcaggtcttgcttaatatgacgaaaaattacaccaagacatgcggctttgtagtttatcaaaatgacaagcttttccaatcaaaaacttttacagctaaatcggattttagtcaaaaaattatctcaagcaaaactgatgaaaatgagcaagatcagagtgcttctgttgacatggtctttagtccaaagtacaaccaaaaagaatttcaactctattcctatgcctgtgtctattggaatttgtcagcgaaggactgggacacatatggctgtcaaaaagacaagggcactgatggattcctgcgctgccgctgcaaccatactactaattttgctgtattaatgactttcaaaaaggattatcaatatcccaaatcacttgacatattatccaacgttggatgtgcactgtctgttactggtctggctctcacagttatatttcagattgtcaccaggaaagtcagaaaaacctcagtaacctgggttttggtcaatctgtgcatatcaatgttgattttcaacctcctctttgtgtttggaattgaaaactccaataagaacttgcagacaagtgatggtgacatcaataatattgactttgacaataatgacatacccaggacagacaccattaacatcccgaatcccatgtgcactgcgattgccgccttactgcactattttctgttagtgacatttacctggaacgcactcagcgctgcacagctctattaccttctaataaggaccatgaagcctcttcctcggcatttcattcttttcatctcattaattggatggggagtcccagctatagtagtggctataacagtgggagttatttattctcagaatggaaataatccacagtgggaattagactaccggcaagagaaaatctgctggctggcaattccagaacccaatggtgttataaaaagtccgctgttgtggtcattcatcgtacctgtaaccattatcctcatcagcaatgttgttatgtttattacaatctcgatcaaagtgctgtggaagaataaccagaacctgacaagcacaaaaaaagtttcatccatgaagaagattgttagcacattatctgttgcagttgtttttggaattacctggattctagcatacctgatgctagttaatgatgatagcatcaggatcgtcttcagctacatattctgccttttcaacactacacagggattgcaaatttttatcctgtacactgttagaacaaaagtcttccagagtgaagcttccaaagtgttgatgttgctatcgtctattgggagaaggaagtcattgccttcagtgacgcggccgaggctgcgtgtaaagatgtataatttcctcaggtcattgccaaccttacatgaacgctttaggctactggaaacctctccgagtactgaggaaatcacactctctgaaagtgacaatgcaaaggaaagcatctagacagtaaaacttacctgttgtggtctttttaatcacctcgtttgagttttatctgtttctctcctttatttcccagtcctctcagaaagtcttcctca

SEQ ID NO: 3996 - DNA, 2030 bp, Homo sapiens; identical to SEQ ID NO: 3990

SEQ ID NO: 3997 - DNA, 5114 bp, Homo sapiens
ccgtggtttcctgctacctccaaccatgggccttttgggaatactttgttttttaatcttcctggggaaaacctggggacaggagcaaacatatgtcatttcagcaccaaaaatattccgtgttggagcatctgaaaatattgtgattcaagtttatggatacactgaagcatttgatgcaacaatctctattaaaagttatcctgataaaaaatttagttactcctcaggccatgttcatttatcctcagagaataaattccaaaactctgcaatcttaacaatacaaccaaaacaattgcctggaggacaaaacccagtttcttatgtgtatttggaagttgtatcaaagcatttttcaaaatcaaaaagaatgccaataacctatgacaatggatttctcttcattcatacagacaaacctgtttatactccagaccagtcagtaaaagttagagtttattcgttgaatgacgacttgaagccagccaaaagagaaactgtcttaactttcatagatcctgaaggatcagaagttgacatggtagaagaaattgatcatattggaattatctcttttcctgacttcaagattccgtctaatcctagatatggtatgtggacgatcaaggctaaatataaagaggacttttcaacaactggaaccgcatattttgaagttaaagaatatgtcttgccacatttttctgtctcaatcgagccagaatataatttcattggttacaagaactttaagaattttgaaattactataaaagcaagatatttttataataaagtagtcactgaggctgacgtttatatcacatttggaataagagaagacttaaaagatgatcaaaaagaaatgatgcaaacagcaatgcaaaacacaatgttgataaatggaattgctcaagtcacatttgattctgaaacagcagtcaaagaactgtcatactacagtttagaagatttaaacaacaagtacctttatattgctgtaacagtcatagagtctacaggtggattttctgaagaggcagaaatacctggcatcaaatatgtcctctctccctacaaactgaatttggttgctactcctcttttcctgaagcctgggattccatatcccatcaaggtgcaggttaaagattcgcttgaccagttggtaggaggagtcccagtaacactgaatgcacaaacaattgatgtaaaccaagagacatctgacttggatccaagcaaaagtgtaacacgtgttgatgatggagtagcttcctttgtgcttaatctcccatctggagtgacggtgctggagtttaatgtcaaaactgatgctccagatcttccagaagaaaatcaggccagggaaggttaccgagcaatagcatactcatctctcagccaaagttacctttatattgattggactgataaccataaggctttgctagtgggagaacatctgaatattattgttacccccaaaagcccatatattgacaaaataactcactataattacttgattttatccaagggcaaaattatccactttggcacgagggagaaattttcagatgcatcttatcaaagtataaacattccagtaacacagaacatggttccttcatcccgacttctggtctattatatcgtcacaggagaacagacagcagaattagtgtctgattcagtctggttaaatattgaagaaaaatgtggcaaccagctccaggttcatctgtctcctgatgcagatgcatattctccaggccaaactgtgtctcttaatatggcaactggaatggattcctgggtggcattagcagcagtggacagtgctgtgtatggagtccaaagaggagccaaaaagcccttggaaagagtatttcaattcttagagaagagtgatctgggctgtggggcaggtggtggcctcaacaatgccaatgtgttccacctagctggacttaccttcctcactaatgcaaatgcagatgactcccaagaaaatgatgaaccttgtaaagaaattctcaggccaagaagaacgctgcaaaagaagatagaagaaatagctgctaaatataaacattcagtagtgaagaaatgttgttacgatggagcctgcgttaataatgatgaaacctgtgagcagcgagctgcacggattagtttagggccaagatgcatcaaagctttcactgaatgttgtgtcgtcgcaagccagctccgtgctaatatctctcataaagacatgcaattgggaaggctacacatgaagaccctgttaccagtaagcaagccagaaattcggagttattttccagaaagctggttgtgggaagttcatcttgttcccagaagaaaacagttgcagtttgccctacctgattctctaaccacctgggaaattcaaggcattggcatttcaaacactggtatatgtgttgctgatactgtcaaggcaaaggtgttcaaagatgtcttcctggaaatgaatataccatattctgttgtacgaggagaacagatccaattgaaaggaactgtttacaactataggacttctgggatgcagttctgtgttaaaatgtctgctgtggagggaatctgcacttcggaaagcccagtcattgatcatcagggcacaaagtcctccaaatgtgtgcgccagaaagtagagggctcctccagtcacttggtgacattcactgtgcttcctctggaaattggccttcacaacatcaatttttcactggagacttggtttggaaaagaaatcttagtaaaaacattacgagtggtgccagaaggtgtcaaaagggaaagctattctggtgttactttggatcctaggggtatttatggtaccattagcagacgaaaggagttcccatacaggatacccttagatttggtccccaaaacagaaatcaaaaggattttgagtgtaaaaggactgcttgtaggtgagatcttgtctgcagttctaagtcaggaaggcatcaatatcctaacccacctccccaaagggagtgcagaggcggagctgatgagcgttgtcccagtattctatgtttttcactacctggaaacaggaaatcattggaacatttttcattctgacccattaattgaaaagcagaaactgaagaaaaaattaaaagaagggatgttgagcattatgtcctacagaaatgctgactactcttacagtgtgtggaagggtggaagtgctagcacttggttaacagcttttgctttaagagtacttggacaagtaaataaatacgtagagcagaaccaaaattcaatttgtaattctttattgtggctagttgagaattatcaattagataatggatctttcaaggaaaattcacagtatcaaccaataaaattacagggtaccttgcctgttgaagcccgagagaacagcttatatcttacagcctttactgtgattggaattagaaaggctttcgatatatgccccctggtgaaaatcgacacagctctaattaaagctgacaactttctgcttgaaaatacactgccagcccagagcacctttacattggccatttctgcgtatgctctttccctgggagataaaactcacccacagtttcgttcaattgtttcagctttgaagagagaagctttggttaaaggtaatccacccatttatcgtttttggaaagacaatcttcagcataaagacagctctgtacctaacactggtacggcacgtatggtagaaacaactgcctatgctttactcaccagtctgaacttgaaagatataaattatgttaacccagtcatcaaatggctatcagaagagcagaggtatggaggtggcttttattcaacccaggacacaatcaatgccattgagggcctgacggaatattcactcctggttaaacaactccgcttgagtatggacatcgatgtttcttacaagcataaaggtgccttacataattataaaatgacagacaagaatttccttgggaggccagtagaggtgcttctcaatgatgacctcattgtcagtacaggatttggcagtggcttggctacagtacatgtaacaactgtagttcacaaaaccagtacctctgaggaagtttgcagcttttatttgaaaatcgatactcaggatattgaagcatcccactacagaggctacggaaactctgattacaaacgcatagtagcatgtgccagctacaagcccagcagggaagaatcatcatctggatcctctcatgcggtgatggacatctccttgcctactggaatcagtgcaaatgaagaagacttaaaagcccttgtggaaggggtggatcaactattcactgattaccaaatcaaagatggacatgttattctgcaactgaattcgattccctccagtgatttcctttgtgtacgattccggatatttgaactctttgaagttgggtttctcagtcctgccactttcacagtgtacgaataccacagaccagataaacagtgtaccatgttttatagcacttccaatatcaaaattcagaaagtctgtgaaggagccgcgtgcaagtgtgtagaagctgattgtgggcaaatgcaggaagaattggatctgacaatctctgcagagacaagaaaacaaacagcatgtaaaccagagattgcatatgcttataaagttagcatcacatccatcactgtagaaaatgtttttgtcaagtacaaggcaacccttctggatatctacaaaactggggaagctgttgctgagaaagactctgagattaccttcattaaaaaggtaacctgtactaacgctgagctggtaaaaggaagacagtacttaattatgggtaaagaagccctccagataaaatacaatttcagtttcaggtacatctaccctttagattccttgacctggattgaatactggcctagagacacaacatgttcatcgtgtcaagcatttttagctaatttagatgaatttgccgaagatatctttttaaatggatgctaaaattcctgaagttcagctgcatacagtttgcacttatggactcctgttgttgaagttc

SEQ ID NO: 3998 - DNA, 1711 bp, Homo sapiens
gctgaagtgccagggtgcttgtgaagtctaagcccttgtctggcatttgtcaggaatataggctgctgtatgtttccaggaaacttctaggacagaggctattcaacaagctcatgaagatgaccttctatgggcattttgtagccggggaggaccaggagtccatccagcccctgcttcggcactacagggccttcggtgtcagcgccatcctggactatggagtggaggaggacctgagccccgaggaggcagagcacaaggagatggagtcctgcacctcagctgcggagagggatggcagtggcacgaataagcgggacaagcaataccaggcccaccgggccttcggggaccgcaggaatggtgtcatcagtgcccgcacctacttctacgccaatgaggccaagtgcgacagccacatggagacattcttgcgctgcatcgaagcctcaggtagagtcagcgatgacggcttcatagccattaagctcacagcactggggagaccccagtttctgctgcagttctcagaggtgctggccaagtggaggtgcttctttcaccaaatggctgtggagcaagggcaggcgggcctggctgccatggacaccaagctggaggtggcggtgctgcaggaaagtgtcgcaaagttgggcatcgcatccagggctgagattgaggactggttcacggcagagaccctgggagtgtctggcaccatggacctgctggactggagcagcctcatcgacagcaggaccaagctgtccaagcacctggtagtccccaacgcacagacaggacagctggagcccctgctgtcccggttcactgaggaggaggagctacagatgaccaggatgctacagcggatggatgtcctggccaagaaagccacagagatgggcgtgcggctgatggtggatgccgagcagacctacttccagccggccatcagccgcctgacgctggagatgcagcggaagttcaatgtggagaagccgctcatcttcaacacataccagtgctacctcaaggatgcctatgacaatgtgaccctggacgtggagctggctcgccgtgagggctggtgttttggggccaagctggtgcggggcgcatacctggcccaggagcgagcccgtgcggcagagatcggctatgaggaccccatcaaccccacgtacgaggccaccaacgccatgtaccacaggtgcctggactacgtgttggaggagctgaagcacaacgccaaggccaaggtgatggtggcctcccacaatgaggacacagtgcgctttgcactgcgcaggatggaggagctgggcctgcatcctgctgaccaccgggtgtactttggacagctgctaggcatgtgtgaccagatcagcttcccgctgggccaggctggctaccccgtgtacaagtacgtgccctatggccccgtgatggaggtgctgccctacttgtcccgccgtgccctggagaacagcagcctcatgaagggcacccatcgggagcggcagctgctgtggctggagctcttgaggcggctccgaactggcaacctcttccatcgccctgcctagcacccgccagcacacccttagcctccagcaccccccgcccccgcccaggccatcaccacagctgcagccaaccccatcctcacacagattcaccttttttcaccccacacttgcagagc

SEQ ID NO: 3999 - DNA, 6516 bp, Homo sapiens; identical to SEQ ID NO: 2451

SEQ ID NO: 4000 - DNA, 5490 bp, Homo sapiens; identical to SEQ ID NO: 740

SEQ ID NO: 4001 - DNA, 2449 bp, Homo sapiens; identical to SEQ ID NO: 1929

SEQ ID NO: 4002 - DNA, 2302 bp, Homo sapiens
aaggctcctcagccgagcgccgagcggtcgatcgccgtagctcccgcagcctgcgatctccagtctgtggctcctaccagccattgtaggccaataatccgttatggagcatgcctttaccccgttggagcccctgctttccactgggaatttgaagtactgccttgtaattcttaatcagcctttggacaactattttcgtcatctttggaacaaagctcttttaagagcctgtgccgatggaggtgccaaccgcttatatgatatcaccgaaggagagagagaaagctttttgcctgaattcatcaatggagactttgattctattaggcctgaagtcagagaatactatgctactaagggatgtgagctcatttcaactcctgatcaagaccacactgactttactaagtgccttaaaatgctccaaaagaagatagaagaaaaagacttaaagggaaagcacaggttgcatgtagacactggaatggagggtgattggtgtggccttattcctgttggacagccttgtatgcaggttacaaccacaggcctcaagtggaacctcacaaatgatgtgcttgcttttggaacattggtcagtacttccaatacctacgacgggtctggtgttgtgactgtggaaactgaccacccactcctctggaccatggccatcaaaagctaacctgttgactggcatccataagtgtgcctctgccttatctcatttctcaacagttcattgctcaacaagaacgattcacctgggtttgcaagaatctaaacctctctaggggaagcccactgggtttaaagatgttagtgtttagataatacaggtaacattataaatgacagatctcaattttatagtagtgggaaagatacatgctaagaaagcaaataagctctattatattcggttggaacctaatgggaatcattccactatacaattcagtactgattattcttcttacattattaatcattccatttatcctagaaaattgtttttaatttgaatcagagaaaactgttgaggttcctcttggagtctagaacatccttaaatgtctaacaacaagggctacctctgagtaccttttagtattagttttctgtatatgatatatattatcttatactgaaaaaaaattcctttcagattggggtgttagaagtgcaccaggtcactctgaccttattactgtctttggtattgtcttaaataaatcaagaatcattgacctaattgttaaatttaaaaataggtagttagcaataggtggaaagagaaatgatgtgaaagataaatgatgattcgtggagccctactcacacattaacccccaaattcaaaagtaagaatgcaaaagtctagagggggtaacagtctgcatcatcatcacaacctaaatggagaaagctgtgcagaggaaacttaagcataaaaattgaattcgtttctgacataccttagactgaaaaactgttggttcatccagaagtgtattcatattaccagaaaatgagtttgtctatggggatacatgaacttcatatactaaggagcctaactccaaagcctgcgttctcatcccagtctgatattcacctaagtttccggacccttttccttagctgtaaaatggaagcggttggactgatggtgtctgaggttctttcccacactgaaattctaaatattgacacttagcagtcatagggctgataatacacacagttactgacttagcctaaacaacctggtgcatcgaaatgtattcacctttcttttgtaaagagaccatcttctatcttctttccacctttctctgttttatgaaaccaactgttgacatacaaaccatgattgaaggagaacctgtccaacatgttttatgtacacaaatccctatgttgctataagaaaagtgaaagtaactgttttcttcttggtgctatgacagtgtgagactcaggttgtctgtagagaatgaaaggagcagtggcccgcgtgattgtggcatttaaggagcagtggcccatgtgactgtggcattttcggcacttttcattactttctgcttgaccggaagttgaggcttagctatgtttccatcttcagtttctgaagactagttatatattccttactagaaatatattcataatatataaaagaaatatatctgtgattttaaaattttgctaccaaagaatgcatgttctgtgtgccctgaaaatgttaccagtgttaataaatggatacttatcaaaaaagaaaaaaaaaaaa

SEQ ID NO: 4003 - DNA, 1608 bp, Homo sapiens
aaaaagtaatgcctttctgaagaaccatgcttgagtctctctgggatggagaggaccccaactcgccaaagaaaagattcaccattgcccgcctgaagaagccctcaggggaaggaacttagcagtgtgcaggtgagctgatgccgcaaacccgctaaccactgcatgtgctgttatgcctttcccaggctggacacctagctgggtgttcatcataactttccacagctttaatccacgccaagtttgtatataactgaaattcactcttgacaccctccacagtctttccaagttggactcttcctctcatcagtactagttgtcaaatttaaaatgtgacagttaaagaatattctagtttgacaattagtaagcaatgagtatatcatcagtacactagctttttattaatccatgtacactgtatagtaggatacaggttgatgagttgatgagacaggaacttaaaaacttaaagctagctgtggacagagaaagggagcgcccagtgaaagcaggaaagaaaaaggacaagaaaggaaagaaaggcaaaaagaaagagaagaaggcaaagaaggataaagatctgacagctgacaggaccatcgagtctctgtataaggaactggtggaagaaggattactgatccaggctctgaaagtcaacctctctgattacattggtgagtacagctacctggggactactcttcgccaggtgtccatagaacccatgccctccctcctggatgtcagacagctcatcacattgtacggaatctggccattaggttctgcagcagtgcatgagaaagctcctttggtgaaatcgctactgttagccgggccgtctggggtagggaagaaaatgctggtccatgccatctgcaccgaaacgggagccaacctcttcaacttgtcctcctctaacattgctgggaaataccctggcaaaaatggcctccaaatgatgctgcatgcagtcttcaaggtggctcgacagctccagccctccgtggtgtggattgaagacacagaaaaaaccttctacaaaaaagttcccaacgcagaaaagatgaatgaacctaaacgcctgaaaaaacaccttccccaaatcctgaaactcctgaaaccagatgaccggattctgattgtggggaccacacggcgtcccttcgatgctgaactccaatctttctgcaaagtttaccagaaaattattttggtgcccagaccagactatgcttccagatacgttctgtggaagcaaatcattgaacgcaatggaggagtcctcaccagtgccttgaatgtcagctgcctggcgaaggtcactgacggcttcacccaaggacatatagtcgaagtggttaaaggcgtgctcacagatcagagaatccggcggcaaattcataaacctctcactgcagttgagtttattacggcgataaccagcatgaatccagtgtacaaagaggaagaagagagctttaagaactggtatgccaaaactcctctgggtaaaaacgtgccttggcgataacaggaggcagcacagaaaaggcaagggacaaagggaaaaggaaataaaaaaaaaaaaaaaaa

SEQ ID NO: 4004 - DNA, 1886 bp, Homo sapiens
agactgttttttggtcccagggaaaggaggaagaaggagattgtgatggagaaagggggtctgtgaaacgtcaggcacagcacaaaggctttgccacgtaattacaggctcctattaagtcgagatctgccctcccaggggtctccaattttcttgtattccctacaaagcctcctctgcatgccagtttgtgccttttgaagtgccagagagcttcttgatccaactgagaaggaaaaaggagcccagcaagaagagggggagagagagaagggaaaggggggaacccaccagcaccctccgtcggactcttgaagcctttttttttaattcttaatttttttttttactctttacaaaaagtaaagtgagaatcctgctctctaatacatctgcaagacatcaccctctcctcctgaaactttagtcactcctgagaatccacaggagtgcagagaggggggaacacgttttcttgaagatgttttaaagctggaacaagccttcttctgttggtgcttgaactcttgcctgggaataacttttttaacctttaaaaaaaccattcactttgattcttctctcccaccccttcttctctcttcttctgtttgcctaactcccccgccctgctggcctccgctttcctctctcccccttgttattatttttagtctgtgcgtgtggacacttttggagagttggaagggatttttttctcctgacttgaacatagggtgactttttaatattgtattttagtgtggattatctctttggaccgcgccggacttggcctcaggaaagcaaccaaggctgcggaaggcggctggtgcagaacgctctgctctacagaagggggtcccccgccctcttttccaatttttttttttggccttcctctccttccctccctcttcctccctctctctctctctctctccactacccccctctttcttccccactcggctcctctcccccctcgcgcccacagcgtttggtgttgattcgagcgggaagaggggggtgggtgggatcggtgggggagaccatgacctccagctacgggcacgttctggagcggcaaccggcgctgggcggccgcttggacagcccgggcaacctcgacaccctgcaggcgaaaaagaacttctccgtcagtcacctgctagacctggaggaagccggggacatggtggcggcacaggcggatgagaacgtgggcgaggctggccggagcctgctggagtcgccgggactcaccagcggcagcgacaccccgcagcaggacaatgaccagctgaactcagaagaaaaaaagaagagaaagcagcgaaggaataggacaaccttcaatagcagccagctgcaggctttggagcgtgtctttgagcggacacactatcctgatgcttttgtgcgagaagaccttgcccgccgggtgaacctcaccgaggcgagagtgcaggtgtggtttcagaaccgaagagccaagttccgcaggaatgagagagccatgctagccaataaaaacgcttccctcctcaaatcctactcaggagacgtgactgctgtggagcagcccatcgtacctcgtcctgctccgagacccaccgattatctctcctgggggacagcgtctccgtacagatcctcgtccctcccaagatgttgtttacacgaggggcttcataacggattctaacggaagacactgaaaagcgccatggctacttattctgccacatgtgccaacaatagccctgcacagggcatcaacatggccaacagcattgccaacctgagactgaaggccaaggaatatagtttacagaggaaccaggtgccaacagtcaactgaggaaaaaaaaaaaaaaaaaagg

SEQ ID NO: 4005 - DNA, 2364 bp, Homo sapiens; identical to SEQ ID NO: 147

SEQ ID NO: 4006 - DNA, 1996 bp, Homo sapiens; identical to SEQ ID NO: 2442

SEQ ID NO: 4007 - DNA, 3924 bp, Homo sapiens
agtgatgaactcatgctctgttctgttttctcaaagctgaagtcggctaggtttgcaaagctgtgggctgagcactcaggcaatcacactctcagaaactgcggcggctctggactgcagcctcccaaggctccatgccagacaaagcatgcgtgtcacacttgctacaatagcctggatggtttcttttgtctccaattattcacacacagcaaatattttgccagatatcgaaaatgaagatttcatcaaagactgcgttcgaatccataacaagttccgatcagaggtgaaaccaacagccagtgatatgctatacatgacttgggacccagcactagcccaaattgcaaaagcatgggccagcaattgccagttttcacataatacacggctgaagccaccccacaagctgcacccaaacttcacttcactgggagagaacatctggactgggtctgtgcccattttttctgtgtcttccgccatcacaaactggtatgacgaaatccaggactatgacttcaagactcggatatgcaaaaaagtctgtggccactacactcaggttgtttgggcagatagttacaaagttggctgcgcagttcaattttgccctaaagtttctggctttgacgctctttccaatggagcacattttatatgcaactacggaccaggagggaattacccaacttggccatataagagaggagccacctgcagtgcctgccccaataatgacaagtgtttggacaatctctgtgttaaccgacagcgagaccaagtcaaacgttactactctgttgtatatccaggctggcccatatatccacgtaacagatacacttctctctttctcattgttaattcagtaattctaatactgtctgttataattaccattttggtacagcacaagtaccctaatttagttcttttggactaatacaattcaggaaagaaaaaacccaaaaaccaacctcattcacatatggctttttttttaaccaataacaattaggtgtacttctattttaaaacatttcagaaaaaaatatatgttatagcaatactcttactcaaaagaagaaatttcctaactctatcagataaactcatctttagtataaataagcattatttgcaggttgccacaggtggacttttagtaagtaacctaacccatgtttcagcttctaaatctgcaaaatgagcaaggtacagtagcacatttttaggtgattcttagtaactccagtagccttcattagttaaaaacattattattttttgcatgctgcttcgactctaaatatctggttttccctgtctttttggtttactacttccccagattcagaacagaggagtaactaggggatctgattttagaggccttaattttctgttcatggactgttaaaagtaaaaccaaactttcaaaagggataaacctaaatatttacttgttatcattagagagggaacatcaaatgctgggacatcattactaaccaatagcatcagacactggatttaatggataatcacaatggtcgtaatgtatacaaagacttatataccactttctcgtataaatttttcaaaaaatacaataataatataatttataaagaacactcttctatgaacaaccaccaccaccaaaaaaaaaaaaagccctcagaaaatttctcacaaataaggcaactaatgcctgatatctcaaaatcctttacaaaaggagatagttctagtcaaggagttttgggtatgttacttttttttcttctttttcttttcatctgcctccatcttaagtgcaatttcttcagctgtaagagctcccagtttcttattctttgctttcttaaccttttccttgatgctggccacatcaattttagtttcagtagaagctagacaaattaaaagcacaacacatgtaatactttagattttaccaagtaaaacaaagaatatatgtttaacaaagaatatatgtttaaggcagttaacttcagagtattcttataattgaataattgaaaggtgatcacagtataaaatataaaaacacttgcctaaagcagttagaaatttcttcagattaagataaaacaaatcataaaatactttatatattagtacaagtatacataaaaatggcataaatggcataattgaaccaattactggattcaactatattaagactatttccttaaatcctacttcagactaaattattttacctacattcttttccatattttggaacttctgagtcattattttccatcttgcacattaaaataatttaaaattacatgtatcccttctcaataagtttaatcagctaaccctaagctagaggtcaaaatctacttcctctaatatcaaaacgaaaatttaaagttttccaaatattaattcaatattaattgaatattcaatgaattaattcatttaatgttagattaattcattgaatattaattcaatgaatgactaattaatagtattttaacaagattttggtatatttaacaacattttggtaataaagacaataatttgagagtgtgtggaagtccccctaatagaagccaactatctaatcaatgccaaaagtgtgaacaaaatagagaaaggaagcagtgaaaaagaatgcaactttttcttaccattcaaagtacaggatcacagcataaaagaatcataagataaaacatcaaactacccagcaacctgagaagcacagagtgttaaagcctccaccgtgtggagaaactaaattagggtaactagctattgagtatattgagtaccttcaaagcactcaactgacaggttttacagactggaaattataatacttatgacatttctaccttttatataaccaataatctaccatagaatgtagtatttttaaagctattaacaagcaatatattaaaataataatgtattatatctgtttctgacccagtctatgtacaatattgctggtgagccctctcccttcagtgtgtcactgttcactttggagggttactttaggaagaggataagtgttaccacaggggaaaaaaatgcagaagaggatgcatcagaagaaatggcatgacaatgttttctcttagtgtcttttaaatactaggttagtgcgaaagtgatttctgccatttaaaaaccacaatcactttcgcactaatagctcctgaataagacctgtcagcatcctttagtctaaggtgatgagaaatccatgttaccgatatagaagccaaactctaagccaagatcacataaagagaagaaaaagtacaacttctgataattcctctttgagaggcatgacagcagagctcagggatcttcttgcatttctacagaagatgcactggctgccctgggtttgtatctttcacaacaaagagtcttttccaagcacagaccagaggtcaggagaggactgtcaatccagtttgcactgaaataggcattagctgcctctaaattataaattatctcagccatcccttgtccttaggattagtaattaatgaaatgctaagagaactgatgaaaagatacaactgtttcttaaaaagattcagacaaatttattatgggtttacttttcctaattaataaagacttttacatcatagaaagcattaccttccttaggtttcacaattggtttttccttaggtggaataaatgctttgtttctttcctcttgtctcttactgatggcttctgcttgtttagcctacattaataaataaaaaatatatcagttaaatgtatttatagttaaataattcaagtatctatgaactttgctattcatgtgagccagacataaagtgccgtacctttattgcttccaaaaaaaaaaaaaaaaaa

SEQ ID NO: 4008 - DNA, 3525 bp, Homo sapiens; identical to SEQ ID NO: 775

SEQ ID NO: 4009 - DNA, 7215 bp, Homo sapiens
gagcgctccaagatggcgcccaccgcagtcccgcccgccgcatcctcggcgcctttgcagtccggccgcgcctcccgggccccgcgttagggccgccgctgcctccctcgccgccgccgctgccagctgacctgtcctggacgcagcataactaacgaagctgctgcaggatgagaagatggcagcgcggctgcttgcaccaccaggccctgatagtttcaagcctttcacccctgagtcactggcaaacattgagaggcgcattgctgagagcaagctcaagaaaccaccaaaggccgatggcagtcatcgggaggacgatgaggacagcaagcccaagccaaacagcgacctggaagcagggaagagtttgcctttcatctacggggacatcccccaaggcctggttgcagttcccctggaggactttgacccatactatttgacgcagaaaacctttgtagtattaaacagagggaaaactctcttcagatttagtgccacgcctgccttgtacattttaagtccttttaacctgataagaagaatagctattaaaattttgatacattcagtatttagcatgatcattatgtgcactattttgaccaactgtgtattcatgacttttagtaaccctcctgactggtcgaagaatgtggagtacacgttcacagggatttatacatttgaatcactagtgaaaatcattgcaagaggtttctgcatagatggctttacctttttacgggacccatggaactggttagatttcagtgtcatcatgatggcgtatataacagagtttgtaaacctaggcaatgtttcagctctacgcactttcagggtactgagggctttgaaaactatttcggtaatcccaggcctgaagacaattgtgggtgccctgattcagtctgtgaagaaactgtcagatgtgatgatcctgacagtgttctgcctgagtgtttttgccttgatcggactgcagctgttcatggggaaccttcgaaacaagtgtgttgtgtggcccataaacttcaacgagagctatcttgaaaatggcaccaaaggctttgattgggaagagtatatcaacaataaaacaaatttctacacagttcctggcatgctggaacctttactctgtgggaacagttctgatgctgggcaatgcccagagggataccagtgtatgaaagcaggaaggaaccccaactatggttacacaagttttgacacttttagctgggccttcttggcattatttcgccttatgacccaggactattgggaaaacttgtatcaattgactttacgagcagccgggaaaacatacatgatcttcttcgtcttggtcatctttgtgggttctttctatctggtgaacttgatcttggctgtggtggccatggcttatgaagaacagaatcaggcaacactggaggaggcagaacaaaaagaggctgaatttaaagcaatgttggagcaacttaagaagcaacaggaagaggcacaggctgctgcgatggccacttcagcaggaactgtctcagaagatgccatagaggaagaaggtgaagaaggagggggctcccctcggagctcttctgaaatctctaaactcagctcaaagagtgcaaaggaaagacgtaacaggagaaagaagaggaagcaaaaggaactctctgaaggagaggagaaaggggatcccgagaaggtgtttaagtcagagtcagaagatggcatgagaaggaaggcctttcggctgccagacaacagaatagggaggaaattttccatcatgaatcagtcactgctcagcatcccaggctcgcccttcctctcccgccacaacagcaagagcagcatcttcagtttcaggggacctgggcggttccgagacccgggctccgagaatgagttcgcggatgacgagcacagcacggtggaggagagcgagggccgccgggactccctcttcatccccatccgggcccgcgagcgccggagcagctacagcggctacagcggctacagccagggcagccgctcctcgcgcatcttccccagcctgcggcgcagcgtgaagcgcaacagcacggtggactgcaacggcgtggtgtccctcatcggcggccccggctcccacatcggcgggcgtctcctgccagaggctacaactgaggtggaaattaagaagaaaggccctggatctcttttagtttccatggaccaattagcctcctacgggcggaaggacagaatcaacagtataatgagtgttgttacaaatacactagtagaagaactggaagagtctcagagaaagtgcccgccatgctggtataaatttgccaacactttcctcatctgggagtgccacccctactggataaaactgaaagagattgtgaacttgatagttatggacccttttgtggatttagccatcaccatctgcatcgtcctgaatacactgtttatggcaatggagcaccatcctatgacaccacaatttgaacatgtcttggctgtaggaaatctggttttcactggaattttcacagcggaaatgttcctgaagctcatagccatggatccctactattatttccaagaaggttggaacatttttgacggatttattgtctccctcagtttaatggaactgagtctagcagacgtggaggggctttcagtgctgcgatctttccgattgctccgagtcttcaaattggccaaatcctggcccaccctgaacatgctaatcaagattattggaaattcagtgggtgccctgggcaacctgacactggtgctggccattattgtcttcatctttgccgtggtggggatgcaactctttggaaaaagctacaaagagtgtgtctgcaagatcaaccaggactgtgaactccctcgctggcatatgcatgactttttccattccttcctcattgtctttcgagtgttgtgcggggagtggattgagaccatgtgggactgcatggaagtggcaggccaggccatgtgcctcattgtctttatgatggtcatggtgattggcaacttggtggtgctgaacctgtttctggccttgctcctgagctccttcagtgcagacaacctggctgccacagatgacgatggggaaatgaacaacctccagatctcagtgatccgtatcaagaagggtgtggcctggaccaaactaaaggtgcacgccttcatgcaggcccactttaagcagcgtgaggctgatgaggtgaagcctctggatgagttgtatgaaaagaaggccaactgtatcgccaatcacaccggtgcagacatccaccggaatggtgacttccagaagaatggcaatggcacaaccagcggcattggcagcagcgtggagaagtacatcattgatgaggaccacatgtccttcatcaacaaccccaacttgactgtacgggtacccattgctgtgggcgagtctgactttgagaacctcaacacagaggatgttagcagcgagtcggatcctgaaggcagcaaagataaactagatgacaccagctcctctgaaggaagcaccattgatatcaaaccagaagtagaagaggtccctgtggaacagcctgaggaatacttggatccagatgcctgcttcacagaaggttgtgtccagcggttcaagtgctgccaggtcaacatcgaggaagggctaggcaagtcttggtggatcctgcggaaaacctgcttcctcatcgtggagcacaactggtttgagaccttcatcatcttcatgattctgctgagcagtggcgccctggccttcgaggacatctacattgagcagagaaagaccatccgcaccatcctggaatatgctgacaaagtcttcacctatatcttcatcctggagatgttgctcaagtggacagcctatggcttcgtcaagttcttcaccaatgcctggtgttggctggacttcctcattgtggctgtctctttagtcagccttatagctaatgccctgggctactcggaactaggtgccataaagtcccttaggaccctaagagctttgagacccttaagagccttatcacgatttgaagggatgagggtggtggtgaatgccttggtgggcgccatcccctccatcatgaatgtgctgctggtgtgtctcatcttctggctgattttcagcatcatgggagttaacttgtttgcgggaaagtaccactactgctttaatgagacttctgaaatccgatttgaaattgaagatgtcaacaataaaactgaatgtgaaaagcttatggaggggaacaatacagagatcagatggaagaacgtgaagatcaactttgacaatgttggggcaggatacctggcccttcttcaagtagcaaccttcaaaggctggatggacatcatgtatgcagctgtagattcccggaagcctgatgagcagcctaagtatgaggacaatatctacatgtacatctattttgtcatcttcatcatcttcggctccttcttcaccctgaacctgttcattggtgtcatcattgataacttcaatcaacaaaagaaaaagttcggaggtcaggacatcttcatgaccgaagaacagaagaagtactacaatgccatgaaaaagctgggctcaaagaagccacagaaacctattccccgccccttgaacaaaatccaaggaatcgtctttgattttgtcactcagcaagcctttgacattgttatcatgatgctcatctgccttaacatggtgacaatgatggtggagacagacactcaaagcaagcagatggagaacatcctctactggattaacctggtgtttgttatcttcttcacctgtgagtgtgtgctcaaaatgtttgcgttgaggcactactacttcaccattggctggaacatcttcgacttcgtggtagtcatcctctccattgtgggaatgttcctggcagatataattgagaaatactttgtttccccaaccctattccgagtcatccgattggcccgtattgggcgcatcttgcgtctgatcaaaggcgccaaagggattcgtaccctgctctttgccttaatgatgtccttgcctgccctgttcaacatcggccttctgctcttcctggtcatgttcatcttctccatttttgggatgtccaattttgcatatgtgaagcacgaggctggtatcgatgacatgttcaactttgagacatttggcaacagcatgatctgcctgtttcaaatcacaacctcagctggttgggatggcctgctgctgcccatcctaaaccgcccccctgactgcagcctagataaggaacacccagggagtggctttaagggagattgtgggaacccctcagtgggcatcttcttctttgtaagctacatcatcatctctttcctaattgtcgtgaacatgtacattgccatcatcctggagaacttcagtgtagccacagaggaaagtgcagaccctctgagtgaggatgactttgagaccttctatgagatctgggagaagttcgaccccgatgccacccagttcattgagtactgtaagctggcagactttgcagatgccttggagcatcctctccgagtgcccaagcccaataccattgagctcatcgctatggatctgccaatggtgagcggggatcgcatccactgcttggacatcctttttgccttcaccaagcgggtcctgggagatagcggggagttggacatcctgcggcagcagatggaagagcggttcgtggcatccaatccttccaaagtgtcttacgagccaatcacaaccacactgcgtcgcaagcaggaggaggtatctgcagtggtcctgcagcgtgcctaccggggacatttggcaaggcggggcttcatctgcaaaaagacaacttctaataagctggagaatggaggcacacaccgggagaaaaaagagagcaccccatctacagcctccctcccgtcctatgacagtgtaactaaacctgaaaaggagaaacagcagcgggcagaggaaggaagaagggaaagagccaaaagacaaaaagaggtcagagaatccaagtgttagaggagaacaaaaattcagtattatacagatctaaaactcgcaagtgaaagattgtttacaaacttcctgaatattatcaatgcagaacagctgtggagactctaacctgaagatctataccaaacgtcgtctgcttaccacgtaacacagctgcatcttgagcagtgacctgccaagggcaaaggaccccgctccctagacttacagattttctaatgcttgggcaggtggttactgcatgttccacatcagtcaatgcaacttaggacaaaactaaccagatacagaaacagaagagaggctgccgggaccagcatatttccgttgcagccaaatggattttattttttcattttattgattctcagaagcagaaagcatcactttaaaagttcgtttgttcatgcaaactatatttgcattcttacattagttaagctaagcagcaaaaagaaaacacacacacacactcacatttagcccatgtcatttaattgtcagtttctttgacataaagcgcatcttctccacatgggcttcacgtggtttggagatgggtgggggaaaacaatcaggtttcttcaggctgaggaggacttgctcaggccgattccaaacattgtgctcgttcaatgcgtagaaatgatttgcatgatggcatgccgtgatcagaagtcatgcatgagatccatacaccacaggacactactaatctagtcccttgcactgggtcagcctttggacaggacccagccctgcaccgttcactgtatttggagaaaatggtaagagttccataccggctacaattctttgagttcttaaaagtccttcatacaccttctgggtagggaaacaaccaactaattgactaacaccaccaacaacaaaaaacaaacccaatccaacaagcagatggatccgttgcgtgtatatgtttaacagacatctctaacatacagccattgttgcacattttgcaagatgaactatttaatgctgctctgtgtccagtacatgggggagactttgatcccaaatggcttgtactatttatgtcactgtaaaaccaaatcctagggctaaaaaaaaaa

SEQ ID NO: 4010 - DNA, 4370 bp, Homo sapiens; identical to SEQ ID NO: 1545

SEQ ID NO: 4011 - DNA, 2600 bp, Homo sapiens; identical to SEQ ID NO: 1880

SEQ ID NO: 4012 - DNA, 4195 bp, Homo sapiens
aatatatgggatgggaggatactgactaagtctgagaaggaggagaaagaaaattagctacaggaagagtttatatccccttctacaagaaaacttaaatatagctaccaccgctttgaaaggaatggtttgtgtccaaacagcattttccagacaagctctgtacttttttgccaaaagaattaactttaaactgaaggcagtggacagttaaacaagagtcggcactgggaacagctgtgcgtagaccagaccagtgacttataaggaggcgatcgagatcggatgacagcaaatcatgaaagctacctcctcatggcaagcacccagaatgatatggaagactgggtgaagtcaatccgccgagtcatatggggacctttcggaggaggcatttttggacagaaactggaggatactgttcgttatgagaagagatatgggaaccgtctggctccgatgttggtggagcagtgcgtggactttatccgacaaagggggctgaaagaagagggtctctttcgactgccaggccaggctaatcttgttaaggagctccaagatgcctttgactgtggggagaagccatcatttgacagcaacacagatgtacacacggtggcatcacttcttaagctgtacctccgagaacttccagaaccagttattccttatgcgaagtatgaagattttttgtcatgtgccaaactgctcagcaaggaagaggaagcaggtgttaaggaattagcaaagcaggtgaagagtttgccagtggtaaattacaacctcctcaagtatatttgcagattcttggatgaagtacagtcctactcgggagttaacaaaatgagtgtgcagaacttggcaacggtctttggtcctaatatcctgcgccccaaagtggaagatcctttgactatcatggagggcactgtggtggtccagcagttgatgtcagtgatgattagcaaacatgattgcctctttcccaaagatgcagaactacaaagcaagccccaagatggagtgagcaacaacaatgaaattcagaagaaagccaccatggggcagttacagaacaaggagaacaataacaccaaggacagccctagtaggcagtgctcctgggacaagtctgagtcaccccagagaagcagcatgaacaatggatcccccacagctctatcaggcagcaaaaccaacagcccaaagaacagtgttcacaagctagatgtgtctagaagcccccctctcatggtcaaaaagaacccagcctttaataagggtagtgggatagttaccaatgggtccttcagcagcagtaatgcagaaggtcttgagaaaacccaaaccacccccaatgggagcctacaggccagaaggagctcttcactgaaggtatctggtaccaaaatgggcacgcacagtgtacagaatggaacggtgcgcatgggcattttgaacagcgacacactcgggaaccccacaaatgttcgaaacatgagctggctgccaaatggctatgtgaccctgagggataacaagcagaaagaacaagctggagagttaggccagcacaacagactgtccacctatgataatgtccatcaacagttctccatgatgaaccttgatgacaagcagagcattgacagtgctacctggtccacttcctcctgtgaaatctccctccctgagaactccaactcctgtcgctcttctaccaccacctgcccagagcaagacttttttggggggaactttgaggaccctgttttggatgggcccccgcaggacgacctttcccaccccagggactatgaaagcaaaagtgaccacaggagtgtgggaggtcgaagtagtcgtgccaccagtagcagtgacaacagtgagacatttgtgggcaacagcagcagcaaccacagtgcactgcacagtttagtttccagcctgaaacaggaaatgaccaaacagaagatagagtatgagtccaggataaagagcttagaacagcgaaacttgactttggaaacagaaatgatgagcctccatgatgaactggatcaggagaggaaaaagttcacaatgatagaaataaaaatgcgaaatgccgagcgagcaaaagaagatgccgagaaaagaaatgacatgctacagaaagaaatggagcagtttttttccacgtttggagaactgacagtggaacccaggagaaccgagagaggaaacacaatatggattcagtgagcctgctttcgcctgctgtctctgatggctctggcaaggactccagggattctggtgggatatgacttagaaccaggtggctggtcacctggatgtacagaagtctaactggtgaaggaatatcatttacagacattaaacatccatatctgcaatgtgtaccaaagttatatcatgccccataatgctactgtcaagtgttacaactggatatgtgtatatagagtagtttttcaaaagtaaactaaaaatgagaagcatatttcaagaattattttattgcaagtcttgtatttaaatgttaaatcaatatgttgttgcaatttagcttgctttcaagcttcaccccttgcacttaacataagctatttttggcattgtgttatcatcggcttattttatagatcaatatttttatttcccttttttgctgaggaaatgaagataagcaaaaatataaatatatatataaatatatgagttattaaaatcagaagaatactttgtggctgtgctgtttgtgccaatagactttgtcatgaccaaaaagagaaatgtaaatagttttataaaatacagtcgaatcaccaggaacctttgagctgcttttaaaattcttcccctggcaccactcagttttgcttttgcgaggcgatttgacataggaactttgagactccatgagaaagtccctttctgaggcccactgtctaccttgccagatcctcagtgcgtatcgccaatgcaggatgctccttagaaaagaaaaaatggtaaagaatggcatttaacgattcaggctttgaattactctgtccctctggaccgaatctctttaactgctggatagttttagaggaattctcctgctacttaggtactgggaaacaatgcttgctaaaccatgcccacgtgagcacctgtctcccactcaaacctctcccatctcccaacaactgcactttagaataccagcagtgaaatggtattactgtttccctctgagtgaaactgctagagtatatgtcacgtagtgacatttttttctcactcaggctattgccatctgggattctctccctactacagctggcaaagttggtttgcagcaagaagatagtgggagggggccaggctgcaggagaaggagaaaagtttagaagaaacaaaccattttgcttctaattttgacagtatcactttcctgttaaaacatacaataattttaaaaggtgaatgcctaaagttccaattttagcaaatatgggaacctcagcaatgctaattttctagaaaaacccagggctctttggagctagagttttgggagaacagttcttcacaataaggcaatggttttgagaggccaggcaaataatctttctcaccgtagaacaaaaagttacaaaaggcataatcggaaatagagactacatacttgagtttatggggtttgtgttgtttgaaggttcaatgcttgcatgtgtttatttattttcaagagggaaagtggtctgtactgctttcatccttgccactgtcttgcttttattttttactctcccactgagcaagcgtctgtggtcctatggtatcaaccagtatctttatagcaataatttctttaattcccttttctctctctttccaattatttaaccagttacttccacctggacatacgataggaaattcaaactcaaaatatgaaaattgatcttaataactctcccttcatatcttttcacctatttccagtccttatcatagttgataaaaacctcagactcatccagaaagctatatgatgcactagtaaaaaaaacaaagatattcaaactgcttgggttcaaatggtatacaatttgccagctgttactgaaccttctatgcataactttttttttcctctgtgcaattggaataataaaaatactactcccataga

SEQ ID NO: 4013 - DNA, 4644 bp, Homo sapiens; identical to SEQ ID NO: 553

SEQ ID NO: 4014 - DNA, 4574 bp, Homo sapiens
gggagtttgaagacagaaaggaaaggggagaaacctgcagagagcatcaaaggatggggggtgctataaaagaagcaggggggtcctttgaaagaaatctatcatgcactgaaatgctttctggagaaggtgccattattttcctcccctcttgctcagatgaaaggagccagcaaggacagtcctgaaatattcctcaggggactttttgtcattgttcctctttcctcttgcacagagctatttgctgacctttccagaggaatctcagtccagctgagaagacagttcttaataaaaacaaaaaaatgcaaaaaccaattcctgctgtttgaatgggaatggtagcttgcttgctgcagttcttttcctgtgacattttggaatgtctgcagaaacttaaaaaaaagaaaaaaaaaaccttaaaaactccctggattaggcaagagaaaaggaagtttttttttgctaaacaggagtaaatgagaggtggtaacttatccctaagccaggacctggatgatcaaaaccttcaaattctagggatcagcacttcaaaaataacaagtaaacaagcatgaggagtggctgttgggtttcgctcagaggcaggttttaaaggaagccaaaaccgggttcagaacttcaggcctgtacgatgcctgaagaccggaattctggggggtgcccggctggtgccttagcctcaactcctttcatccctaaaactacatacagaagaatcaaacggtgttttagttttcggaaaggcatttttggacagaaactggaggatactgttcgttatgagaagagatatgggaaccgtctggctccgatgttggtggagcagtgcgtggactttatccgacaaagggggctgaaagaagagggtctctttcgactgccaggccaggctaatcttgttaaggagctccaagatgcctttgactgtggggagaagccatcatttgacagcaacacagatgtacacacggtggcatcacttcttaagctgtacctccgagaacttccagaaccagttattccttatgcgaagtatgaagattttttgtcatgtgccaaactgctcagcaaggaagaggaagcaggtgttaaggaattagcaaagcaggtgaagagtttgccagtggtaaattacaacctcctcaagtatatttgcagattcttggatgaagtacagtcctactcgggagttaacaaaatgagtgtgcagaacttggcaacggtctttggtcctaatatcctgcgccccaaagtggaagatcctttgactatcatggagggcactgtggtggtccagcagttgatgtcagtgatgattagcaaacatgattgcctctttcccaaagatgcagaactacaaagcaagccccaagatggagtgagcaacaacaatgaaattcagaagaaagccaccatggggcagttacagaacaaggagaacaataacaccaaggacagccctagtaggcagtgctcctgggacaagtctgagtcaccccagagaagcagcatgaacaatggatcccccacagctctatcaggcagcaaaaccaacagcccaaagaacagtgttcacaagctagatgtgtctagaagcccccctctcatggtcaaaaagaacccagcctttaataagggtagtgggatagttaccaatgggtccttcagcagcagtaatgcagaaggtcttgagaaaacccaaaccacccccaatgggagcctacaggccagaaggagctcttcactgaaggtatctggtaccaaaatgggcacgcacagtgtacagaatggaacggtgcgcatgggcattttgaacagcgacacactcgggaaccccacaaatgttcgaaacatgagctggctgccaaatggctatgtgaccctgagggataacaagcagaaagaacaagctggagagttaggccagcacaacagactgtccacctatgataatgtccatcaacagttctccatgatgaaccttgatgacaagcagagcattgacagtgctacctggtccacttcctcctgtgaaatctccctccctgagaactccaactcctgtcgctcttctaccaccacctgcccagagcaagacttttttggggggaactttgaggaccctgttttggatgggcccccgcaggacgacctttcccaccccagggactatgaaagcaaaagtgaccacaggagtgtgggaggtcgaagtagtcgtgccaccagtagcagtgacaacagtgagacatttgtgggcaacagcagcagcaaccacagtgcactgcacagtttagtttccagcctgaaacaggaaatgaccaaacagaagatagagtatgagtccaggataaagagcttagaacagcgaaacttgactttggaaacagaaatgatgagcctccatgatgaactggatcaggagaggaaaaagttcacaatgatagaaataaaaatgcgaaatgccgagcgagcaaaagaagatgccgagaaaagaaatgacatgctacagaaagaaatggagcagtttttttccacgtttggagaactgacagtggaacccaggagaaccgagagaggaaacacaatatggattcagtgagcctgctttcgcctgctgtctctgatggctctggcaaggactccagggattctggtgggatatgacttagaaccaggtggctggtcacctggatgtacagaagtctaactggtgaaggaatatcatttacagacattaaacatccatatctgcaatgtgtaccaaagttatatcatgccccataatgctactgtcaagtgttacaactggatatgtgtatatagagtagtttttcaaaagtaaactaaaaatgagaagcatatttcaagaattattttattgcaagtcttgtatttaaatgttaaatcaatatgttgttgcaatttagcttgctttcaagcttcaccccttgcacttaacataagctatttttggcattgtgttatcatcggcttattttatagatcaatatttttatttcccttttttgctgaggaaatgaagataagcaaaaatataaatatatatataaatatatgagttattaaaatcagaagaatactttgtggctgtgctgtttgtgccaatagactttgtcatgaccaaaaagagaaatgtaaatagttttataaaatacagtcgaatcaccaggaacctttgagctgcttttaaaattcttcccctggcaccactcagttttgcttttgcgaggcgatttgacataggaactttgagactccatgagaaagtccctttctgaggcccactgtctaccttgccagatcctcagtgcgtatcgccaatgcaggatgctccttagaaaagaaaaaatggtaaagaatggcatttaacgattcaggctttgaattactctgtccctctggaccgaatctctttaactgctggatagttttagaggaattctcctgctacttaggtactgggaaacaatgcttgctaaaccatgcccacgtgagcacctgtctcccactcaaacctctcccatctcccaacaactgcactttagaataccagcagtgaaatggtattactgtttccctctgagtgaaactgctagagtatatgtcacgtagtgacatttttttctcactcaggctattgccatctgggattctctccctactacagctggcaaagttggtttgcagcaagaagatagtgggagggggccaggctgcaggagaaggagaaaagtttagaagaaacaaaccattttgcttctaattttgacagtatcactttcctgttaaaacatacaataattttaaaaggtgaatgcctaaagttccaattttagcaaatatgggaacctcagcaatgctaattttctagaaaaacccagggctctttggagctagagttttgggagaacagttcttcacaataaggcaatggttttgagaggccaggcaaataatctttctcaccgtagaacaaaaagttacaaaaggcataatcggaaatagagactacatacttgagtttatggggtttgtgttgtttgaaggttcaatgcttgcatgtgtttatttattttcaagagggaaagtggtctgtactgctttcatccttgccactgtcttgcttttattttttactctcccactgagcaagcgtctgtggtcctatggtatcaaccagtatctttatagcaataatttctttaattcccttttctctctctttccaattatttaaccagttacttccacctggacatacgataggaaattcaaactcaaaatatgaaaattgatcttaataactctcccttcatatcttttcacctatttccagtccttatcatagttgataaaaacctcagactcatccagaaagctatatgatgcactagtaaaaaaaacaaagatattcaaactgcttgggttcaaatggtatacaatttgccagctgttactgaaccttctatgcataactttttttttcctctgtgcaattggaataataaaaatactactcccataga

SEQ ID NO: 4015 - DNA, 6584 bp, Homo sapiens; identical to SEQ ID NO: 562

SEQ ID NO: 4016 - DNA, 1188 bp, Homo sapiens
cttccagaggcaagaccaaccaagatgagtgccctgggagctgtcattgccctcctgctctggggacagctttttgcagtggactcaggcaatgatgtcacggatatcgcagatgacggctgcccgaagccccccgagattgcacatggctatgtggagcactcggttcgctaccagtgtaagaactactacaaactgcgcacagaaggagatggagtatacaccttaaatgataagaagcagtggataaataaggctgttggagataaacttcctgaatgtgaagcagtatgtgggaagcccaagaatccggcaaacccagtgcagcggatcctgggtggacacctggatgccaaaggcagctttccctggcaggctaagatggtttcccaccataatctcaccacaggtgccacgctgatcaatgaacaatggctgctgaccacggctaaaaatctcttcctgaaccattcagaaaatgcaacagcgaaagacattgcccctactttaacactctatgtggggaaaaagcagcttgtagagattgagaaggttgttctacaccctaactactcccaggtagatattgggctcatcaaactcaaacagaaggtgtctgttaatgagagagtgatgcccatctgcctaccttcaaaggattatgcagaagtagggcgtgtgggttatgtttctggctgggggcgaaatgccaattttaaatttactgaccatctgaagtatgtcatgctgcctgtggctgaccaagaccaatgcataaggcattatgaaggcagcacagtccccgaaaagaagacaccgaagagccctgtaggggtgcagcccatactgaatgaacacaccttctgtgctggcatgtctaagtaccaagaagacacctgctatggcgatgcgggcagtgcctttgccgttcacgacctggaggaggacacctggtatgcgactgggatcttaagctttgataagagctgtgctgtggctgagtatggtgtgtatgtgaaggtgacttccatccaggactgggttcagaagaccatagctgagaactaatgcaaggctggccggaagcccttgcctgaaagcaagatttcagcctggaagagggcaaagtggacgggagtggacaggagtggatgcgataagatgtggtttgaagctgatgggtgccat

SEQ ID NO: 4017 - DNA, 1539 bp, Homo sapiens
agtctgattggcaccggctcccattccggctccagcctccaatccgacccccatttcggctgcagcctcggacctagctccggccctcggtctatccggttgcatcctccctccctgttccggatcttatcttgcgccagcgcctactccaggatcccgtagccagacctcaagccatggctggtcccttctcccgtctgctgtccgcccgcccgggactcaggctcctggctttggccggagcggggtctctagccgctgggtttctgctccgaccggaacctgtacgagctgccagtgaacgacggaggctgtatcccccgagcgctgagtacccagacctccgaaagcacaacaactgcatggccagtcacctgaccccagcagtctatgcacggctctgcgacaagaccacacccactggttggacgctagatcagtgtatccagactggcgtggacaaccctggccaccccttcatcaagactgtgggcatggtggctggagatgaggagacctatgaggtatttgctgacctgtttgaccctgtgatccaagagcgacacaatggatatgacccccggacaatgaagcacaccacggatctagatgccagtaaaatccgttctggctactttgatgagaggtatgtattgtcctctagagtcagaactggccgaagcatccgaggactcagtctgcctccagcttgcactcgagcagagcgacgagaggtggaacgtgttgtggtggatgcactgagtggcctgaagggtgacctggctggacgttactataggctcagtgagatgacagaggctgaacagcagcagcttattgatgaccactttctgtttgataagcctgtgtccccgttgctgactgcagcaggaatggctcgagactggccagatgctcgtggaatttggcacaacaatgagaagagcttcctgatctgggtgaatgaggaggatcatacacgggtgatctccatggagaagggtggtaacatgaagagagtgtttgaaagattctgccgaggcctcaaagaggtggagagacttatccaagaacgtggctgggagttcatgtggaatgagcgtttgggatacatcttgacctgtccatctaacctgggcactggacttcgggcaggagtgcacatcaaactgcccctgctaagcaaagatagccgcttcccaaagatcctggagaacctaagactccaaaaacgtggtactggaggagtggacactgctgctacaggcggtgtctttgatatttctaatttggaccgactaggcaaatcagaggtggagctggtgcaactggtcatcgatggagtaaactatttgattgattgtgaacggcgtctggagagaggccaggatatccgcatccccacacctgtcatccacaccaagcattaactccccatcgccagctgatgactcaagattcccaggagttctgctcattctaatgatggcccattctacttgctctggacctgcccccgcatcccctgcctccatccta

SEQ ID NO: 4018 - DNA, 1365 bp, Homo sapiens
cttccagaggcaagaccaaccaagatgagtgccctgggagctgtcattgccctcctgctctggggacagctttttgcagtggactcaggcaatgatgtcacggatatcgcagatgacggctgcccgaagccccccgagattgcacatggctatgtggagcactcggttcgctaccagtgtaagaactactacaaactgcgcacagaaggagatggagtatacaccttaaatgataagaagcagtggataaataaggctgttggagataaacttcctgaatgtgaagcagatgacggctgcccgaagccccccgagattgcacatggctatgtggagcactcggttcgctaccagtgtaagaactactacaaactgcgcacagaaggagatggagtgtacaccttaaacaatgagaagcagtggataaataaggctgttggagataaacttcctgaatgtgaagcagtatgtgggaagcccaagaatccggcaaacccagtgcagcggatcctgggtggacacctggatgccaaaggcagctttccctggcaggctaagatggtttcccaccataatctcaccacaggtgccacgctgatcaatgaacaatggctgctgaccacggctaaaaatctcttcctgaaccattcagaaaatgcaacagcgaaagacattgcccctactttaacactctatgtggggaaaaagcagcttgtagagattgagaaggttgttctacaccctaactactcccaggtagatattgggctcatcaaactcaaacagaaggtgtctgttaatgagagagtgatgcccatctgcctaccttcaaaggattatgcagaagtagggcgtgtgggttatgtttctggctgggggcgaaatgccaattttaaatttactgaccatctgaagtatgtcatgctgcctgtggctgaccaagaccaatgcataaggcattatgaaggcagcacagtccctgaaaagaagacaccgaagagccctgtaggggtgcagcccatactgaatgaacacaccttctgtgctggcatgtctaagtaccaagaagacacctgctatggcgatgcgggcagtgcctttgccgttcacgacctggaggaggacacctggtatgcgactgggatcttaagctttgataagagctgtgctgtggctgagtatggtgtgtatgtgaaggtgacttccatccaggactgggttcagaagaccatagctgagaactaatgcaaggctggccggaagcccttgcctgaaagcaagatttcagcctggaagagggcaaagtggacgggagtggacaggagtggatgcgataagatgtggtttgaagctgatgggtgccat

SEQ ID NO: 4019 - DNA, 2380 bp, Homo sapiens
gaattccctgcagcatgggctggttaactaggattgtctgtcttttctggggagtattacttacagcaagagcaaactatcagaatgggaagaacaatgtgccaaggctgaaattatcctacaaagaaatgttggaatccaacaatgtgatcactttcaatggcttggccaacagctccagttatcataccttccttttggatgaggaacggagtaggctgtatgttggagcaaaggatcacatattttcattcgacctggttaatatcaaggattttcaaaagattgtgtggccagtatcttacaccagaagagatgaatgcaagtgggctggaaaagacatcctgaaagaatgtgctaatttcatcaaggtacttaaggcatataatcagactcacttgtacgcctgtggaacgggggcttttcatccaatttgcacctacattgaaattggacatcatcctgaggacaatatttttaagctggagaactcacattttgaaaacggccgtgggaagagtccatatgaccctaagctgctgacagcatcccttttaatagatggagaattatactctggaactgcagctgattttatggggcgagactttgctatcttccgaactcttgggcaccaccacccaatcaggacagagcagcatgattccaggtggctcaatgatccaaagttcattagtgcccacctcatctcagagagtgacaatcctgaagatgacaaagtatactttttcttccgtgaaaatgcaatagatggagaacactctggaaaagctactcacgctagaataggtcagatatgcaagaatgactttggagggcacagaagtctggtgaataaatggacaacattcctcaaagctcgtctgatttgctcagtgccaggtccaaatggcattgacactcattttgatgaactgcaggatgtattcctaatgaactttaaagatcctaaaaatccagttgtatatggagtgtttacgacttccagtaacattttcaagggatcagccgtgtgtatgtatagcatgagtgatgtgagaagggtgttccttggtccatatgcccacagggatggacccaactatcaatgggtgccttatcaaggaagagtcccctatccacggccaggaacttgtcccagcaaaacatttggtggttttgactctacaaaggaccttcctgatgatgttataacctttgcaagaagtcatccagccatgtacaatccagtgtttcctatgaacaatcgcccaatagtgatcaaaacggatgtaaattatcaatttacacaaattgtcgtagaccgagtggatgcagaagatggacagtatgatgttatgtttatcggaacagatgttgggaccgttcttaaagtagtttcaattcctaaggagacttggtatgatttagaagaggttctgctggaagaaatgacagtttttcgggaaccgactgctatttcagcaatggagctttccactaagcagcaacaactatatattggttcaacggctggggttgcccagctccctttacaccggtgtgatatttacgggaaagcgtgtgctgagtgttgcctcgcccgagacccttactgtgcttgggatggttctgcatgttctcgctattttcccactgcaaagagacgcacaagacgacaagatataagaaatggagacccactgactcactgttcagacttacaccatgataatcaccatggccacagccctgaagagagaatcatctatggtgtagagaatagtagcacatttttggaatgcagtccgaagtcgcagagagcgctggtctattggcaattccagaggcgaaatgaagagcgaaaagaagagatcagagtggatgatcatatcatcaggacagatcaaggccttctgctacgtagtctacaacagaaggattcaggcaattacctctgccatgcggtggaacatgggttcatacaaactcttcttaaggtaaccctggaagtcattgacacagagcatttggaagaacttcttcataaagatgatgatggagatggctctaagaccaaagaaatgtccaatagcatgacacctagccagaaggtctggtacagagacttcatgcagctcatcaaccaccccaatctcaacacgatggatgagttctgtgaacaagtttggaaaagggaccgaaaacaacgtcggcaaaggccaggacataccccagggaacagtaacaaatggaagcacttacaagaaaataagaaaggtagaaacaggaggacccacgaatttgagagggcacccaggagtgtctgagctgcattacctctagaaacctcaaacaagtagaaacttgcctagacaat

SEQ ID NO: 4020 - DNA, 7739 bp, Homo sapiens; identical to SEQ ID NO: 1380

SEQ ID NO: 4021 - DNA, 1377 bp, Homo sapiens
cgtcttcccctcctcccgtcctccctcgccccgcatgctcccggcttgccgcctgcaggatgagttccacccgttcatcgaggcactgctgcctcacgtccgcgctttctcctacacctggttcaacctgcaggcgcggaagcgcaagtacttcaagaagcatgaaaagcggatgtcgaaggacgaggagcgggcggtgaaggacgagctgctgggcgagaagcccgagatcaagcagaagtgggcatcccggctgctggccaagctgcgcaaggacatccggcccgagttccgcgaggacttcgtgctgaccatcacgggcaagaagcccccctgctgcgtgctctccaaccccgaccagaagggcaagatccggcggattgactgcctgcgccaggctgacaaggtgtggcggctggacctggtcatggtgattttgtttaaggggatccccctggaaagtactgatggggagcggctctacaagtcgcctcagtgctcgaaccccggcctgtgcgtccagccacatcacattggagtcacaatcaaagaactggatctttatctggcttactttgtccacactccggaatccggacaatcagatagttcaaaccagcaaggagatgcggacatcaaaccactgcccaacgggcacttaagtttccaggactgttttgtgacttccggggtctggaatgtgacggagctggtgagagtatcacagactcctgttgcaacagcatcagggcccaacttctccctggcggacctggagagtcccagctactacaacatcaaccaggtgaccctggggcggcggtccatcacctcccctccttccaccagcaccaccaagcgccccaagtccatcgatgacagtgagatggagagccctgttgatgacgtgttctatcccgggacaggccgttccccagcagctggcagcagccagtccagcgggtggcccaacgatgtggatgcaggcccggcttctctaaagaagtcaggaaagctggacttctgcagtgccctctcctctcagggcagctccccgcgcatggctttcacccaccacccgctgcctgtgcttgctggagtcagaccagggagcccccgggccacagcatcagccctgcacttcccctccacgtccatcatccagcagtcgagcccgtatttcacgcacccgaccatccgctaccaccaccaccacgggcaggactcactgaaggagtttgtgcagtttgtgtgctcggatggctcgggccaggccaccggacagcattcgcaacgacaggcgcctcctctgccaaccggtttgtcagcatcggaccccgggacggcaactttctgaacatcccacagcagtctcag

SEQ ID NO: 4022 - DNA, 1381 bp, Homo sapiens
cgtcttcccctcctcccgtcctccctcgccccgcatgctcccggcttgccgcctgcaggatgagttccacccgttcatcgaggcactgctgcctcacgtccgcgctttctcctacacctggttcaacctgcaggcgcggaagcgcaagtacttcaagaagcatgaaaagcggatgtcgaaggacgaggagcgggcggtgaaggacgagctgctgggcgagaagcccgagatcaagcagaagtgggcatcccggctgctggccaagctgcgcaaggacatccggcccgagttccgcgaggacttcgtgctgaccatcacgggcaagaagcccccctgctgcgtgctctccaaccccgaccagaagggcaagatccggcggattgactgcctgcgccaggctgacaaggtgtggcggctggacctggtcatggtgattttgtttaaggggatccccctggaaagtactgatggggagcggctctacaagtcgcctcagtgctcgaaccccggcctgtgcgtccagccacatcacattggagtcacaatcaaagaactggatctttatctggcttactttgtccacactccggaatccggacaatcagatagttcaaaccagcaaggagatgcggacatcaaaccactgcccaacgggcacttaagtttccaggactgttttgtgacttccggggtctggaatgtgacggagctggtgagagtatcacagactcctgttgcaacagcatcagggcccaacttctccctggcggacctggagagtcccagctactacaacatcaaccaggtgaccctggggcggcggtccatcacctcccctccttccaccagcaccaccaagcgccccaagtccatcgatgacagtgagatggagagccctgttgatgacgtgttctatcccgggacaggccgttccccagcagctggcagcagccagtccagcgggtggcccaacgatgtggatgcaggcccggcttctctaaagaagtcaggaaagctggacttctgcagtgccctctcctctcagggcagctccccgcgcatggctttcacccaccacccgctgcctgtgcttgctggagtcagaccagggagcccccgggccacagcatcagccctgcacttcccctccacgtccatcatccagcagtcgagcccgtatttcacgcacccgaccatccgctaccaccaccaccacgggcaggactcactgaaggagtttgtgcagtttgtgtgctcggatggctcgggccaggccaccggacagcattcgcaacgacaggcgcctcctctgccaaccggtttgtcagcatcggaccccgggacggcaactttctgaacatcccacagcagtctcagtcct

SEQ ID NO: 4023 - DNA, 1203 bp, Homo sapiens
aggcgtgagggagtgacagcagcgcattcgcgggacgagagcgatgagtgagaacgccgcaccaggtctgatctcagagctgaagctggctgtgccctggggccacatcgcagccaaagcctggggctccctgcagggccctccagttctctgcctgcacggctggctggacaataccagctccttcgacagactcatccctcttctcccgcaagacttttattacgttgccatggatttcggaggtcatgggctctcgtcccattacagcccaggtgtcccatattacctccagacttttgtgagtgagatccgaagagttgtggcagccttgaaatggaatcgattctccattctgggccacagcttcggtggcgtcgtgggcggaatgtttttctgtaccttccccgagatggtggataaacttatcttgctggacacgccgctctttctcctggaatcagatgaaatggagaaattgctgacctacaagcggagagccatagagcacgtgctgcaggtagaggcctcccaggagccctcgcacgtgttcagcctgaagcagctgctgcagaggttactgaagagcaatagccacttgagtgaggagtgcggggagcttctcctgcaaagaggaaccacgaaggtggccacaggtctggttctgaacagagaccagaggctcgcctgggcagagaacagcattgacttcatcagcagggagctgtgtgcgcattccatcaggaagctgcaggcccatgtcctgttgatcaaagcagtccacggatattttgattcaagacagaattactctgagaaggagtccctgtcgttcatgatagacacgatgaaatccaccctcaaagagcagttccagtttgtggaagtcccaggcaatcactgtgtccacatgagcgaaccccagcacgtggccagtatcatcagctccttcttacagtgcacacacatgctcccagcccagctgtagctctgggcctggaactatgaagacctagtgctcccagactcaacactgggactctgagttcctgagccccacaacaaggccagggatggtggggacaggcctcactagtcttgaggcccagcctaggatggtagtcaggggaaggagcgagattccaacttcaacatctgtgacctcaagagggagacagagtctgggttccagggctgctttct

SEQ ID NO: 4024 - DNA, 2316 bp, Homo sapiens; identical to SEQ ID NO: 203

SEQ ID NO: 4025 - DNA, 1711 bp, Homo sapiens
gctgaagtgccagggtgcttgtgaagtctaagcccttgtctggcatttgtcaggaatataggctgctgtatgtttccaggaaacttctaggacagaggctattcaacaagctcatgaagatgaccttctatgggcattttgtagccggggaggaccaggagtccatccagcccctgcttcggcactacagggccttcggtgtcagcgccatcctggactatggagtggaggaggacctgagccccgaggaggcagagcacaaggagatggagtcctgcacctcagctgcggagagggatggcagtggcacgaataagcgggacaagcaataccaggcccaccgggccttcggggaccgcaggaatggtgtcatcagtgcccgcacctacttctacgccaatgaggccaagtgcgacagccacatggagacattcttgcgctgcatcgaagcctcaggtagagtcagcgatgacggcttcatagccattaagctcacagcactggggagaccccagtttctgctgcagttctcagaggtgctggccaagtggaggtgcttctttcaccaaatggctgtggagcaagggcaggcgggcctggctgccatggacaccaagctggaggtggcggtgctgcaggaaagtgtcgcaaagttgggcatcgcatccagggctgagattgaggactggttcacggcagagaccctgggagtgtctggcaccatggacctgctggactggagcagcctcatcgacagcaggaccaagctgtccaagcacctggtagtccccaacgcacagacaggacagctggagcccctgctgtcccggttcactgaggaggaggagctacagatgaccaggatgctacagcggatggatgtcctggccaagaaagccacagagatgggcgtgcggctgatggtggatgccgagcagacctacttccagccggccatcagccgcctgacgctggagatgcagcggaagttcaatgtggagaagccgctcatcttcaacacataccagtgctacctcaaggatgcctatgacaatgtgaccctggatgtggagctggctcgccgtgagggctggtgttttggggccaagctggtgcggggcgcatacctggcccaggagcgagcccgtgcggcagagatcggctatgaggaccccatcaaccccacgtacgaggccaccaacgccatgtaccacaggtgcctggactacgtgttggaggagctgaagcacaacgccaaggccaaggtgatggtggcctcccacaatgaggacacagtgcgcttcgcactgcgcaggatggaggagctgggcctgcatcctgctgaccaccaggtgtactttggacagctgctaggcatgtgtgaccagatcagcttcccgctgggccaggccggctaccccgtgtacaagtacgtgccctatggccccgtgatggaggtgctgccctacttgtcccgccgtgccctggagaacagcagcctcatgaagggcacccatcgggagcggcagctgctgtggctggagctcttgaggcggctccgaactggcaacctcttccatcgccctgcctagcacccgccagcacaccctcagcctccagcaccccccgcccccgcccaggccatcaccacagctgcagccaaccccatcctcacacagattcaccttttttcaccccacacttgcagagc

SEQ ID NO: 4026 - DNA, 3572 bp, Homo sapiens; identical to SEQ ID NO: 1482

SEQ ID NO: 4027 - DNA, 6313 bp, Homo sapiens; identical to SEQ ID NO: 2405

SEQ ID NO: 4028 - DNA, 2750 bp, Homo sapiens; identical to SEQ ID NO: 655

SEQ ID NO: 4029 - DNA, 11457 bp, Homo sapiens; identical to SEQ ID NO: 148

SEQ ID NO: 4030 - DNA, 2114 bp, Homo sapiens; identical to SEQ ID NO: 1622

SEQ ID NO: 4031 - DNA, 786 bp, Homo sapiens
atgaatctacttctgatccttacctttgttgcagctgctgttgctgccccctttgatgatgatgacaagatcgttgggggctacatctgtgaggagaattctgtcccctaccaggtgtccttgaattctggctaccacttctgcggtggctccctcatcagcgaacagtgggtggtgtcagcaggtcactgctacaagtcggcaattaactcaaaattatcaggaagagggtgtgaatatcaccgcatccaggtgagactgggagagcacaacatcgaagtcctggaggggaatgaacagttcatcaatgcagccaagatcatccgccaccccaaatacaacagccggactctggacaatgacatcctgctgatcaagctctcctcacctgccgtcatcaattcccgcgtgtccgccatctctctgcccactgcccctccagctgctggcaccgagtccctcatctccggctggggcaacactctgagttctggtgccgactacccagacgagctgcagtgcctggatgctcctgtgctgagccaggctgagtgtgaagcctcctaccctggaaagattaccaacaacatgttctgtgtgggcttcctcgagggaggcaaggattcctgccagggtgattctggtggccctgtggtctccaatggagagctccaaggaattgtctcctggggctatggctgtgcccagaagaacaggcctggagtctacaccaaggtctacaactatgtggactggattaaggacaccatagctgccaacagctaa

SEQ ID NO: 4032 - DNA, 687 bp, Homo sapiens
tagagggagctattctttttgttgttgttcctgggaatatttcttatattaagggagtccaaaatagatgatgacttgaagttagtggtttcctttacttttaattttacagttaagggttcagcacggttttaaatattccttaagtatttgaaagatggccttagtgaatatgaggagttcaatttagtactgttcacattcacttgtttgagatgatttgccagttgacaatgtggcttttatggttattgtaagatggcatacttcaactgtattatttatagtcttctaaacaacctacgatccccaaatatccaatactaaattgcaggcacaccttgggcccaccccacctccacatagccttaattacaaatcagaggacaggcttagtgagcaagactggccagcatatttcaaggtcccatgttgtggggttgatacatctcaaattgagtcagaagaggcagaagtggatgtgagagaaagagagacacagagagacagagagccaaagagggcaagagacttgactttaagagactcctgtactgacaactccatgcagttcggaaccagaacgactacggctgaaccagggttcatggggacatggcaaaacgctgatactaacctcttattcagaatgtcccaacaggccatccgttgcacactggtaaactg

SEQ ID NO: 4033 - DNA, 1248 bp, Homo sapiens
tgacaaccagcatgccgagatggcacaccttgggcccaccccacctccacatagccttaattacaaatcagaggacaggcttagtgagcaagactggccagcatatttcaaggtcccatgttgtggggttgatacatctcaaattgagtcagaagaggcagaagtggatgtgagagaaagagagacacagagagacagagagccaaagagggcaagagacttgactttaagagactcctgtactgacaactccatgcagttcggaaccagaacgactacggctgaaccagggttcatggggacatggcaaaacgctgatactaacctcttattcagaatgtcccaacaggctggtctcaaactcctgacctcaggtgatccacccgtcttggacttccaaagtgctgggattacaggcgtgagccactgcacccggctgaaagttgctatgatttctaaggccatccgttgcacactggtaaactgcacatgtgaatgttttcagccagggaagattaacctgaggacttgtgatcagtgtaaacatggctgggtggcacatgccttggataagctcagcacgcagcacctgtaccaccccacccaagtggagattgtgcagtccaacgtcgtgtttgacatcagcagcctgatgctctatgggacacaagcagtgcctgtgcggctaaagatcctgctggaccgtctcttcagcgtcctgaagcaagaggaggtactgcacatactgcacggccttggctggactctgcgggactatgtccgaggatacatccttcaggatgctgctggcaaggtgctggaccgctgggccatcatgtctcgagaagaggaaatcatcacccttcagcagtttctgcggtttggagaaaccaaatccattgtggagctgatggcaattcaggagaaagaagggcaggccgtggctgtaccatcttcaaagacagactcagatataaggactttcattgagagcaataatcgcaccaggagtcccagcctccttgctcacttagagaacagcaatccttccagcattcatcacttcgaaaacatcccaaacagccttgcatttctgcttccattccagtacataaaccctgtctcagcaccactgctagggttgcctccaaatgggctactgttagagcaaccagggttgaggctgcgggaacccagcctttcaactcagaatgaatataatgagagcagcgaatccgaagtttctcc

SEQ ID NO: 4034 - DNA, 1244 bp, Homo sapiens
tgacaaccagcatgccgagatgattgcctggttttctctggaattctgtgcttcatggcttcttttcccttgataacatgacacatgactgatgacgtcaaagaaccttctagattttctcttctactggcacaccttgggcccaccccacctccacatagccttaattacaaatcagaggacaggcttagtgagcaagactggccagcatatttcaaggtcccatgttgtggggttgatacatctcaaattgagtcagaagaggcagaagtggatgtgagagaaagagagacacagagagacagagagccaaagagggcaagagacttgactttaagagactcctgtactgacaactccatgcagttcggaaccagaacgactacggctgaaccagggttcatggggacatggcaaaacgctgatactaacctcttattcagaatgtcccaacaggccatccgttgcacactggtaaactgcacatgtgaatgttttcagccagggaagattaacctgaggacttgtgatcagtgtaaacatggctgggtggcacatgccttggataagctcagcacgcagcacctgtaccaccccacccaagtggagattgtgcagtccaacgtcgtgtttgacatcagcagcctgatgctctatgggacacaagcagtgcctgtgcggctaaagatcctgctggaccgtctcttcagcgtcctgaagcaagaggaggtactgcacatactgcacggccttggctggactctgcgggactatgtccgaggatacatccttcaggatgctgctggcaaggtgctggaccgctgggccatcatgtctcgagaagaggaaatcatcacccttcagcagtttctgcggtttggagaaaccaaatccattgtggagctgatggcaattcaggagaaagaagggcaggccgtggctgtaccatcttcaaagacagactcagatataaggactttcattgagagcaataatcgcaccaggagtcccagcctccttgctcacttagagaacagcaatccttccagcattcatcacttcgaaaacatcccaaacagccttgcatttctgcttccattccagtacataaaccctgtctcagcaccactgctagggttgcctccaaatgggctactgttagagcaaccagggttgaggctgcgggaacccagcctttcaactcagaatgaatataatgagagcagcgaatccgaagtttctcc

SEQ ID NO: 4035 - DNA, 1232 bp, Homo sapiens
tgacaaccagcatgccgagatgctccaagaccggcccagacctctcgtttcatcttgccatgtcacgagtcaatgctgtgtcgtcttttcaaaaatctgcctgatttagacaagaaagaaaagtactttcatgttgcagccgcagtcccctgctaacttgtcagcagcaggatatgattcacttgggcccagaagaatggaacagagaggcgggttaggcggttcaataaagcccacggacagtcagaagaggcagaagtggatgtgagagaaagagagacacagagagacagagagccaaagagggcaagagacttgactttaagagactcctgtactgacaactccatgcagttcggaaccagaacgactacggctgaaccagggttcatggggacatggcaaaacgctgatactaacctcttattcagaatgtcccaacaggccatccgttgcacactggtaaactgcacatgtgaatgttttcagccagggaagattaacctgaggacttgtgatcagtgtaaacatggctgggtggcacatgccttggataagctcagcacgcagcacctgtaccaccccacccaagtggagattgtgcagtccaacgtcgtgtttgacatcagcagcctgatgctctatgggacacaagcagtgcctgtgcggctaaagatcctgctggaccgtctcttcagcgtcctgaagcaagaggaggtactgcacatactgcacggccttggctggactctgcgggactatgtccgaggatacatccttcaggatgctgctggcaaggtgctggaccgctgggccatcatgtctcgagaagaggaaatcatcacccttcagcagtttctgcggtttggagaaaccaaatccattgtggagctgatggcaattcaggagaaagaagggcaggccgtggctgtaccatcttcaaagacagactcagatataaggactttcattgagagcaataatcgcaccaggagtcccagcctccttgctcacttagagaacagcaatccttccagcattcatcacttcgaaaacatcccaaacagccttgcatttctgcttccattccagtacataaaccctgtctcagcaccactgctagggttgcctccaaatgggctactgttagagcaaccagggttgaggctgcgggaacccagcctttcaactcagaatgaatataatgagagcagcgaatccgaagtttctcc

SEQ ID NO: 4036 - DNA, 1221 bp, Homo sapiens
tgacaaccagcatgccgagatggcacaccttgggcccaccccacctccacatagccttaattacaaatcagaggacaggcttagtgagcaagactggccagcatatttcaaggtcccatgttgtggggttgatacatctcaaattgagtcagaagaggcagaagtggatgtgagagaaagagagacacagagagacagagagccaaagagggcaagagacttgactttaagagactcctgtactgacaactccatgcagttcggaaccagaacgactacggctgaaccagggttcatggggacatggcaaaacgctgatactaacctcttattcagaatgtcccaacaggttccattggcatgtactggcagagtgctgggggcagacttctgcccaaacctggaggagccataccacaggctggaagtccaggccatccgttgcacactggtaaactgcacatgtgaatgttttcagccagggaagattaacctgaggacttgtgatcagtgtaaacatggctgggtggcacatgccttggataagctcagcacgcagcacctgtaccaccccacccaagtggagattgtgcagtccaacgtcgtgtttgacatcagcagcctgatgctctatgggacacaagcagtgcctgtgcggctaaagatcctgctggaccgtctcttcagcgtcctgaagcaagaggaggtactgcacatactgcacggccttggctggactctgcgggactatgtccgaggatacatccttcaggatgctgctggcaaggtgctggaccgctgggccatcatgtctcgagaagaggaaatcatcacccttcagcagtttctgcggtttggagaaaccaaatccattgtggagctgatggcaattcaggagaaagaagggcaggccgtggctgtaccatcttcaaagacagactcagatataaggactttcattgagagcaataatcgcaccaggagtcccagcctccttgctcacttagagaacagcaatccttccagcattcatcacttcgaaaacatcccaaacagccttgcatttctgcttccattccagtacataaaccctgtctcagcaccactgctagggttgcctccaaatgggctactgttagagcaaccagggttgaggctgcgggaacccagcctttcaactcagaatgaatataatgagagcagcgaatccgaagtttctcc

SEQ ID NO: 4037 - DNA, 1008 bp, Homo sapiens
aaatgatagggatatctgtgcagaaggtgcgaaagaagctctgaccccctccctcccccaaatctcccccttcccaaatgaaatgcacagttcagccagcttcttaactacactacactcctgctactggctgccaagaggctcaaaaaatccaccttcacttttcagtcagaagaggcagaagtggatgtgagagaaagagagacacagagagacagagagccaaagagggcaagagacttgactttaagagactcctgtactgacaactccatgcagttcggaaccagaacgactacggctgaaccagggttcatggggacatggcaaaacgctgatactaacctcttattcagaatgtcccaacaggccatccgttgcacactggtaaactgcacatgtgaatgttttcagccagggaagattaacctgaggacttgtgatcagtgtaaacatggctgggtggcacatgccttggataagctcagcacgcagcacctgtaccaccccacccaagtggagattgtgcagtccaacgtcgtgtttgacatcagcagcctgatgctctatgggacacaagcagtgcctgtgcggctaaagatcctgctggaccgtctcttcagcgtcctgaagcaagaggaggtactgcacatactgcacggccttggctggactctgcgggactatgtccgaggatacatccttcaggatgctgctggcaaggtgctggaccgctgggccatcatgtctcgagaagaggaaatcatcacccttcagcagtttctgcggtttggagaaaccaaatccattgtggagctgatggcaattcaggagaaagaagggcaggccgtggctgtaccatcttcaaagacagactcagatataaggactttcattgagagcaataatcgcaccaggagtcccagcctccttgctcacttagagaacagcaatccttccagcattcatcacttcgaaaacatcccaaacagccttgcatttctgctt

SEQ ID NO: 4038 - DNA, 5101 bp, Homo sapiens; identical to SEQ ID NO: 1437

SEQ ID NO: 4039 - DNA, 2057 bp, Homo sapiens
gggaatggagattgcctgtatccacctagattcataagctgccctgaggcgatcttggcatcaagaaagacagcattgaggcacatctcaccatcagcttcagaggatgtcagcctttgatatgtcccatgggttttttcccagggaaccaatctgtccttttgaagaaaagacaaagataggaacgatggtagaggaccaccggtcaaattcttaccaggattcagtgacgtttgatgatgtggctgtggagttcaccccagaggagtgggctttactggacacaactcagaaatacctctacagagatgtgatgctggagaactacatgaacctggcctctgtggatttctttttctgcttaacttcagaatgggaaatacaacctagaaccaaacggtcatcacttcagcagggttttttgaagaatcaaatattcactgggatacaaatgcagacaagaagctacagtggatggaaactctgtgagaattgtggagaggtcttcagtgaacagttttgccttaagacacacatgagagctcagaatggagggaacacttttgagggtaattgttatggaaaagacagcatcagtgtgcacaaggaagcctctattggacaagaactttccaaatttaatccatgtggaaaagtcttcaccttaactccaggccttgctgtgcatcttgaaattctcaatggaagacaaccctacaaatgtaaggaatgtggaaaaggctttaagtattttgcaagccttgataatcacatgggaatccacattggagagaaactctgtgaatttcaggaatgtgagagagccatcacaacttcctcacacttaaagcagtgtgtagcagttcatactggaaagaaatccgaaaagactaagaactgtgggaaatccttcactaatttttctcaactttctgcacatgcaaaaactcataaaggagagaagtcctttgaatgtaaagaatgtggaagatcctttagaaattcctcatcctttaatgttcacattcaaattcacactggaataaaaccacacaaatgtacggaatgtgggaaagccttcactagatcaactcaccttactcaacatgtaagaactcacactggaataaaaccctatgaatgtaaggaatgtggccaagccttcactcagtacacgggccttgctatacacatacgaaatcacactggagagaaaccctatcagtgtaaggaatgtgggaaagccttcaatagatcttcaacgcttactcaacatagaagaattcacacaggagagaagccttatgaatgtgttgaatgtgggaagaccttcattacttcttcccatcgtagtaaacatttgaaaactcacagtggagaaaggtaaatgcaagatatgtgggaaagaatttctgtattcctcaccccacctgtgaactcctaccagagagaaaccttttgtatgtaaagaatttgggaaagcatttgctctttcctcatgcctaagtatgcatgaaagaattcacactggggagaaatactatgaatgtaaggatatgagtgttgttaccatttagcccattggttgccatctttaattattggcagtgcaaagatcatcagattagtcctaaatgccttttggaggttgtaatggctcacagattggccttagatgcatcccgagggtctgaaattaaacctacaggttctgaatacaacatcatggttacctgagtctgggcatctgtgaagaagggtcatggatggtgaggtcagtactgcaggctgcctcaccttggtgattagattcctaagatcatagcattaacaagttctgtacgagataaatcatgcagattgatcccagcccctgttggttagtggctgccagtgtggcacattcatgtcaaaatttaccagaagccaagatgatgtaggccccagaggtggattgttaaaaagatgctcctccaaggttctcttctgttcccatggatcctgcagagcatgtcaggagtgaaaccatccataactgccagtgccctttcacagct

SEQ ID NO: 4040 - DNA, 2371 bp, Homo sapiens; identical to SEQ ID NO: 2400

SEQ ID NO: 4041 - DNA, 5566 bp, Homo sapiens; identical to SEQ ID NO: 264

SEQ ID NO: 4042 - DNA, 74 bp, Homo sapiens; identical to SEQ ID NO: 1447

SEQ ID NO: 4043 - DNA, 800 bp, Homo sapiens
accaccatgaatccactcctgatccttacctttgttgcagctgctgttgctgccccctttgatgatgatgacaagatcgttgggggctacatctgtgaggagaattctgtcccctaccaggtgtccttgaattctggctaccacttctgcggtggctccctcatcagcgaacagtgggtggtgtcagcaggtcactgctacaagtcccgcatccaggtgagactgggagagcacaacatcgaagtcctggaggggaatgaacagttcatcaatgcagccaagatcatccgccaccccaaatacaacagccggactctggacaatgacatcctgctgatcaagctctcctcacctgccgtcatcaattcccgcgtgtccgccatctctctgcccactgcccctccagctgctggcaccgagtccctcatctccggctggggcaacactctgagttctggtgccgactacccagacgagctgcagtgcctggatgctcctgtgctgagccaggctgagtgtgaagcctcctaccctggaaagattaccaacaacatgttctgtgtgggcttcctcgagggaggcaaggattcctgccagggtgattctggtggccctgtggtctccaatggagagctccaaggaattgtctcctggggctatggctgtgcccagaagaacaggcctggagtctacaccaaggtctacaactatgtggactggattaaggacaccatagctgccaacagctaaagcccctggtccctctgcagtctctataccaataaagtgaccctgttctc

SEQ ID NO: 4044 - DNA, 800 bp, Homo sapiens
accaccatgaatccactcctgatccttacctttgtggcagctgctcttgctgccccctttgatgatgatgacaagatcgttgggggctacaactgtgaggagaattctgtcccctaccaggtgtccctgaattctggctaccacttctgtggtggctccctcatcaacgaacagtgggtggtatcagcaggccactgctacaagtcccgcatccaggtgagactgggagagcacaacatcgaagtcctggaggggaatgagcagttcatcaatgcagccaagatcatccgccacccccaatacgacaggaagactctggacaatgacatcctgctgatcaagctctcctcacctgccgtcatcaattcccgcgtgtccgccatctctctgcccactgcccctccagctgctggcaccgagtccctcatctccggctggggcaacactctgagttctggtgccgactacccagacgagctgcagtgcctggatgctcctgtgctgagccaggctgagtgtgaagcctcctaccctggaaagattaccaacaacatgttctgtgtgggcttcctcgagggaggcaaggattcctgccagggtgattctggtggccctgtggtctccaatggagagctccaaggaattgtctcctggggctatggctgtgcccagaagaacaggcctggagtctacaccaaggtctacaactatgtggactggattaaggacaccatagctgccaacagctaaagcccctggtccctctgcagtctctataccaataaagtgaccctgttctc

SEQ ID NO: 4045 - DNA, 2829 bp, Homo sapiens
ctgcgaccccaagcaggtatagacacgtgtggccgtttacgctgtaggatcctcattcccactggctttgaacattttggggacttacaatgccgccacccgcggacatcgtcaaggtggccatagaatggccgggcgcctaccccaaactcatggaaattgatcagaaaaaaccactgtctgcaataataaaggaagtctgtgatgggtggtctcttgccaaccatgaatattttgcactccagcatgccgatagttcaaacttctatatcacagaaaagaaccgcaatgagataaaaaatggcactatccttcgattaaccacatctccagctcagaacgcccagcagctccatgaacgaatccagtcctcgagtatggatgccaagctggaagccctgaaggacttggccagcctctcccgggatgtcacgtttgcccaggagtttataaacctggacggtatctctctcctcacgcagatggtagagagcggcactgagcgataccagaaattgcagaagatcatgaagccttgctttggagacatgctgtccttcaccctgacggccttcgttgagctgatggaccatggcatagtgtcctgggatacattttcggtggcgttcattaagaagatagcaagttttgtgaacaagtcagccatagacatctcgatcctgcagcggtccttggccattttggagtcgatggtgctcaatagccatgacctctaccagaaagtggcgcaggagatcaccatcggccagctcattccacacctgcaagggtcagatcaagaaatccaaacctatactattgcagtgattaatgcgcttttcctgaaggctcctgatgagaggaggcaggagatggcgaatattttggctcagaagcaactgcgttccatcattttaacacatgtcatccgagcccagcgggccatcaacaatgagatggcgcaccagctgtatgttctacaagtgctcacctttaacctcctggaagacaggatgatgaccaaaatggacccccaggaccaggctcagagggacatcatatttgaacttcgaagaattgcttttgatgctgagtctgaacctaacaacagcagtggcagcatggagaaacgcaagtccatgtacacgcgagattataagaagcttgggttcattaatcatgtcaaccctgccatggacttcacgcagactccacctgggatgttggctctggacaacatgctgtactttgccaagcaccaccaagatgcctacatccggattgtgcttgagaacagtagtcgagaagacaagcatgaatgtccctttggccgcagtagtatagagctgaccaagatgctatgtgagatcttgaaagtgggcgagttgcctagtgagacctgcaacgacttccacccgatgttcttcacccacgacagatcctttgaggagtttttctgcatctgtatccagctcctgaacaagacatggaaggaaatgagggcaacttctgaagacttcaacaaggtaatgcaggtggtgaaggagcaggttatgagagcacttacaaccaagcctagctccctggaccagttcaagagcaaactgcagaacctgagctacactgagatcctgaaaatccgccagtccgagaggatgaaccaggaagatttccagtcccgcccgattttggaactaaaggagaagattcagccagaaatcttagagctgatcaaacagcaacgcctgaaccgccttgtggaagggacctgctttaggaaactcaatgcccggcggaggcaagacaagttttggtattgtcggctttcgccaaatcacaaagtcctgcattacggagacttagaagagagtcctcagggagaagtgccccacgattccttgcaggacaaactgccggtggcagatatcaaagccgtggtgacgggaaaggactgccctcatatgaaagagaaaggtgcccttaaacaaaacaaggaggtgcttgaactcgctttctccatcttgtatgactcaaactgccaactgaacttcatcgctcctgacaagcatgagtactgtatctggacggatggactgaatgcgctactcgggaaggacatgatgagcgacctgacgcggaatgacctggacaccctgctcagcatggaaatcaagctccgcctcctggacctggaaaacatccagatccctgacgcacctccgccgattcccaaggagcccagcaactatgacttcgtctatgactgtaactgaagtggccgggcccagacatgccccttccaaaactggaacacctagctaacaggagagaggaatgaaaacacacccacgccttggaaccgtcctttggtaaagggaagctgtgggtccacattcccttcagcatcacctctagccctggcaactttcagcccctagctggcatcttgctcaccgccctgattctgttcctcggctccactgcttcaggtcacttcccatggctgcagtccactggtgggacaagagcaaagcccactgccagtaagaaggccaaagggcccttccatcctagccctctgcaggcatgcccttccttcccttgggcaggaaagccagcagccccagactgcccaaaaacttgcccaccagaccaagggcagtgccccaaggcccctgtctggaggaaatggcctagctatttgatgagaagaccaaaccccacatcctcctttcccctctctctagaatcatctcgcaccaccagttacacttgaattaagatctgcgctcaaatctcctcccacctctctccctgcttttgccttgc

SEQ ID NO: 4046 - DNA, 1206 bp, Homo sapiens
aggcgtgagggagtgacagcagcgcattcgcgggacgagagcgatgagtgagaacgccgcaccaggtctgatctcagagctgaagctggctgtgccctggggccacatcgcagccaaagcctggggctccctgcagggccctccagttctctgcctgcacggctggctggacaatgccagctccttcgacagactcatccctcttctcccgcaagacttttattacgttgccatggatttcggaggtcatgggctctcgtcccattacagcccaggtgtcccatattacctccagacttttgtgagtgagatccgaagagttgtggcagccttgaaatggaatcgattctccattctgggccacagcttcggtggcgtcgtgggcggaatgtttttctgtaccttccccgagatggtggataaacttatcttgctggacacgccgctctttctcctggaatcagatgaaatggagaacttgctgacctacaagcggagagccatagagcacgtgctgcaggtagaggcctcccaggagccctcgcacgtgttcagcctgaagcagctgctgcagaggttactgaagagcaatagccacttgagtgaggagtgcggggagcttctcctgcaaagaggaaccacgaaggtggccacaggtctggttctgaacagagaccagaggctcgcctgggcagagaacagcattgacttcatcagcagggagctgtgtgcgcattccatcaggaagctgcaggcccatgtcctgttgatcaaagcagtccacggatattttgattcaagacagaattactctgagaaggagtccctgtcgttcatgatagacacgatgaaatccaccctcaaagagcagttccagtttgtggaagtcccaggcaatcactgtgtccacatgagcgaaccccagcacgtggccagtatcatcagctccttcttacagtgcacacacatgctcccagcccagctgtagctctgggcctggaactatgaagacctagtgctcccagactcaacactgggactctgagttcctgagccccacaacaaggccagggatggtggggacaggcctcactagtcttgaggcccagcctaggatggtagtcaggggaaggagcgagattccaacttcaacatctgtgacctcaagagggagacagagtctgggttccagggctgctttctgta

SEQ ID NO: 4047 - DNA, 2307 bp, Homo sapiens
gcgaccagagctcggaatgtaatcgaggatgctggccctgcggctgctcaacgtggtggcccccgcctacttcttgtgcatctccctggtgaccttcgtgctgcagctcttcctcttcctgcccagcatgcgcgaggaccccgcggccgcccggctcttctcgcccgccctgctccacggggcgctcttcctattcctctcggccaacgccctgggcaattacgtccttgtcatccagaactccccagacgacctgggggcctgccagggggcctcggccaggaagactccatgcccctcacctagcacccacttctgccgagtgtgcgccagagtcaccctgaggcacgaccatcactgtttcttcaccggcaactgcatcggcagcaggaacatgcgcaacttcgtcctgttctgcctctacacctccctggcctgcctctactccatggtggccggcgtggcctacatctccgctgtcctttccatctccttcgcccaccccttggccttcctcacgctcctgcccacctccatcagccagttcttctccggagctgtcctgggttctgaaatgttcgtcatcctcatgctctacctctggttcgccatcggcctggcctgcgccggcttctgctgccaccagctgctgttgatcctccgcgggcagacccgccaccaggtgcggaagggggtggcagtgagggcccggccctggcgcaagaacttacaagaggtcttcggaaagaggtggctgctgggcctgctggtccccatgttcaatgtcggaagtgagagctccaagcagcaggataagtagtagacactcccgtcatttatctctctgtctctgtcttgactcctcctgagcataaaaccatggcagccttgtctccacccatgactcactacaaccttgtgctggtaaggtcctagcatcttcccctcaccttccacccatgagaacagcgtgagctggtggatcatgacaaggaggaaaaatgtccccccaggcatttctaggctcctcacgagccagccaggtggctgctagctgttaggctgcctctgctttctttccgtccccttgggatccctgctttccccctcttcctggctcatccattctccaccgtgtctcattcatcactgctgtctgctagagcccttcctctcagcccccatgttgggagaggggagtggattcttgctgctggtatgagactccctgggacctagaggctggcaaatgtttaaaatcaccacgtgtaagaggcagccaagtcagctctgccaactgctaggggagttgggaaagagtgggtgtgtgtccgcatcccctctgtaggaaaaagaacttagtagcttgctgctccctcaccaccccccaccaggttcaagaccctttttctgggagacagcaatcaatggcctgctttttccaaatgttattccctgtccgccctgccccatctggccggcccagcccagtccaggacctggctggatgcttcctgtccctggaactcttccagcctttctacttgatctccagcccccaggtctttgccagatgatgggaaggcaaggaagaagggacagggaaagataattactgataaatgaaggggatattcgactgtataaccatatggaagtgtgtgtgtgtgtgtgtgtgtgtgtgtgtgtgtgagagagagagagagagagagagagagagagagagatgggtggtggtgagaagtgttgttagaaacatataggaataatgcctaggggaaagggagaagtgagagggacaattgggttcatttatgccctatacaaagggcattccagcagctgaaactcttcaatgtttgaatggctgcctgtgaaggtagtgagtgccccatcactggaggtattccagcagagtctaggcagtcgtctgccaggcatgctgtggaagggatttctgtacagggtcattctaggtgagcttacacattccttccaaccccaaggttctgatgtcctggttgtgattgctggacccagaggcaagatctgcagagatgcctgtgagatatttgctttcctagaggggagtgtgggcatgggaggggtctgaaaatcaggacccaacccagccactgaagagagagtctctgcagagacagggctacctgggtggttgaggggactgacatttgaggacagggagatggagcagtgtcattgtcagtggcagggcatggggggcagtggtgagctaaggctgaggagtggagatgaccagaatataagggtgcaattcccagacca

SEQ ID NO: 4048 - DNA, 935 bp, Homo sapiens
atgggagacaatataacatccatcagagagttcctcctactgggatttcccgttggcccaaggattcagatgctcctctttgggctcttctccctgttctacgtcttcaccctgctggggaacgggaccatactggggctcatctcactggactccagactgcacgcccccatgtacttcttcctctcacacctggcggtcgtcgacatcgcctacgcctgcaacacggtgccccggatgctggtgaacctcctgcatccagccaagcccatctcctttgcgggccgcatgatgcagacctttctgttttccacttttgctgtcacagaatgtctcctcctggtggtgatgtcctatgatctgtacgtggccatctgccaccccctccgatatttggccatcatgacctggagagtctgcatcaccctcgcggtgacttcctggaccactggagtccttttatccttgattcatcttgtgttacttctacctttacccttctgtaggccccagaaaatttatcactttttttgtgaaatcttggctgttctcaaacttgcctgtgcagatacccacatcaatgagaacatggtcttggccggagcaatttctgggctggtgggacccttgtccacaattgtagtttcatatatgtgcatcctctgtgctatccttcagatccaatcaagggaagttcagaggaaagccttccgcacctgcttctcccacctctgtgtgattggactcgtttatggcacagccattatcatgtatgttggacccagatatgggaaccccaaggagcagaagaaatatctcctgctgtttcacagcctctttaatcccatgctcaatccccttatctgtagtcttaggaactcagaagtgaagaatactttgaagagagtgctgggagtagaaagggctttatgagt

SEQ ID NO: 4049 - DNA, 3285 bp, Homo sapiens; identical to SEQ ID NO: 689

SEQ ID NO: 4050 - DNA, 1987 bp, Homo sapiens
tttttttttttgcccttatacctcttcgcctttctgtggttccatccacttcttccccctcctcctcccataaacaactctcctacccctgcacccccaataaataaataaaaggaggagggcaaggggggaggaggaggagtggtgctgcgaggggaaggaaaagggaggcagcgcgagagagccgggcagagtccgaaccgacagccagaagcccgcacgcacctcgcaccatgagatggcgacgcgccccgcgccgctccgggcgtcccggcccccgggcccagcgccccggctccgccgcccgctcgtcgccgccgctgccgctgctgccactactgctgctgctggggaccgcggccctggcgccgggggcggcggccggcaacgaggcggctcccgcgggggcctcggtgtgctactcgtccccgcccagcgtgggatcggtgcaggagctagctcagcgcgccgcggtggtgatcgagggaaaggtgcacccgcagcggcggcagcagggggcactcgacaggaaggcggcggcggcggcgggcgaggcaggggcgtggggcggcgatcgcgagccgccagccgcgggcccacgggcgctggggccgcccgccgaggagccgctgctcgccgccaacgggaccgtgccctcttggcccaccgccccggtgcccagcgccggcgagcccggggaggaggcgccctatctggtgaaggtgcaccaggtgtgggcggtgaaagccgggggcttgaagaaggactcgctgctcaccgtgcgcctggggacctggggccaccccgccttcccctcctgcgggaggctcaaggaggacagcaggtacatcttcttcatggagcccgacgccaacagcaccagccgcgcgccggccgccttccgagcctctttcccccctctggagacgggccggaacctcaagaaggaggtcagccgggtgctgtgcaagcggtgcgccttgcctccccgattgaaagagatgaaaagccaggaatcggctgcaggttccaaactagtccttcggtgtgaaaccagttctgaatactcctctctcagattcaagtggttcaagaatgggaatgaattgaatcgaaaaaacaaaccacaaaatatcaagatacaaaaaaagccagggaagtcagaacttcgcattaacaaagcatcactggctgattctggagagtatatgtgcaaagtgatcagcaaattaggaaatgacagtgcctctgccaatatcaccatcgtggaatcaaacgctacatctacatccaccactgggacaagccatcttgtaaaatgtgcggagaaggagaaaactttctgtgtgaatggaggggagtgcttcatggtgaaagacctttcaaacccctcgagatacttgtgcaagtgcccaaatgagtttactggtgatcgctgccaaaactacgtaatggccagcttctacagtacgtccactccctttctgtctctgcctgaataggagcatgctcagttggtgctgctttcttgttgctgcatctcccctcagattccacctagagctagatgtgtcttaccagatctaatattgactgcctctgcctgtcgcatgagaacattaacaaaagcaattgtattacttcctctgttcgcgactagttggctctgagatactaataggtgtgtgaggctccggatgtttctggaattgatattgaatgatgtgatacaaattgatagtcaatatcaagcagtgaaatatgataataaaggcatttcaaagtctcacttttattgataaaataaaaatcattctactgaacagtccatcttctttatacaatgaccacatcctgaaaagggtgttgctaagctgtaaccgatatgcacttgaaatgatggtaagttaattttgattcagaatgtgttatttgtcacaaataaacataataaaaggagttcagatgtttttcttcattaaccaaa

SEQ ID NO: 4051 - DNA, 7553 bp, Homo sapiens; identical to SEQ ID NO: 1745

SEQ ID NO: 4052 - DNA, 1411 bp, Homo sapiens
ccttcgcaagccctcatttcaccaggcccccggcttggggcgccttccttccccatggcgggacacctggcttcggatttcgccttctcgccccctccaggtggtggaggtgatgggccaggggggccggagccgggctgggttgatcctcggacctggctaagcttccaaggccctcctggagggccaggaatcgggccgggggttgggccaggctctgaggtgtgggggattcccccatgccccccgccgtatgagttctgtggggggatggcgtactgtgggccccaggttggagtggggctagtgccccaaggcggcttggagacctctcagcctgagggcgaagcaggagtcggggtggagagcaactccgatggggcctccccggagccctgcaccgtcacccctggtgccgtgaagctggagaaggagaagctggagcaaaacccggaggagtcccaggacatcaaagctctgcagaaagaactcgagcaatttgccaagctcctgaagcagaagaggatcaccctgggatatacacaggccgatgtggggctcaccctgggggttctatttgggaaggtattcagccaaacgaccatctgccgctttgaggctctgcagcttagcttcaagaacatgtgtaagctgcggcccttgctgcagaagtgggtggaggaagctgacaacaatgaaaatcttcaggagatatgcaaagcagaaaccctcgtgcaggcccgaaagagaaagcgaaccagtatcgagaaccgagtgagaggcaacctggagaatttgttcctgcagtgcccgaaacccacactgcagcagatcagccacatcgcccagcagcttgggctcgagaaggatgtggtccgagtgtggttctgtaaccggcgccagaagggcaagcgatcaagcagcgactatgcacaacgagaggattttgaggctgctgggtctcctttctcagggggaccagtgtcctttcctctggccccagggccccattttggtaccccaggctatgggagccctcacttcactgcactgtactcctcggtccctttccctgagggggaagcctttccccctgtctccgtcaccactctgggctctcccatgcattcaaactgaggtgcctgcccttctaggaatgggggacagggggaggggaggagctagggaaagaaaacctggagtttgtgccagggtttttgggattaagttcttcattcactaaggaaggaattgggaacacaaagggtgggggcaggggagtttggggcaactggttggagggaaggtgaagttcaatgatgctcttgattttaatcccacatcatgtatcacttttttcttaaataaagaagcctgggacacagtagatagacacacttaaaaaaaaaaa

SEQ ID NO: 4053 - DNA, 781 bp, Homo sapiens; identical to SEQ ID NO: 773

SEQ ID NO: 4054 - DNA, 1609 bp, Homo sapiens
agcagggacagtggagagggcgctgcgctcgggctacccaatgcgtggactatctgccgccgctgttcgtgcaatatgctggagctccagaacagctaaacggagtcgccacaccactgtttgtgctggatcgcagcgctgcctttccttatgaagaagacacaaacttggattctcacttgcatttatcttcagctgctcctatttaatcctctcgtcaaaactgaagggatctgcaggaatcgtgtgactaataatgtaaaagacgtcactaaattggtggcaaatcttccaaaagactacatgataaccctcaaatatgtccccgggatggatgttttgccaagtcattgttggataagcgagatggtagtacaattgtcagacagcttgactgatcttctggacaagttttcaaatatttctgaaggcttgagtaattattccatcatagacaaacttgtgaatatagtggatgaccttgtggagtgcgtgaaagaaaactcatctaaggatctaaaaaaatcattcaagagcccagaacccaggctctttactcctgaagaattctttagaatttttaatagatccattgatgccttcaaggactttgtagtggcatctgaaactagtgattgtgtggtttcttcaacattaagtcctgagaaagattccagagtcagtgtcacaaaaccatttatgttaccccctgttgcagccagctcccttaggaatgacagcagtagcagtaataggaaggccaaaaatccccctggagactccagcctacactgggcagccatggcattgccagcattgttttctcttataattggctttgcttttggagccttatactggaagaagagacagccaagtcttacaagggcagttgaaaatatacaaattaatgaagaggataatgagataagtatgttgcaagagaaagagagagagtttcaagaagtgtaattgtggcttgtatcaacactgttactttcgtacattggctggtaacagttcatgtttgcttcataaatgaagcagctttaaacaaattcatattctgtctggagtgacagaccacatctttatctgttcttgctacccatgactttatatggatgattcagaaattggaacagaatgttttactgtgaaactggcactgaattaatcatctataaagaagaacttgcatggagcaggactctattttaaggactgcgggacttgggtctcatttagaacttgcagctgatgttggaagagaaagcacgtgtctcagactgcatgtaccatttgcatggctccagaaatgtctaaatgctgaaaaaacacctagctttattcttcagatacaaactgcagcctgtagttatcctggtctctgcaagtagatttcagcttggatagtgagggtaacaatttttctcaaagggatctggaaaaaatgtttaaaactcagtagtgtcagccactgtacagtgtagaaagcagtgggaactgtgattggatttggcaacatgtcagctttatagttgccgattagtgatatgggtctgatttcgatctcttcctgatgtaaaccatgctcacccatatccca

SEQ ID NO: 4055 - DNA, 2792 bp, Homo sapiens
gaggaggcaggtggctttctagaagatgaccatagaggaccttccagattttccattagaaggaaatcctttgtttggaagatacccatttatattttctgcttctgataccccagttatcttttccatttctgcagcaccaatgccttcagactgtgaattttctttctttgatcctaatgatgcatcatgccaggaaattctttttgatcccaaaacttcagtttcagaattatttgccattttgagacagtgggttcctcaggtccaacaaaacattgacattattggaaatgagattcttaagagaggttgcaatgtgaatgatagagatggattgacagatatgactcttttacattatacctgcaaatctggagctcatggtattggtgatgtggaaacagctgtaaaatttgcaactcagcttattgacctgggagcagacattagtttgcggagtcgctggacaaacatgaatgctttgcattatgctgcttattttgatgtccctgaacttataagagtgattttgaaaacgtcgaaaccaaaagatgtggatgccacttgcagtgattttaattttggaacagctttgcatattgcagcatacaacttgtgtgcaggtgctgtgaagtgcctcttggagcagggagcaaatcctgcatttaggaatgacaaaggacagatccctgctgatgttgttccagacccagtagatatgccgttagagatggctgacgccgcagccactgctaaggaaatcaagcagatgcttctagatgcggtgcctctgtcatgtaacatctcaaaggccatgctcccaaattatgatcatgtcactggcaaggcaatgcttacgtcacttggcctgaagttgggggatcgtgttgttattgcaggacagaaggttggtacattaagattttgtggaacaactgaatttgcaagtgggcagtgggctggcattgaactggatgaaccagaaggaaaaaataatggaagtgttggaaaagtccagtactttaaatgtgcccccaagtatggtatttttgcacctctttcaaagataagtaaagcaaaaggtcgaaggaagaatataacacacactccttctacaaaagctgctgtacctctcatcaggtcccagaaaattgacgtagctcatgtgacgtcaaaagtaaatactggattaatgacatcaaaaaaagatagtgcttctgagtcaacactttcattgcctcctggtgaagaacttaaaactgtgacagagaaagatgttgccctgcttggatctgtcagcagctgctcctctacatcttctttggaacacagacagagctaccccaagaaacagaatgcaatcagcagtaacaagaagacaatgagcaaaagcccttccctttcatccagagccagtgctggtttgaattcctcagcaacatctacagcaaataatagccgttgcgagggggaactccgcctcggagagagagtgttagtggtaggacagagactgggcaccattaggttctttgggacaacaaacttcgctccaggatattggtatggtatagagcttgaaaaaccccatggcaagaatgatggttcagttggaggtgtgcagtattttagctgttctccaagatatggaatatttgctcccccatccagggtgcaaagagtaacagattccctggataccctttcagaaatttcttcaaataaacagaaccattcttatcctggttttaggagaagttttagcacaacttctgcttcttcccaaaaggagattaacagaagaaatgctttttccaaatcgaaagctgctttgcgtcgcagttggagcagcacccccaccgcaggtggcattgaagggagcgtgaagctgcacgaggggtctcaggtcctgctcacgagctccaatgagatgggtactgttaggtatgtgggccccactgactttgcttcaggtatctggcttggacttgagctccgaagcgccaagggaaaaaatgatgggtcagtgggtgacaagcgctatttcacctgtaagccgaaccatggagtcttagttcgaccgagcagagtgacctatcggggaattaatgggtcaaaacttgtggatgagaattgttaagcttctaaaatattaaataagctcaaatatatatatttggtgtaaataaagagtccatggtaaatggtttactttatttagccatattaaaattttgaaaatatagttatcttcttaaaaaccattataacaattcagagagagttctttacaaagccatgaatatgaactatggggaatcatggttcttttaaagcaattttcaaaataagtaccaattaaagctttaggttccaagaagattctgggactcaggaagaaaaagtgccatcaggtgaccagctgttgcatttcttgcttattctgttttgtttttgcacatcataatggatttttcttagtgccctaattgtgaagggtttctctagctttggttatgtgtaatgttcacgtgaccttttttttgtcaatcatttttggaatttttctttctttctgtgctttattactaataagtccaatgagtgagtagtagctagatgactagtatgtagttttatattttggtaaaattatttgccctttcagaaatgcctcatctaaagatacatgataattttggagttggaaggggccttagaggctctccagctctgcttcttgcccattgccaaatactgaaatggaagcccgtcttacctggggtcac

SEQ ID NO: 4056 - DNA, 1829 bp, Homo sapiens
ggcagctgtgctggcttatgctcttctccttctgctgctgccatcctccagcaagatgctagggtctttggggctttgggcattacttcccacagctgtggaagcacccccaaacaggcgaacctgtgtgttctttgaggcccctggagtgcggggaagcacaaagacactgggagagctgctagatacaggcacagagctccccagagctatccgctgcctctacagccgctgctgctttgggatctggaacctgacccaagaccgggcacaggtggaaatgcaaggatgccgagacagtgatgagccaggctgtgagtccctccactgtgacccaagtccccgagcccaccccagccctggctccactctcttcacctgctcctgtggcactgacttctgcaatgccaattacagccatctgcctcctccagggagccctgggactcctggctcccagggtccccaggctgccccaggtgagtccatctggatggcactggtgctgctggggctgttcctcctcctcctgctgctgctgggcagcatcatcttggccctgctacagcgaaagaactacagagtgcgaggtgagccagtgccagagccaaggccagactcaggcagggactggagtgtggagctgcaggagctgcctgagctgtgtttctcccaggtaatccgggaaggaggtcatgcagtggtttgggccgggcagctgcaaggaaaactggttgccatcaaggccttcccaccgaggtctgtggctcagttccaagctgagagagcattgtacgaacttccaggcctacagcacgaccacattgtccgatttatcactgccagccgggggggtcctggccgcctgctctctgggcccctgctggtactggaactgcatcccaagggctccctgtgccactacttgacccagtacaccagtgactggggaagttccctgcggatggcactgtccctggcccagggcctggcatttctccatgaggagcgctggcagaatggccaatataaaccaggtattgcccaccgagatctgagcagccagaatgtgctcattcgggaagatggatcgtgtgccattggagacctgggccttgccttggtgctccctggcctcactcagccccctgcctggacccctactcaaccacaaggcccagctgccatcatggaagctggcacccagaggtacatggcaccagagctcttggacaagactctggacctacaggattggggcatggccctccgacgagctgatatttactctttggctctgctcctgtgggagatactgagccgctgcccagatttgaggcctgacagcagtccaccacccttccaactggcctatgaggcagaactgggcaatacccctacctctgatgagctatgggccttggcagtgcaggagaggaggcgtccctacatcccatccacctggcgctgctttgccacagaccctgatgggctgagggagctcctagaagactgttgggatgcagacccagaagcacggctgacagctgagtgtgtacagcagcgcctggctgccttggcccatcctcaagagagccacccctttccagagagctgtccacgtggctgcccacctctctgcccagaagactgtacttcaattcctgcccctaccatcctcccctgtaggcctcagcggagtgcctgccacttcagcgttcagcaaggcccttgttccaggaatcctcagcctgcctgtaccctttctcctgtgtaaatatgcagtttatgtgtcatcaatgtacatgccaacataaatatggcgattg

SEQ ID NO: 4057 - DNA, 389 bp, Homo sapiens
ccctgagggccctttctctttccatctcaggaactcaaacatgaccaggaagatcttcacaaataccagggagcggtggaggcagcagaatgtcaacagcgcctttgccaagctgaggaagctcatccccactcaccctccagacaaaaagctgagcaaaaatgaaacgcttcgcctggcaatgaggtatatcaacttcttggtcaaggtcttgggggagcaaagcctgcaacaaacgggagtggctgctcaggggaacattctggggctcttccctcaaggaccccacctgccaggcctggaggacagaactctgcttgagaactaccaggttccttcacctggtccaagccaccacattccttagtgtggctctggctgtcatctcc

SEQ ID NO: 4058 - DNA, 3806 bp, Homo sapiens
gaggcaggggtgagaccggcggccacccgtgagccctccgcacccgcaccatgcagaagagcgtgcgctacaacgaggggcacgccctgtacctggcctttctggcgcgcaaggagggcaccaagcgcggcttcctgagtaagaagacggccgaggcgagccgctggcacgagaagtggttcgccctctaccagaatgtgctcttctacttcgagggcgagcagagctgccgcccggcgggcatgtacctcctggagggctgcagctgcgaacgaacgcccgcgccacccagggccggcgccgggcagggaggcgtccgagacgcgctggacaagcagtattactttactgttctttttggccatgaaggtcagaagccactggagctgcgctgtgaggaggagcaggatggtaaagagtggatggaggccattcaccaagccagttatgcagacattttgattgagagggaagtattaatgcagaagtacattcatctagttcagatcgtagagacagaaaaaattgcagctaaccaactccgacatcaacttgaagatcaagacacagaaatcgaaaggcttaaatcagagattattgctcttaataaaaccaaagaacgaatgcgaccttaccaaagcaaccaagaagacgaagatccagacatcaagaagattaaaaaggttcagagcttcatgcgaggatggttgtgcagaaggaaatggaagaccatcgtgcaggattacatttgttctcctcatgctgaaagtatgaggaagagaaaccagattgtgttcaccatggtggaggcagagtcagagtacgttcaccagctctacatcctggtcaatggctttctccggcccctgcgtatggccgccagctccaagaagccccccatcagccacgacgacgtcagcagtatttttcttaacagtgaaacaatcatgtttcttcatgaaatatttcatcaaggactaaaggcaaggatagcaaactggcccactttaattttagctgatctgtttgatattttgctccccatgctgaacatttatcaagaatttgtgcgtaatcaccagtacagcctgcaagttctcgccaattgtaagcaaaacagagattttgacaaactcttaaaacagtatgaagccaatccagcctgtgaggggaggatgctggagacattcttgacctatcccatgtttcagatccccagatatatcatcacactccatgagctccttgctcacacaccccatgagcatgtggaaaggaaaagcctggagtttgccaaatcaaagctagaggaactatccagagtaatgcacgatgaagtcagcgacactgaaaacataaggaaaaaccttgccatcgaaagaatgatcgtggagggctgtgacatcttgctggacaccagccaaacgttcatccgccaaggttctcttattcaagtaccttccgttgagagggggaaacttagtaaagttcgcctgggttcgttgtctttgaaaaaggaaggagagagacaatgcttcttatttacaaaacactttttaatatgtacaagaagttcaggagggaagcttcatctgctcaagacaggtggggttctgtctctaatagactgcacattgattgaggagccagatgcaagcgatgatgactctaaaggttctgggcaagtgtttgggcacctggattttaaaatagtggtggagcctcctgacgctgccgccttcactgttgtcttgttagcaccctcacgccaggagaaagctgcctggatgagtgacatcagtcagtgtgtggacaatatacgatgtaatggtttaatgactatagtgtttgaagagaattccaaagtcactgtgccacatatgattaagtctgatgcccgtcttcataaagacgacactgacatttgcttcagtaaaacactcaactcctgcaaagtgccccagatccgttatgccagcgtggagcgcctcttggaacgactgacagacttgcggtttcttagtattgatttcctcaacacctttctgcacacctatcgtattttcactactgccgctgtggtgctggggaaactctccgacatatacaagaggcctttcacctccatccctgtcaggtcattggaattgttttttgctaccagccagaacaacagaggtgaacatttggtggatggcaaatccccacgtctgtgtcgcaaattctcttccccgccaccactggctgtgtccagaacatcttccccagtgagggccagaaagctgtctttgacttctcccttgaactcaaagataggagcattggacctgacaacttccagcagtcccaccaccaccacccagagtcccgctgcgtctccaccaccacacactggtcagataccactggatctcagcagaggcctctcttctccagagcaaagcccgggaacggtagaagagaatgtcgataacccacgcgtggatctgtgtaacaagctaaaacgaagtattcaaaaagcagtcctagagtctgcaccagcggaccgagcaggagtggaaagctcccctgcagcggacaccacagaactttcaccttgcagatccccctcaactcctcggcacctccgctatcgacagcctggaggacagacggcggacaatgcccactgctctgtttcaccggcttctgcttttgcaatagccacagctgcagcaggacatgggagtccaccaggctttaacaacaccgagagaacatgtgataaagagtttattatacggagaacggctaccaatcgagttctgaacgtcctccgtcactgggtctcaaagcacgcacaggatttcgaactcaacaatgaactaaagatgaatgtcctaaatttgctagaagaagttttgcgagacccagaccttcttccccaagaaaggaaagccgccgcgaatatcctcagggccctttcacaagatgaccaagatgacatccacctaaaattagaggatataattcaaatgactgactgcatgaaggccgaatgctttgagtccttgtcggccatggagctggcagaacagatcaccctcctggaccatgtcattttcagaagcattccctacgaggagtttcttgggcaggggtggatgaagctggataaaaacgaaagaactccttacattatgaaaaccagccaacacttcaatgacatgagtaacctggtggcctcccagataatgaactatgctgatgtcagctcccgtgccaacgccatcgagaaatgggtggcagtggcggacatctgccgatgcctgcacaactacaacggcgtgctggagatcacctcggccttaaacagaagtgccatctacaggctgaagaaaacctgggccaaggtctctaagcagacaaaagctctaatggacaaacttcaaaagactgtttcctctgaaggaagatttaaaaatcttagagaaacccttaaaaattgtaaccctcctgcagttccttatcttgggatgtacttgacagacctggcatttattgaagaaggaacaccaaactttactgaggaaggccttgtcaatttctccaaaatgagaatgatatcacacatcatcagagagatacgccagttccagcagacttcctacagaatagatcatcagccaaaggtcgcacagtacttgcttgacaaagaccttatcatagatgaagatacgctatatgagctgtcactaaaaattgaacctcgactccctgcttgaagatctggccttgcccctgagtccacgggatgttcatggaaa

SEQ ID NO: 4059 - DNA, 3256 bp, Homo sapiens
catcagtgcccgcaaatctccgcgccaaggcgctgagctactcctttccgaggtgcgcctctggtcctccgtccctggtgcccagcagcggcgaggcggcatctccgctcccgccgccgtgtccaccgagccctgggatcagggtggcagttctcaacgatgggcaggagggacctcggcggcgacccctaaaacaataccatgccccgggatccccgctgctgccgcgccagcgtcttccctttccacctccctgaccctgtcggattcggatgagcccattgcaaggagaagacgcagccgtcagattgcagattgagcttaaccaagaagttcgtaggctaatcaaggctggcttgacctacaaaagaagaagagagttctgcctgcccacttgggcttgtgttgacacggctgataacttgccatcacctgttgccagtgtggaaaaattctccctgttgaattttttgcacatggaggacagcagcaaagagggcaacacaggctgataagaccagagacagcagggagattattttaccatacgccctcaggacgttccctctagctggagttctggacttcaacagaaccccatccagtcattttgattttgctgtttattttttttttctttttctttttcccaccacattgtattttatttccgtacttcagaaatgggcctacagaccacaaagtggcccagccatggggcttttttcctgaagtcttggcttatcatttccctggggctctactcacaggtgtccaaactcctggcctgccctagtgtgtgccgctgcgacaggaactttgtctactgtaatgagcgaagcttgacctcagtgcctcttgggatcccggagggcgtaaccgtactctacctccacaacaaccaaattaataatgctggatttcctgcagaactgcacaatgtacagtcggtgcacacggtctacctgtatggcaaccaactggacgaattccccatgaaccttcccaagaatgtcagagttctccatttgcaggaaaacaatattcagaccatttcacgggctgctcttgcccagctcttgaagcttgaagagctgcacctggatgacaactccatatccacagtgggggtggaagacggggccttccgggaggctattagcctcaaattgttgtttttgtctaagaatcacctgagcagtgtgcctgttgggcttcctgtggacttgcaagagctgagagtggatgaaaatcgaattgctgtcatatccgacatggccttccagaatctcacgagcttggagcgtcttattgtggacgggaacctcctgaccaacaagggtatcgccgagggcaccttcagccatctcaccaagctcaaggaattttcaattgtacgtaattcgctgtcccaccctcctcccgatctcccaggtacgcatctgatcaggctctatttgcaggacaaccagataaaccacattcctttgacagccttctcaaatctgcgtaagctggaacggctggatatatccaacaaccaactgcggatgctgactcaaggggtttttgataatctctccaacctgaagcagctcactgctcggaataacccttggttttgtgactgcagtattaaatgggtcacagaatggctcaaatatatcccttcatctctcaacgtgcggggtttcatgtgccaaggtcctgaacaagtccgggggatggccgtcagggaattaaatatgaatcttttgtcctgtcccaccacgacccccggcctgcctctcttcaccccagccccaagtacagcttctccgaccactcagcctcccaccctctctattccaaaccctagcagaagctacacgcctccaactcctaccacatcgaaacttcccacgattcctgactgggatggcagagaaagagtgaccccacctatttctgaacggatccagctctctatccattttgtgaatgatacttccattcaagtcagctggctctctctcttcaccgtgatggcatacaaactcacatgggtgaaaatgggccacagtttagtagggggcatcgttcaggagcgcatagtcagcggtgagaagcaacacctgagcctggttaacttagagccccgatccacctatcggatttgtttagtgccactggatgcttttaactaccgcgcggtagaagacaccatttgttcagaggccaccacccatgcctcctatctgaacaacggcagcaacacagcgtccagccatgagcagacgacgtcccacagcatgggctccccctttctgctggcgggcttgatcgggggcgcggtgatatttgtgctggtggtcttgctcagcgtcttttgctggcatatgcacaaaaaggggcgctacacctcccagaagtggaaatacaaccggggccggcggaaagatgattattgcgaggcaggcaccaagaaggacaactccatcctggagatgacagaaaccagttttcagatcgtctccttaaataacgatcaactccttaaaggagatttcagactgcagcccatttacaccccaaatgggggcattaattacacagactgccatatccccaacaacatgcgatactgcaacagcagcgtgccagacctggagcactgccatacgtgacagccagaggcccagcgttatcaaggcggacaattagactcttgagaacacactcgtgtgtgcacataaagacacgcagattacatttgataaatgttacacagatgcatttgtgcatttgaatactctgtaatttatacggtgtactatataatgggatttaaaaaaagtgctatcttttctatttcaagttaattacaaacagttttgtaactctttgctttttaaatcttaaaaaaaaaaaagttgctgaagtactgtacagggttgtacaatgagaacccaatgccaaggcaaaaagaacgagtgatttttccttaggatacacatcaaccactttgctgttgaagctgtcagaataaattcctggtggtcagatgaaagggcagattaaatggactcatcagggtaagaggaataatatgggtaaaacaagaaatggcccgatagtttcacactattcctatacctccaggtccggaagacaggtaaaaaattctataatgtaagaatggaggtagttaccctgatttgaccctgtgtgggaaatgctgaaagcaccaggaggaagccggttcccgtgagataag

SEQ ID NO: 4060 - DNA, 5190 bp, Homo sapiens; identical to SEQ ID NO: 44

SEQ ID NO: 4061 - DNA, 5167 bp, Homo sapiens; identical to SEQ ID NO: 724

SEQ ID NO: 4062 - DNA, 9505 bp, Homo sapiens
cacattctgaccgccagggaacactggtagttctttaggtggcgtttgttgctgtgaaaggcagagaatgcagcaagtgcccttctaaagcacttcagactggggcttcttttgtaaaagctccccaacctgaatgaccaaatgcgggctgccaaggttatttcttccttgaggcagaaaaaaagaaaactgtgattgaagaggacaagtcgtacaatggtggaggaataggttcttcaaataggatcatggacttcttggaggagccaatccctggtgtagggacctatgatgatttcaatacaattgattgggtgagagagaagtctcgagaccgggataggcaccgagagattaccaataaaagcaaagagtcaacatgggccttaattcacagtgtgagtgatgctttttccggctggttgttgatgctccttattgggcttttatcaggttcgttagctggtttgatagacatctctgctcattggatgacagacttaaaagaaggtatatgcacagggggattctggtttaaccatgaacattgttgctggaactctgagcatgtcacctttgaagagagagacaaatgtccagagtggaatagttggtcccagcttatcatcagcacagatgagggagcctttgcctacatagtcaattatttcatgtacgtcctctgggctctcctatttgccttccttgccgtatctcttgtcaaggtgtttgcgccttatgcctgtggctctggaatccctgagataaaaactatcttgagtggtttcattattaggggctatttgggtaagtggactctggttatcaaaaccatcaccttggtgctggcagtgtcgtctggcttgagcctgggcaaagagggccctctagtgcacgtggcttgctgctgtgggaacatcctgtgccactgcttcaacaaatacaggaagaatgaagccaagcgcagagaggtcttgtcggctgcagcagcagctggtgtatctgtagcctttggagcacctataggtggagtattattcagccttgaagaggtcagctactattttcccctcaaaacattgtggcgttcattctttgctgccttggtggcagcattcactctacgctccatcaatccatttgggaacagccgcctggtactattttatgtggagtttcacaccccatggcatctctttgagctcgtgccattcattctgctgggcatatttggtggtctgtggggagcactgtttatccgcacaaacattgcctggtgtcggaagcgaaagaccacccagttgggcaagtatcctgttatagaggtactcgtcgtgacagccatcactgccatcctggctttccccaatgaatacactcggatgagcacaagtgagctcatttctgagctgtttaatgactgtggccttctggactcctccaagctctgtgattatgagaaccgtttcaacacaagcaaagggggtgaactgcctgacagaccggctggcgtgggagtctacagtgcaatgtggcagctggctttaacactcatactgaaaattgtcattactatattcacctttggcatgaagatcccttctggcctctttatccctagcatggctgttggtgctatagcaggtcgacttctaggagtaggaatggaacagctggcttattaccaccaggaatggaccgtcttcaatagctggtgtagtcagggagctgattgcatcacccccggcctttatgcaatggttggggctgcagcctgcttaggtggggtgactcggatgactgtttctcttgttgtcataatgtttgaactgactggtggcttagaatacatcgtgcctctgatggctgcagccatgacaagcaagtgggtggcagatgctcttgggcgggagggcatctatgatgcccacatccgtctcaatggatacccctttcttgaagccaaagaagagtttgctcataagaccctggcaatggatgtgatgaaaccccggagaaatgatcctttgttgactgtccttactcaggacagtatgactgtggaagatgtagagaccataatcagtgaaaccacttacagtggcttcccagtggtggtatcccgggagtcccaaagacttgtgggctttgtcctccgaagagatctcattatttcaattgaaaatgctcgaaagaaacaggatggggttgttagcacttccatcatttatttcacggagcattctcctccattgccaccatacactccacccactctaaagcttcggaacatcctcgatctcagccccttcactgtgactgaccttacacccatggagatcgtagtggatattttccgaaagctgggactgcggcagtgcctggttacacacaacgggcgattgcttggaatcattaccaaaaaggatgtgttaaagcatatagcacagatggcgaaccaagatcctgattccattctcttcaactagaatcatagagttctggatgtaaagcgggaaggacattacagaccatggatatgttgtattaactgggtacccaaaacacattttccatatttggatggtgaagtcacattagtgtgttgtctctttcctacaagttaaccagttgcactacataatctctggaaattaattttctctttaggagaaattatagttaggcttccatgatgttacattaggaagatatcatgaaagaataaataagattgctatggtttaattatatttgctttttaaaagatttttttaacttaaaaagtagttagccaatatgcaatcactgaaaactatgcaagagaaattccaaccgtcctgacctataacctgtaggaaaccgacgaaaaagtcactcttttgggatctaactgttgttactggaagacgaagtgtaaactaaggggctttgcttttcaaaccagagaaaggaaagccagaaggaaaagagtaatggtattttctagactgtgaagattcagttcaaatgttatccttgttcctgttacaatatttagcattattagtttgttatgtgtgtatgtttatgttaattttaatttctgattataagacaatgctgctttggttaatctcttctaaatgaatttagagagattgacttttatagcttgcttgttgctggtactcttttgaagtgcacaaagataagttatagagctttctccttgtctgcaaaaacggtaattttccaggtggcatttgttagctggtagacaaggactttgccgtgaatttgttagtagcaaggaatgatttcttccagcttccttgaaatgaataattagtaaacttctaagcaaagtcaatgactaggagtttcacatgtttgtgaggtcctaactaattctcttacccagatgccacctccatgaatgatggtgctttaggcttctggaatatgtaaaaacagcaaagggaaccaagtctagactgcatactggtaaaccagggaagactcagaactgcatatgcatcctcatgcattcctttgtaaagaccaccagtactaaaataactggacactcattgtacctcccagcgataagtatgtgtaacaggccagtgtgttgtccccatgatcatgaattaggcttgggatgcttccaaatatattcaaggtgttggaacaggataggcagctgtgactccctcaagagtccttagaattctaaataaaatgcagagccatcctaagacacaggggtatggacaaggcctggtgacaccaaaggtgcttgtatccaattgaaaaggtgcctgtctcaatttcataccacctttattgcagttaaaaaaaaatcacactctggggacacttggtggaattacagagccaccatcatcattccaaccactatttcattttctgtagttttacctgtgtgcaattactccccctccattctgttccacttcttactccttagtaccaaatcctctgtttgggattgagcgctgctcctggttaatcattcctactacaaaaaaaaataactcccagggctagttaaattgtaaaccaaggctcagcagtctcacaacacatggaccagaggtgacacacagccatttcctttgccatgtggcccagttgctgctgccatgcctccatttccacactggatgcctacggcagtgagatttcactgccggggtaagagttcagcctggatgattttatagctctgttcctagcacttctcatcatccttccagcccagaatcagcggtcattctgcatattcccaccaaccctctacccccaaacacttcagtgtacctcattttaagagttgctgatccctgattctaggacgtttttacccatagttcttgtctttccaaaatctgaaattcttttttttgctcagaactgggtagccaagggttattttatttttatctttaaaataatcaaggcagtcgctagagtttctccttgtgaatagatcactctagcattttaatgaaaaagaaaaaaatctttctggggtatgttgtatcatagtaatggctcagtaaccacatattttgtcctttccatgtcactgattccttcatatgagactatttggcttgactaccctgtatattgtgtagaaatcaaagttcttatctgtacatttctggtccaatacctgtcttattagttgtccttccccactaaagtttgcaaaacagaaaatgttactatttctggtatttaatgacaatgaaaggtttggtcatatttcatagtgcagtagcgataaggagggtgtctcaagtttgcttttgtgtttcttctaggctttgttcttgattttagacagatgagccagtgttaaggtgctacttcagagaataaattagagaaatcagataacactgtgccaaggtatactttgtagatgctaagcaccgattggccctccagagaatgacaatatccctttgatacctcactcctgatcaatctcattcattaacctcagcttctcaggaatccttgtagcttgtatgctagaagtagctatggtatatggtatccactatatgtccagtcctatggtttggctcaaaggttggctaattgcagctagagctctcaactgctagctcagcaccttgacatttgaagtttcttgtcttgaggagaaggaaaatgttctttctgccattgccactttaacagttggacatgcttaagcaacaaatacagccagtatagggaggactgtcagtagcatcaaatggccacatacctcaatggcaaaagactagatggtttgtgatttaaaaattaatgagtcgagatgagactattttggtattaaatgagaaaattgcctaacacaagggaagggtttacaaaagaatgccaattagtgtttcaacagagttaggattttccaagtaagagtagctggtagccatccagccataaaaggaacgagagtctatagatttgtaaaagtaaaactgctatattttgtatcttcaaatcttcaatataaagaatttaaagaacctgaaacagttaatgcatgattcgttatattggagggaaaaagcaggggactgataatacaaaataatggcaactttaaagatcatttctacgtggatgtttggttagaaacatattccaatgctctcctctttctctggccacagcatcctggctcagcccagctgtggagtagaggtggtaagatccacagaacagatatcctctggtagataagctgacattgatgatactttgaatttaccagctggtgaagcaaacgattaatttgtgattgaactgaaaagcagttgaattgttttgacaccagaggctgaatctaaaccctttacaggaagagcagagcatactatacatttcttagcagatcttcaattctgtttgaacatgatgaagtaaccagggtttagtgagatctaaggccgtgaagtaattcacaaccaagatcttatgaacgcattcagatgtgaggggggcaaatatgttttcaaaaacttagtgtgcaatagagtccattatagaaattaaccactgctatatgttttaagtagttcaatcacctgttgtggttcagtcttgattattgtttattttgttaggtgataagtaggaagatgcacttgttatcccacactatctcttgttttgttttgttttgtttttaaataatgaacagtgcaatctttgaacttgagtttttaataatgatagcaaagacaatggtgagaacttgaaacagccagcatattttatattgccaaagtacttactgatgactgaccacactgtcttgtgaggaactgggtcccctgcactggatcagagccaaatgcaagccacccatcagttcagaggaagcaggaaaacatcttttgggtggtgcatagaacattgagctcttaaaaacccggagaaaaattaggaatttagaaagtaagtgggaggtagaatattgagtccttttttaaaaaaaagaattgatgtctaaatatgtagtctgaacttaagtgtcctaaaaccttgttttttgtttttttgttttttgaggagtcgtcttgctctatcaccaggtgggagtgcagtggcacaatctcggctcactgtaacctctgcctcctgcctcccgggtccaagcaattcccctgcctcagtctcccaagtaggtgggactacaggcgcacaccaccatgcccagctaacttttgtatttttagtagagacggggtttcaccatgttggccaggatggtctcgatctcttgacctcgtgatccacccatctcggcctcccaaagtgctgggattataggtgtgagccaccgcacccagccaaaccttgatttttttagccacctctgggattgcctgggttccctttggagaagaaactaaaagttatggccatagaaaaagccctggtaagaaaatatttgaatggtgtaagatggtggaaggaaagccatcccacacccctacaacatatgttctggcatttataaactgcttgattgtgtgcctcaaggggagaaaaagtcaagcaatgcttcaaaggccaggctttctaagcaaatgagtggttcaaagcagtgtttggctcaagggcagtctggttttatggatagggccgacccaagacatctgctcatgaagaaatgtggcatctgttgccatttcctaaactataaggtttagatagattgtcttgaattttgatagcaaatttttttaaatttatatttctgcctcctcgtacatccttatatatggaaaaaaaagtaagagttcctcagatcagagctcagtagctgtgtcaatttgaagttcaatcagtgtagttgtcctggggtgatcgctgactctgctctgtttcatatttcagttgcttgctccaaggagagaatttctgagaacaatgggtgttagcaactttaagttactccccaaacgtttgctggccacattctcatttctaaacatctggatctgggtaaaggtttgaatagatgtagggaacaaaattggtttttccatggtgtagtctaattttgccaaatcacccaagaaagaaagtatatgacgtgtggagtttgcatttcttggatgggacctatcgggtcacccagcccagtcttacagtcataaattcctacctcttagttcctgccaaagggccttcagcctctgtgtgcacacttattgaatgaatgctttgcctaaagtttggccttttgaagaaaaacagcatgtgataatataaaaatatgagagtttaaaaaaaaaaaagatctctgcctctcttctctctgcctcgtcccaccttgctgtctgtctcattgtctttctctcccctcaccatgcgctgaattcagatttctctttcttttattataggcatgttgttttgaatgtggactttgtgggagggagaggattgttctgagaacagaaactggaagatacgtctgagttgatgggaccaacagggctttgctcctctgtgagggccaaagccattgatacttgtcgggggtgatgagggctttagcatctcaaggcagacatatgaagtatttactgctaaactatattacttactagtacaaatctgttggaattcaggggcagtctaagatttggtgagtgaaatgccatctggcaaaatcgagaagagagtgtggcctgagaggggaatgttcagcctcactgtcacattaagggtacctcaaaatacatggtccttccagtgtgttccttttccttcctccatttcactttgtcccctcttcttcctttctctcccattttcctggctttttagcactcagcttttttttataagtatgtatttactttttattatatatttggtcctttgggactttgtgatgattaagaatttattccattcaggattttaaaatgatgtgtttaatattttgttctcttaaactcttttgaagctatgctgctaaccaggtataggccagaaaggaggtggcccagtcagtaccttgctcacgtcagctaagggggacagtgatgtcatgtgggtgactcttcttcatttgaccaaggccagcctcctgttcttacctctgcccattcatttctggctatgggaaaactaccacctgttgagtgagccaatgaggccaggaagatcagaggggctgggttccggcccatgggccactatttgaatttctctgtagtaagctctttgtagggctggctccaactgcagtagccaaagaaaacctgtctgactcgacattttaatgcctgagagttggtgaaagttcagctgaagctaatgtctagacatcagcagtaactaggcatccagaaagtagcttcaaccaaagctaatagagcccaagtttccgcaggaagtttggtgctgagctgtccagagcagttgtttatctgagtgttgctagcccttagccatgctttcttagctttattctcgcctgttcctaggcatagcctgaaccagagctatggctcactgctcgctttattctactccctagtcatgcggaacaacatagtctaaaaaggaagatgtggactggggagttaggagacctgatttctattccctatgcttctactaactagcctcgagatcttaaccgctctgtgcctcagtgttcccatctgcaaaatggggatagtgttaattgccctacctacctcacagggttgttgtgaggataaactgagacaatgaattcaaagcaagttgacaagtaagtgctatgcaaattgtaagaaatggaaacaatcatgttaaaagcaatggaatggacattggcagaagggttaatggattgtccagccctttctctgtgtggcttaaacccaggtcgccattgctttatacattttcacttagcacagatttgtaattatgcatgtaataaagcacagccttatccaccctg

SEQ ID NO: 4063 - DNA, 7449 bp, Homo sapiens; identical to SEQ ID NO: 607

SEQ ID NO: 4064 - DNA, 7182 bp, Homo sapiens
tgtataagaatttgcacatcccaagttgctatgtgaataggaatgcgtttccaggggaaggagaaagagacattacagagcagacagctctatgatgtttactatacttgctaaaatgtgaaattcagctaaattggaatacaaagtagtgccaaaacagcattaggtttgcggagttattttaaacataattgaaaaatcaaggttttttaatactttaaataaaacatctgtttttcaatgtggtaatttaagtcctacgatgagtttattaacatgtgctttttatttagggtatgagctacagttccgattaggcccaactttacagggaaaagcagttaccgtgtatacaaattacccatttcctggagaaacatttaatagagaaaaattccgttctctggattgggaaaatccaacagaaagagaagatgattctgataaatactgtaaacttaatctgcaacaatctggttcatttcagtattatttccttcaaggaaatgagaaaagtggtggaggttacatagttgtggaccccattttacgtgttggtgctgataatcatgtgctacccttggactgtgttactcttcagacatttttagctaagtgtttgggaccttttgatgaatgggaaagcagacttagggttgcaaaagaatcaggctacaacatgattcattttaccccattgcagactcttggactatctaggtcatgctactcccttgccaatcagttagaattaaatcctgacttttcaagacctaatagaaagtatacctggaatgatgttggacagctagtggaaaaattaaaaaaggaatggaatgttatttgtattactgatgttgtctacaatcatactgctgctaatagtaaatggatccaggaacatccagaatgtgcctataatcttgtgaattctccacacttaaaacctgcctgggtcttagacagagcactttggcgtttctcctgtgatgttgcagaagggaaatacaaagaaaagggaatacctgctttgattgaaaatgatcaccatatgaattccatccgaaaaataatttgggaggatatttttccaaagcttaaactctgggaatttttccaagtagatgtcaacaaagcggttgagcaatttagaagacttcttacacaagaaaataggcgagtaaccaagtctgatccaaaccaacaccttacgattattcaagatcctgaatacagacggtttggctgtactgtagatatgaacattgcactaacgactttcataccacatgacaaggggccagcagcaattgaagaatgctgtaattggtttcataaaagaatggaggaattaaattcagagaagcatcgactcattaactatcatcaggaacaggcagttaattgccttttgggaaatgtgttttatgaacgactggctggccatggtccaaaactaggacctgtcactagaaagcatcctttagttaccaggtattttactttcccatttgaagagatagacttctccatggaagaatctatgattcatctgccaaataaagcttgttttctgatggcacacaatggatgggtaatgggagatgatcctcttcgaaactttgctgaaccgggttcagaagtttacctaaggagagaacttatttgctggggagacagtgttaaattacgctatgggaataaaccagaggactgtccttatctctgggcacacatgaaaaaatacactgaaataactgcaacttatttccagggagtacgtcttgataactgccactcaacacctcttcacgtagctgagtacatgttggatgctgctaggaatttgcaacccaatttatatgtagtagctgaactgttcacaggaagtgaagatctggacaatgtctttgttactagactgggcattagttccttaataagagaggcaatgagtgcatataatagtcatgaagagggcagattagtttaccgatatggaggagaacctgttggatcctttgttcagccctgtttgaggcctttaatgccagctattgcacatgccctgtttatggatattacgcatgataatgagtgtcctattgtgcatagatcagcgtatgatgctcttccaagtactacaattgtttctatggcatgttgtgctagtggaagtacaagaggctatgatgaattagtgcctcatcagatttcagtggtttctgaagaacggttttacactaagtggaatcctgaagcattgccttcaaacacaggtgaagttaatttccaaagcggcattattgcagccaggtgtgctatcagtaaacttcatcaggagcttggagccaagggttttattcaggtgtatgtggatcaagttgatgaagacatagtggcagtaacaagacactcacctagcatccatcagtctgttgtggctgtatctagaactgctttcaggaatcccaagacttcattttacagcaaggaagtgcctcaaatgtgcatccctggcaaaattgaagaagtagttcttgaagctagaactattgagagaaacacgaaaccttataggaaggatgagaattcaatcaatggaacaccagatatcacagtagaaattagagaacatattcagcttaatgaaagtaaaattgttaaacaagctggagttgccacaaaagggcccaatgaatatattcaagaaatagaatttgaaaacttgtctccaggaagtgttattatattcagagttagtcttgatccacatgcacaagtcgctgttggaattcttcgaaatcatctgacacaattcagtcctcactttaaatctggcagcctagctgttgacaatgcagatcctatattaaaaattccttttgcttctcttgcctccagattaactttggctgagctaaatcagatcctttaccgatgtgaatcagaagaaaaggaagatggtggagggtgctatgacataccaaactggtcagcccttaaatatgcaggtcttcaaggtttaatgtctgtattggcagaaataagaccaaagaatgacttggggcatcctttttgtaataatttgagatctggagattggatgattgactatgtcagtaaccggcttatttcacgatcaggaactattgctgaagttggtaaatggttgcaggctatgttcttctacctgaagcagatcccacgttaccttatcccatgttactttgatgctatattaattggtgcatataccactcttctggatacagcatggaagcagatgtcaagctttgttcagaatggttcaacctttgtgaaacacctttcattgggttcagttcaactgtgtggagtaggaaaattcccttccctgccaattctttcacctgccctaatggatgtaccttataggttaaatgagatcacaaaagaaaaggagcaatgttgtgtttctctagctgcaggcttacctcatttttcttctggtattttccgctgctggggaagggatacttttattgcacttagaggtatactgctgattactggacgctatgtagaagccaggaatattattttagcatttgcgggtaccctgaggcatggtctcattcctaatctactgggtgaaggaatttatgccagatacaattgtcgggatgctgtgtggtggtggctgcagtgtatccaggattactgtaaaatggttccaaatggtctagacattctcaagtgcccagtttccagaatgtatcctacagatgattctgctcctttgcctgctggcacactggatcagccattgtttgaagtcatacaggaagcaatgcaaaaacacatgcagggcatacagttccgagaaaggaatgctggtccccagatagatcgaaacatgaaggacgaaggttttaatataactgcaggagttgatgaagaaacaggatttgtttatggaggaaatcgtttcaattgtggcacatggatggataaaatgggagaaagtgacagagctagaaacagaggaatcccagccacaccaagagatgggtctgctgtggaaattgtgggcctgagtaaatctgctgttcgctggttgctggaattatccaaaaaaaatattttcccttatcatgaagtcacagtaaaaagacatggaaaggctataaaggtctcatatgatgagtggaacagaaaaatacaagacaactttgaaaagctatttcatgtttccgaagacccttcagatttaaatgaaaagcatccaaatctggttcacaaacgtggcatatacaaagatagttatggagcttcaagtccttggtgtgactatcagctcaggcctaattttaccatagcaatggttgtggcccctgagctctttactacagaaaaagcatggaaagctttggagattgcagaaaaaaaattgcttggtccccttggcatgaaaactttagatccagatgatatggtttactgtggaatttatgacaatgcattagacaatgacaactacaatcttgctaaaggtttcaattatcaccaaggacctgagtggctgtggcctattgggtattttcttcgtgcaaaattatatttttccagattgatgggcccggagactactgcaaagactatagttttggttaaaaatgttctttcccgacattatgttcatcttgagagatccccttggaaaggacttccagaactgaccaatgagaatgcccagtactgtcctttcagctgtgaaacacaagcctggtcaattgctactattcttgagacactttatgatttatagtttattacagatattaagtatgcaattacttgtattataggatgcaaggtcatcatatgtaaatgccttatatgcacaggctcaagttgttttaaaaatctcatttattataatattgatgctcaattaggtaagattgtaaaagcattgattttttttaatgtacagaggtagatttcaatttgaatcagaaagaaatatcattaccaatgaaatgtgtttgagttcagtaagaattattcaaatgcctagaaatccatagtttggaaaagaaaaatcatgtcatcttctatttgtacagaaatgaaaataaaatatgaaaataatgaaagaaatgaaaagatagcttttaattgtggtatatataatcttcagtaacaatacatactgaatacgctgtggttcattaatattaacaccacgtactatagtattcttaatacagtgctcactgcatttaataaatatttaataaatgatgaatgatagaagtttccatctacaatatatgttcctaaatggagcacagatgttcaaactatgctttcattttttcactgatatattaatttttgtgtaatgaatgccaacagtatattttatatgatttacttatgtgaggaaacatgcaaagcattaggaaatttatttcctaaaaacagttttgtaaaattagtattgagttctattgagtattataagatagcttacattttcaaaatggaaattgtcggtcatatttctagaactttaaagaaaaaagaatgttatattagttttctaaaactcaactatctttagtcatgttcaaaaatctattgctagatcatagtagatactggttttctattaactcaaaacctacattgacaagtttaacattgagaagaatcttaacaaaaatatggatatgaattcagtagatatcttaaattcaataaaatcactggaagtttttcatgataacttattttaagatgccttaaaaatcttaaagtcacaaaaggaaaaaggtttttaacatttacatgagttaacattttttcatagaacttatttcctagatagaattttttactgttttttactgttttcttaagaaaacagttaaatcattatgcattcagttggaagaaagtagtggcaagaattctttcattgctatataatattcagtggctcatttatacctaataaaataatggtattttaaaataatgctactttcaaagtagcatttttttagttagtttacaggttacatacccaaaaccttaactatgactaagaaattaaagaagaaaaccagcaaactaaaacttctgggcagcaaaaatatataaatgcttcagatgtcaaatacccatgcttgaaagctcgtgtaatttactttaagattatctgcctgctcttcttcaaagctgaccttgctttagaaatagttttaactagcttagttttctggtttccaaaactaaaatagattaaatcctacaaatttaaggacagttgtgacagtaatctgaccactatctataaatacattggacattggtttccaaatctccctttcttcttcagttccttccttgttcaatatatacccttctctaaactgtgcgggtaaaaggaatgactgtccttgagagaaccattagtttatcaaaggtttatgtagttttgttgctgtaccctaactttgatattcagggaggtaggaaaggtaacagaaaaccagcatatttaatcaaagcaagaagtaatcgctgacagttaaatgtgaccaaaaaaattaaaagttcacaatttttttaatgtagccatttggggttatctctagtaaggcagatacccacgttggtaaatttttaggatattgtgttgcactagaaaactaagtggttcatatttctaatgaggaagattaatgaaagaacattgttatattctgcgtggtatattttaaagtttaagaaggcatgttaaacattatttcctctatggtagttaaaatacagaattagatttttaacaggtgtcatttgactaaacgtttcggtagaatgcttcatacttgagtgatgctggataaggtattgtatttcaacaatggactatgccttggtttttcactaatcaaaatcaaaattactctttaacatgataaatgaatttaccagtttagtatgctgtggtattttaataagttttcaaagataattgggaaaacatgagactggtcatattgatgaatattgtaacatgtgaattgtgatccatttctgatatgtcttgaactactgtgtctagtgggcaaatgtcattgttacctctgtgtgttaagaaaataaaaatattttctaaaggtctgt

SEQ ID NO: 4065 - DNA, 7169 bp, Homo sapiens
ctgtctacggcagctattccagaggcaacaactgcttccctctgttctcatctccccattggtggctggcgacccgaatttgggaatggggagattgcccacctgttatctttgagcagactaatctcttgggtaactcattcgactgtggagttcttttaattcttatgaaagatttcaaatcctctagaagccaaaatgggacacagtaaacagattcgaattttacttctgaacgaaatggagaaactggaaaagaccctcttcagacttgaacaagggtatgagctacagttccgattaggcccaactttacagggaaaagcagttaccgtgtatacaaattacccatttcctggagaaacatttaatagagaaaaattccgttctctggattgggaaaatccaacagaaagagaagatgattctgataaatactgtaaacttaatctgcaacaatctggttcatttcagtattatttccttcaaggaaatgagaaaagtggtggaggttacatagttgtggaccccattttacgtgttggtgctgataatcatgtgctacccttggactgtgttactcttcagacatttttagctaagtgtttgggaccttttgatgaatgggaaagcagacttagggttgcaaaagaatcaggctacaacatgattcattttaccccattgcagactcttggactatctaggtcatgctactcccttgccaatcagttagaattaaatcctgacttttcaagacctaatagaaagtatacctggaatgatgttggacagctagtggaaaaattaaaaaaggaatggaatgttatttgtattactgatgttgtctacaatcatactgctgctaatagtaaatggatccaggaacatccagaatgtgcctataatcttgtgaattctccacacttaaaacctgcctgggtcttagacagagcactttggcgtttctcctgtgatgttgcagaagggaaatacaaagaaaagggaatacctgctttgattgaaaatgatcaccatatgaattccatccgaaaaataatttgggaggatatttttccaaagcttaaactctgggaatttttccaagtagatgtcaacaaagcggttgagcaatttagaagacttcttacacaagaaaataggcgagtaaccaagtctgatccaaaccaacaccttacgattattcaagatcctgaatacagacggtttggctgtactgtagatatgaacattgcactaacgactttcataccacatgacaaggggccagcagcaattgaagaatgctgtaattggtttcataaaagaatggaggaattaaattcagagaagcatcgactcattaactatcatcaggaacaggcagttaattgccttttgggaaatgtgttttatgaacgactggctggccatggtccaaaactaggacctgtcactagaaagcatcctttagttaccaggtattttactttcccatttgaagagatagacttctccatggaagaatctatgattcatctgccaaataaagcttgttttctgatggcacacaatggatgggtaatgggagatgatcctcttcgaaactttgctgaaccgggttcagaagtttacctaaggagagaacttatttgctggggagacagtgttaaattacgctatgggaataaaccagaggactgtccttatctctgggcacacatgaaaaaatacactgaaataactgcaacttatttccagggagtacgtcttgataactgccactcaacacctcttcacgtagctgagtacatgttggatgctgctaggaatttgcaacccaatttatatgtagtagctgaactgttcacaggaagtgaagatctggacaatgtctttgttactagactgggcattagttccttaataagagaggcaatgagtgcatataatagtcatgaagagggcagattagtttaccgatatggaggagaacctgttggatcctttgttcagccctgtttgaggcctttaatgccagctattgcacatgccctgtttatggatattacgcatgataatgagtgtcctattgtgcatagatcagcgtatgatgctcttccaagtactacaattgtttctatggcatgttgtgctagtggaagtacaagaggctatgatgaattagtgcctcatcagatttcagtggtttctgaagaacggttttacactaagtggaatcctgaagcattgccttcaaacacaggtgaagttaatttccaaagcggcattattgcagccaggtgtgctatcagtaaacttcatcaggagcttggagccaagggttttattcaggtgtatgtggatcaagttgatgaagacatagtggcagtaacaagacactcacctagcatccatcagtctgttgtggctgtatctagaactgctttcaggaatcccaagacttcattttacagcaaggaagtgcctcaaatgtgcatccctggcaaaattgaagaagtagttcttgaagctagaactattgagagaaacacgaaaccttataggaaggatgagaattcaatcaatggaacaccagatatcacagtagaaattagagaacatattcagcttaatgaaagtaaaattgttaaacaagctggagttgccacaaaagggcccaatgaatatattcaagaaatagaatttgaaaacttgtctccaggaagtgttattatattcagagttagtcttgatccacatgcacaagtcgctgttggaattcttcgaaatcatctgacacaattcagtcctcactttaaatctggcagcctagctgttgacaatgcagatcctatattaaaaattccttttgcttctcttgcctccagattaactttggctgagctaaatcagatcctttaccgatgtgaatcagaagaaaaggaagatggtggagggtgctatgacataccaaactggtcagcccttaaatatgcaggtcttcaaggtttaatgtctgtattggcagaaataagaccaaagaatgacttggggcatcctttttgtaataatttgagatctggagattggatgattgactatgtcagtaaccggcttatttcacgatcaggaactattgctgaagttggtaaatggttgcaggctatgttcttctacctgaagcagatcccacgttaccttatcccatgttactttgatgctatattaattggtgcatataccactcttctggatacagcatggaagcagatgtcaagctttgttcagaatggttcaacctttgtgaaacacctttcattgggttcagttcaactgtgtggagtaggaaaattcccttccctgccaattctttcacctgccctaatggatgtaccttataggttaaatgagatcacaaaagaaaaggagcaatgttgtgtttctctagctgcaggcttacctcatttttcttctggtattttccgctgctggggaagggatacttttattgcacttagaggtatactgctgattactggacgctatgtagaagccaggaatattattttagcatttgcgggtaccctgaggcatggtctcattcctaatctactgggtgaaggaatttatgccagatacaattgtcgggatgctgtgtggtggtggctgcagtgtatccaggattactgtaaaatggttccaaatggtctagacattctcaagtgcccagtttccagaatgtatcctacagatgattctgctcctttgcctgctggcacactggatcagccattgtttgaagtcatacaggaagcaatgcaaaaacacatgcagggcatacagttccgagaaaggaatgctggtccccagatagatcgaaacatgaaggacgaaggttttaatataactgcaggagttgatgaagaaacaggatttgtttatggaggaaatcgtttcaattgtggcacatggatggataaaatgggagaaagtgacagagctagaaacagaggaatcccagccacaccaagagatgggtctgctgtggaaattgtgggcctgagtaaatctgctgttcgctggttgctggaattatccaaaaaaaatattttcccttatcatgaagtcacagtaaaaagacatggaaaggctataaaggtctcatatgatgagtggaacagaaaaatacaagacaactttgaaaagctatttcatgtttccgaagacccttcagatttaaatgaaaagcatccaaatctggttcacaaacgtggcatatacaaagatagttatggagcttcaagtccttggtgtgactatcagctcaggcctaattttaccatagcaatggttgtggcccctgagctctttactacagaaaaagcatggaaagctttggagattgcagaaaaaaaattgcttggtccccttggcatgaaaactttagatccagatgatatggtttactgtggaatttatgacaatgcattagacaatgacaactacaatcttgctaaaggtttcaattatcaccaaggacctgagtggctgtggcctattgggtattttcttcgtgcaaaattatatttttccagattgatgggcccggagactactgcaaagactatagttttggttaaaaatgttctttcccgacattatgttcatcttgagagatccccttggaaaggacttccagaactgaccaatgagaatgcccagtactgtcctttcagctgtgaaacacaagcctggtcaattgctactattcttgagacactttatgatttatagtttattacagatattaagtatgcaattacttgtattataggatgcaaggtcatcatatgtaaatgccttatatgcacaggctcaagttgttttaaaaatctcatttattataatattgatgctcaattaggtaagattgtaaaagcattgattttttttaatgtacagaggtagatttcaatttgaatcagaaagaaatatcattaccaatgaaatgtgtttgagttcagtaagaattattcaaatgcctagaaatccatagtttggaaaagaaaaatcatgtcatcttctatttgtacagaaatgaaaataaaatatgaaaataatgaaagaaatgaaaagatagcttttaattgtggtatatataatcttcagtaacaatacatactgaatacgctgtggttcattaatattaacaccacgtactatagtattcttaatacagtgctcactgcatttaataaatatttaataaatgatgaatgatagaagtttccatctacaatatatgttcctaaatggagcacagatgttcaaactatgctttcattttttcactgatatattaatttttgtgtaatgaatgccaacagtatattttatatgatttacttatgtgaggaaacatgcaaagcattaggaaatttatttcctaaaaacagttttgtaaaattagtattgagttctattgagtattataagatagcttacattttcaaaatggaaattgtcggtcatatttctagaactttaaagaaaaaagaatgttatattagttttctaaaactcaactatctttagtcatgttcaaaaatctattgctagatcatagtagatactggttttctattaactcaaaacctacattgacaagtttaacattgagaagaatcttaacaaaaatatggatatgaattcagtagatatcttaaattcaataaaatcactggaagtttttcatgataacttattttaagatgccttaaaaatcttaaagtcacaaaaggaaaaaggtttttaacatttacatgagttaacattttttcatagaacttatttcctagatagaattttttactgttttttactgttttcttaagaaaacagttaaatcattatgcattcagttggaagaaagtagtggcaagaattctttcattgctatataatattcagtggctcatttatacctaataaaataatggtattttaaaataatgctactttcaaagtagcatttttttagttagtttacaggttacatacccaaaaccttaactatgactaagaaattaaagaagaaaaccagcaaactaaaacttctgggcagcaaaaatatataaatgcttcagatgtcaaatacccatgcttgaaagctcgtgtaatttactttaagattatctgcctgctcttcttcaaagctgaccttgctttagaaatagttttaactagcttagttttctggtttccaaaactaaaatagattaaatcctacaaatttaaggacagttgtgacagtaatctgaccactatctataaatacattggacattggtttccaaatctccctttcttcttcagttccttccttgttcaatatatacccttctctaaactgtgcgggtaaaaggaatgactgtccttgagagaaccattagtttatcaaaggtttatgtagttttgttgctgtaccctaactttgatattcagggaggtaggaaaggtaacagaaaaccagcatatttaatcaaagcaagaagtaatcgctgacagttaaatgtgaccaaaaaaattaaaagttcacaatttttttaatgtagccatttggggttatctctagtaaggcagatacccacgttggtaaatttttaggatattgtgttgcactagaaaactaagtggttcatatttctaatgaggaagattaatgaaagaacattgttatattctgcgtggtatattttaaagtttaagaaggcatgttaaacattatttcctctatggtagttaaaatacagaattagatttttaacaggtgtcatttgactaaacgtttcggtagaatgcttcatacttgagtgatgctggataaggtattgtatttcaacaatggactatgccttggtttttcactaatcaaaatcaaaattactctttaacatgataaatgaatttaccagtttagtatgctgtggtattttaataagttttcaaagataattgggaaaacatgagactggtcatattgatgaatattgtaacatgtgaattgtgatccatttctgatatgtcttgaactactgtgtctagtgggcaaatgtcattgttacctctgtgtgttaagaaaataaaaatattttctaaaggtctgt

SEQ ID NO: 4066 - DNA, 7182 bp, Homo sapiens
gggtaactcattcgactgtggagttcttttaattcttatgaaagatttcaaatcctctagaagccaaaatgggacacagtaaacagattcgaattttacttctgaacgaaatggagaaactggaaaagaccctcttcagacttgaacaagaaactgggtctcactatgttgcccaggttgatattgaactcctggactcaagcaaccctccctctttggcctctgaaagtactgggattacaagcataagccaccgggcatggccccaattctgagcattaatttatttattgggtatgagctacagttccgattaggcccaactttacagggaaaagcagttaccgtgtatacaaattacccatttcctggagaaacatttaatagagaaaaattccgttctctggattgggaaaatccaacagaaagagaagatgattctgataaatactgtaaacttaatctgcaacaatctggttcatttcagtattatttccttcaaggaaatgagaaaagtggtggaggttacatagttgtggaccccattttacgtgttggtgctgataatcatgtgctacccttggactgtgttactcttcagacatttttagctaagtgtttgggaccttttgatgaatgggaaagcagacttagggttgcaaaagaatcaggctacaacatgattcattttaccccattgcagactcttggactatctaggtcatgctactcccttgccaatcagttagaattaaatcctgacttttcaagacctaatagaaagtatacctggaatgatgttggacagctagtggaaaaattaaaaaaggaatggaatgttatttgtattactgatgttgtctacaatcatactgctgctaatagtaaatggatccaggaacatccagaatgtgcctataatcttgtgaattctccacacttaaaacctgcctgggtcttagacagagcactttggcgtttctcctgtgatgttgcagaagggaaatacaaagaaaagggaatacctgctttgattgaaaatgatcaccatatgaattccatccgaaaaataatttgggaggatatttttccaaagcttaaactctgggaatttttccaagtagatgtcaacaaagcggttgagcaatttagaagacttcttacacaagaaaataggcgagtaaccaagtctgatccaaaccaacaccttacgattattcaagatcctgaatacagacggtttggctgtactgtagatatgaacattgcactaacgactttcataccacatgacaaggggccagcagcaattgaagaatgctgtaattggtttcataaaagaatggaggaattaaattcagagaagcatcgactcattaactatcatcaggaacaggcagttaattgccttttgggaaatgtgttttatgaacgactggctggccatggtccaaaactaggacctgtcactagaaagcatcctttagttaccaggtattttactttcccatttgaagagatagacttctccatggaagaatctatgattcatctgccaaataaagcttgttttctgatggcacacaatggatgggtaatgggagatgatcctcttcgaaactttgctgaaccgggttcagaagtttacctaaggagagaacttatttgctggggagacagtgttaaattacgctatgggaataaaccagaggactgtccttatctctgggcacacatgaaaaaatacactgaaataactgcaacttatttccagggagtacgtcttgataactgccactcaacacctcttcacgtagctgagtacatgttggatgctgctaggaatttgcaacccaatttatatgtagtagctgaactgttcacaggaagtgaagatctggacaatgtctttgttactagactgggcattagttccttaataagagaggcaatgagtgcatataatagtcatgaagagggcagattagtttaccgatatggaggagaacctgttggatcctttgttcagccctgtttgaggcctttaatgccagctattgcacatgccctgtttatggatattacgcatgataatgagtgtcctattgtgcatagatcagcgtatgatgctcttccaagtactacaattgtttctatggcatgttgtgctagtggaagtacaagaggctatgatgaattagtgcctcatcagatttcagtggtttctgaagaacggttttacactaagtggaatcctgaagcattgccttcaaacacaggtgaagttaatttccaaagcggcattattgcagccaggtgtgctatcagtaaacttcatcaggagcttggagccaagggttttattcaggtgtatgtggatcaagttgatgaagacatagtggcagtaacaagacactcacctagcatccatcagtctgttgtggctgtatctagaactgctttcaggaatcccaagacttcattttacagcaaggaagtgcctcaaatgtgcatccctggcaaaattgaagaagtagttcttgaagctagaactattgagagaaacacgaaaccttataggaaggatgagaattcaatcaatggaacaccagatatcacagtagaaattagagaacatattcagcttaatgaaagtaaaattgttaaacaagctggagttgccacaaaagggcccaatgaatatattcaagaaatagaatttgaaaacttgtctccaggaagtgttattatattcagagttagtcttgatccacatgcacaagtcgctgttggaattcttcgaaatcatctgacacaattcagtcctcactttaaatctggcagcctagctgttgacaatgcagatcctatattaaaaattccttttgcttctcttgcctccagattaactttggctgagctaaatcagatcctttaccgatgtgaatcagaagaaaaggaagatggtggagggtgctatgacataccaaactggtcagcccttaaatatgcaggtcttcaaggtttaatgtctgtattggcagaaataagaccaaagaatgacttggggcatcctttttgtaataatttgagatctggagattggatgattgactatgtcagtaaccggcttatttcacgatcaggaactattgctgaagttggtaaatggttgcaggctatgttcttctacctgaagcagatcccacgttaccttatcccatgttactttgatgctatattaattggtgcatataccactcttctggatacagcatggaagcagatgtcaagctttgttcagaatggttcaacctttgtgaaacacctttcattgggttcagttcaactgtgtggagtaggaaaattcccttccctgccaattctttcacctgccctaatggatgtaccttataggttaaatgagatcacaaaagaaaaggagcaatgttgtgtttctctagctgcaggcttacctcatttttcttctggtattttccgctgctggggaagggatacttttattgcacttagaggtatactgctgattactggacgctatgtagaagccaggaatattattttagcatttgcgggtaccctgaggcatggtctcattcctaatctactgggtgaaggaatttatgccagatacaattgtcgggatgctgtgtggtggtggctgcagtgtatccaggattactgtaaaatggttccaaatggtctagacattctcaagtgcccagtttccagaatgtatcctacagatgattctgctcctttgcctgctggcacactggatcagccattgtttgaagtcatacaggaagcaatgcaaaaacacatgcagggcatacagttccgagaaaggaatgctggtccccagatagatcgaaacatgaaggacgaaggttttaatataactgcaggagttgatgaagaaacaggatttgtttatggaggaaatcgtttcaattgtggcacatggatggataaaatgggagaaagtgacagagctagaaacagaggaatcccagccacaccaagagatgggtctgctgtggaaattgtgggcctgagtaaatctgctgttcgctggttgctggaattatccaaaaaaaatattttcccttatcatgaagtcacagtaaaaagacatggaaaggctataaaggtctcatatgatgagtggaacagaaaaatacaagacaactttgaaaagctatttcatgtttccgaagacccttcagatttaaatgaaaagcatccaaatctggttcacaaacgtggcatatacaaagatagttatggagcttcaagtccttggtgtgactatcagctcaggcctaattttaccatagcaatggttgtggcccctgagctctttactacagaaaaagcatggaaagctttggagattgcagaaaaaaaattgcttggtccccttggcatgaaaactttagatccagatgatatggtttactgtggaatttatgacaatgcattagacaatgacaactacaatcttgctaaaggtttcaattatcaccaaggacctgagtggctgtggcctattgggtattttcttcgtgcaaaattatatttttccagattgatgggcccggagactactgcaaagactatagttttggttaaaaatgttctttcccgacattatgttcatcttgagagatccccttggaaaggacttccagaactgaccaatgagaatgcccagtactgtcctttcagctgtgaaacacaagcctggtcaattgctactattcttgagacactttatgatttatagtttattacagatattaagtatgcaattacttgtattataggatgcaaggtcatcatatgtaaatgccttatatgcacaggctcaagttgttttaaaaatctcatttattataatattgatgctcaattaggtaagattgtaaaagcattgattttttttaatgtacagaggtagatttcaatttgaatcagaaagaaatatcattaccaatgaaatgtgtttgagttcagtaagaattattcaaatgcctagaaatccatagtttggaaaagaaaaatcatgtcatcttctatttgtacagaaatgaaaataaaatatgaaaataatgaaagaaatgaaaagatagcttttaattgtggtatatataatcttcagtaacaatacatactgaatacgctgtggttcattaatattaacaccacgtactatagtattcttaatacagtgctcactgcatttaataaatatttaataaatgatgaatgatagaagtttccatctacaatatatgttcctaaatggagcacagatgttcaaactatgctttcattttttcactgatatattaatttttgtgtaatgaatgccaacagtatattttatatgatttacttatgtgaggaaacatgcaaagcattaggaaatttatttcctaaaaacagttttgtaaaattagtattgagttctattgagtattataagatagcttacattttcaaaatggaaattgtcggtcatatttctagaactttaaagaaaaaagaatgttatattagttttctaaaactcaactatctttagtcatgttcaaaaatctattgctagatcatagtagatactggttttctattaactcaaaacctacattgacaagtttaacattgagaagaatcttaacaaaaatatggatatgaattcagtagatatcttaaattcaataaaatcactggaagtttttcatgataacttattttaagatgccttaaaaatcttaaagtcacaaaaggaaaaaggtttttaacatttacatgagttaacattttttcatagaacttatttcctagatagaattttttactgttttttactgttttcttaagaaaacagttaaatcattatgcattcagttggaagaaagtagtggcaagaattctttcattgctatataatattcagtggctcatttatacctaataaaataatggtattttaaaataatgctactttcaaagtagcatttttttagttagtttacaggttacatacccaaaaccttaactatgactaagaaattaaagaagaaaaccagcaaactaaaacttctgggcagcaaaaatatataaatgcttcagatgtcaaatacccatgcttgaaagctcgtgtaatttactttaagattatctgcctgctcttcttcaaagctgaccttgctttagaaatagttttaactagcttagttttctggtttccaaaactaaaatagattaaatcctacaaatttaaggacagttgtgacagtaatctgaccactatctataaatacattggacattggtttccaaatctccctttcttcttcagttccttccttgttcaatatatacccttctctaaactgtgcgggtaaaaggaatgactgtccttgagagaaccattagtttatcaaaggtttatgtagttttgttgctgtaccctaactttgatattcagggaggtaggaaaggtaacagaaaaccagcatatttaatcaaagcaagaagtaatcgctgacagttaaatgtgaccaaaaaaattaaaagttcacaatttttttaatgtagccatttggggttatctctagtaaggcagatacccacgttggtaaatttttaggatattgtgttgcactagaaaactaagtggttcatatttctaatgaggaagattaatgaaagaacattgttatattctgcgtggtatattttaaagtttaagaaggcatgttaaacattatttcctctatggtagttaaaatacagaattagatttttaacaggtgtcatttgactaaacgtttcggtagaatgcttcatacttgagtgatgctggataaggtattgtatttcaacaatggactatgccttggtttttcactaatcaaaatcaaaattactctttaacatgataaatgaatttaccagtttagtatgctgtggtattttaataagttttcaaagataattgggaaaacatgagactggtcatattgatgaatattgtaacatgtgaattgtgatccatttctgatatgtcttgaactactgtgtctagtgggcaaatgtcattgttacctctgtgtgttaagaaaataaaaatattttctaaaggtctgt

SEQ ID NO: 4067 - DNA, 7109 bp, Homo sapiens
ctgtctacggcagctattccagaggcaacaactgcttccctctgttctcatctccccattggtggctggcgacccgaatttgggaatggggagattgcccacctgttatctttgagcagactaatctcttaagccaaaatgggacacagtaaacagattcgaattttacttctgaacgaaatggagaaactggaaaagaccctcttcagacttgaacaagggtatgagctacagttccgattaggcccaactttacagggaaaagcagttaccgtgtatacaaattacccatttcctggagaaacatttaatagagaaaaattccgttctctggattgggaaaatccaacagaaagagaagatgattctgataaatactgtaaacttaatctgcaacaatctggttcatttcagtattatttccttcaaggaaatgagaaaagtggtggaggttacatagttgtggaccccattttacgtgttggtgctgataatcatgtgctacccttggactgtgttactcttcagacatttttagctaagtgtttgggaccttttgatgaatgggaaagcagacttagggttgcaaaagaatcaggctacaacatgattcattttaccccattgcagactcttggactatctaggtcatgctactcccttgccaatcagttagaattaaatcctgacttttcaagacctaatagaaagtatacctggaatgatgttggacagctagtggaaaaattaaaaaaggaatggaatgttatttgtattactgatgttgtctacaatcatactgctgctaatagtaaatggatccaggaacatccagaatgtgcctataatcttgtgaattctccacacttaaaacctgcctgggtcttagacagagcactttggcgtttctcctgtgatgttgcagaagggaaatacaaagaaaagggaatacctgctttgattgaaaatgatcaccatatgaattccatccgaaaaataatttgggaggatatttttccaaagcttaaactctgggaatttttccaagtagatgtcaacaaagcggttgagcaatttagaagacttcttacacaagaaaataggcgagtaaccaagtctgatccaaaccaacaccttacgattattcaagatcctgaatacagacggtttggctgtactgtagatatgaacattgcactaacgactttcataccacatgacaaggggccagcagcaattgaagaatgctgtaattggtttcataaaagaatggaggaattaaattcagagaagcatcgactcattaactatcatcaggaacaggcagttaattgccttttgggaaatgtgttttatgaacgactggctggccatggtccaaaactaggacctgtcactagaaagcatcctttagttaccaggtattttactttcccatttgaagagatagacttctccatggaagaatctatgattcatctgccaaataaagcttgttttctgatggcacacaatggatgggtaatgggagatgatcctcttcgaaactttgctgaaccgggttcagaagtttacctaaggagagaacttatttgctggggagacagtgttaaattacgctatgggaataaaccagaggactgtccttatctctgggcacacatgaaaaaatacactgaaataactgcaacttatttccagggagtacgtcttgataactgccactcaacacctcttcacgtagctgagtacatgttggatgctgctaggaatttgcaacccaatttatatgtagtagctgaactgttcacaggaagtgaagatctggacaatgtctttgttactagactgggcattagttccttaataagagaggcaatgagtgcatataatagtcatgaagagggcagattagtttaccgatatggaggagaacctgttggatcctttgttcagccctgtttgaggcctttaatgccagctattgcacatgccctgtttatggatattacgcatgataatgagtgtcctattgtgcatagatcagcgtatgatgctcttccaagtactacaattgtttctatggcatgttgtgctagtggaagtacaagaggctatgatgaattagtgcctcatcagatttcagtggtttctgaagaacggttttacactaagtggaatcctgaagcattgccttcaaacacaggtgaagttaatttccaaagcggcattattgcagccaggtgtgctatcagtaaacttcatcaggagcttggagccaagggttttattcaggtgtatgtggatcaagttgatgaagacatagtggcagtaacaagacactcacctagcatccatcagtctgttgtggctgtatctagaactgctttcaggaatcccaagacttcattttacagcaaggaagtgcctcaaatgtgcatccctggcaaaattgaagaagtagttcttgaagctagaactattgagagaaacacgaaaccttataggaaggatgagaattcaatcaatggaacaccagatatcacagtagaaattagagaacatattcagcttaatgaaagtaaaattgttaaacaagctggagttgccacaaaagggcccaatgaatatattcaagaaatagaatttgaaaacttgtctccaggaagtgttattatattcagagttagtcttgatccacatgcacaagtcgctgttggaattcttcgaaatcatctgacacaattcagtcctcactttaaatctggcagcctagctgttgacaatgcagatcctatattaaaaattccttttgcttctcttgcctccagattaactttggctgagctaaatcagatcctttaccgatgtgaatcagaagaaaaggaagatggtggagggtgctatgacataccaaactggtcagcccttaaatatgcaggtcttcaaggtttaatgtctgtattggcagaaataagaccaaagaatgacttggggcatcctttttgtaataatttgagatctggagattggatgattgactatgtcagtaaccggcttatttcacgatcaggaactattgctgaagttggtaaatggttgcaggctatgttcttctacctgaagcagatcccacgttaccttatcccatgttactttgatgctatattaattggtgcatataccactcttctggatacagcatggaagcagatgtcaagctttgttcagaatggttcaacctttgtgaaacacctttcattgggttcagttcaactgtgtggagtaggaaaattcccttccctgccaattctttcacctgccctaatggatgtaccttataggttaaatgagatcacaaaagaaaaggagcaatgttgtgtttctctagctgcaggcttacctcatttttcttctggtattttccgctgctggggaagggatacttttattgcacttagaggtatactgctgattactggacgctatgtagaagccaggaatattattttagcatttgcgggtaccctgaggcatggtctcattcctaatctactgggtgaaggaatttatgccagatacaattgtcgggatgctgtgtggtggtggctgcagtgtatccaggattactgtaaaatggttccaaatggtctagacattctcaagtgcccagtttccagaatgtatcctacagatgattctgctcctttgcctgctggcacactggatcagccattgtttgaagtcatacaggaagcaatgcaaaaacacatgcagggcatacagttccgagaaaggaatgctggtccccagatagatcgaaacatgaaggacgaaggttttaatataactgcaggagttgatgaagaaacaggatttgtttatggaggaaatcgtttcaattgtggcacatggatggataaaatgggagaaagtgacagagctagaaacagaggaatcccagccacaccaagagatgggtctgctgtggaaattgtgggcctgagtaaatctgctgttcgctggttgctggaattatccaaaaaaaatattttcccttatcatgaagtcacagtaaaaagacatggaaaggctataaaggtctcatatgatgagtggaacagaaaaatacaagacaactttgaaaagctatttcatgtttccgaagacccttcagatttaaatgaaaagcatccaaatctggttcacaaacgtggcatatacaaagatagttatggagcttcaagtccttggtgtgactatcagctcaggcctaattttaccatagcaatggttgtggcccctgagctctttactacagaaaaagcatggaaagctttggagattgcagaaaaaaaattgcttggtccccttggcatgaaaactttagatccagatgatatggtttactgtggaatttatgacaatgcattagacaatgacaactacaatcttgctaaaggtttcaattatcaccaaggacctgagtggctgtggcctattgggtattttcttcgtgcaaaattatatttttccagattgatgggcccggagactactgcaaagactatagttttggttaaaaatgttctttcccgacattatgttcatcttgagagatccccttggaaaggacttccagaactgaccaatgagaatgcccagtactgtcctttcagctgtgaaacacaagcctggtcaattgctactattcttgagacactttatgatttatagtttattacagatattaagtatgcaattacttgtattataggatgcaaggtcatcatatgtaaatgccttatatgcacaggctcaagttgttttaaaaatctcatttattataatattgatgctcaattaggtaagattgtaaaagcattgattttttttaatgtacagaggtagatttcaatttgaatcagaaagaaatatcattaccaatgaaatgtgtttgagttcagtaagaattattcaaatgcctagaaatccatagtttggaaaagaaaaatcatgtcatcttctatttgtacagaaatgaaaataaaatatgaaaataatgaaagaaatgaaaagatagcttttaattgtggtatatataatcttcagtaacaatacatactgaatacgctgtggttcattaatattaacaccacgtactatagtattcttaatacagtgctcactgcatttaataaatatttaataaatgatgaatgatagaagtttccatctacaatatatgttcctaaatggagcacagatgttcaaactatgctttcattttttcactgatatattaatttttgtgtaatgaatgccaacagtatattttatatgatttacttatgtgaggaaacatgcaaagcattaggaaatttatttcctaaaaacagttttgtaaaattagtattgagttctattgagtattataagatagcttacattttcaaaatggaaattgtcggtcatatttctagaactttaaagaaaaaagaatgttatattagttttctaaaactcaactatctttagtcatgttcaaaaatctattgctagatcatagtagatactggttttctattaactcaaaacctacattgacaagtttaacattgagaagaatcttaacaaaaatatggatatgaattcagtagatatcttaaattcaataaaatcactggaagtttttcatgataacttattttaagatgccttaaaaatcttaaagtcacaaaaggaaaaaggtttttaacatttacatgagttaacattttttcatagaacttatttcctagatagaattttttactgttttttactgttttcttaagaaaacagttaaatcattatgcattcagttggaagaaagtagtggcaagaattctttcattgctatataatattcagtggctcatttatacctaataaaataatggtattttaaaataatgctactttcaaagtagcatttttttagttagtttacaggttacatacccaaaaccttaactatgactaagaaattaaagaagaaaaccagcaaactaaaacttctgggcagcaaaaatatataaatgcttcagatgtcaaatacccatgcttgaaagctcgtgtaatttactttaagattatctgcctgctcttcttcaaagctgaccttgctttagaaatagttttaactagcttagttttctggtttccaaaactaaaatagattaaatcctacaaatttaaggacagttgtgacagtaatctgaccactatctataaatacattggacattggtttccaaatctccctttcttcttcagttccttccttgttcaatatatacccttctctaaactgtgcgggtaaaaggaatgactgtccttgagagaaccattagtttatcaaaggtttatgtagttttgttgctgtaccctaactttgatattcagggaggtaggaaaggtaacagaaaaccagcatatttaatcaaagcaagaagtaatcgctgacagttaaatgtgaccaaaaaaattaaaagttcacaatttttttaatgtagccatttggggttatctctagtaaggcagatacccacgttggtaaatttttaggatattgtgttgcactagaaaactaagtggttcatatttctaatgaggaagattaatgaaagaacattgttatattctgcgtggtatattttaaagtttaagaaggcatgttaaacattatttcctctatggtagttaaaatacagaattagatttttaacaggtgtcatttgactaaacgtttcggtagaatgcttcatacttgagtgatgctggataaggtattgtatttcaacaatggactatgccttggtttttcactaatcaaaatcaaaattactctttaacatgataaatgaatttaccagtttagtatgctgtggtattttaataagttttcaaagataattgggaaaacatgagactggtcatattgatgaatattgtaacatgtgaattgtgatccatttctgatatgtcttgaactactgtgtctagtgggcaaatgtcattgttacctctgtgtgttaagaaaataaaaatattttctaaaggtctgt

SEQ ID NO: 4068 - DNA, 7371 bp, Homo sapiens
cccggaagtgggccagaggtacggtccgctcccacctggggcgagtgcgcgcacggccaggttgggtaccgggtgcgcccaggaacccgcgcgaggcgaagtcgctgagactctgcctgcttctcacccagctgcctcggcgctgccccggtcgctcgccgcccctccctttgcccttcacggcgcccggccctccttgggctgcggcttctgtgcgaggctgggcagccagcccttccccttctgtttctccccgtcccctccccccgaccgtagcaccagagtcgcgggtcctgcagtgccccagaagccgcacgtataactccctcggcgggtaactcattcgactgtggagttcttttaattcttatgaaagatttcaaatcctctagaagccaaaatgggacacagtaaacagattcgaattttacttctgaacgaaatggagaaactggaaaagaccctcttcagacttgaacaagggtatgagctacagttccgattaggcccaactttacagggaaaagcagttaccgtgtatacaaattacccatttcctggagaaacatttaatagagaaaaattccgttctctggattgggaaaatccaacagaaagagaagatgattctgataaatactgtaaacttaatctgcaacaatctggttcatttcagtattatttccttcaaggaaatgagaaaagtggtggaggttacatagttgtggaccccattttacgtgttggtgctgataatcatgtgctacccttggactgtgttactcttcagacatttttagctaagtgtttgggaccttttgatgaatgggaaagcagacttagggttgcaaaagaatcaggctacaacatgattcattttaccccattgcagactcttggactatctaggtcatgctactcccttgccaatcagttagaattaaatcctgacttttcaagacctaatagaaagtatacctggaatgatgttggacagctagtggaaaaattaaaaaaggaatggaatgttatttgtattactgatgttgtctacaatcatactgctgctaatagtaaatggatccaggaacatccagaatgtgcctataatcttgtgaattctccacacttaaaacctgcctgggtcttagacagagcactttggcgtttctcctgtgatgttgcagaagggaaatacaaagaaaagggaatacctgctttgattgaaaatgatcaccatatgaattccatccgaaaaataatttgggaggatatttttccaaagcttaaactctgggaatttttccaagtagatgtcaacaaagcggttgagcaatttagaagacttcttacacaagaaaataggcgagtaaccaagtctgatccaaaccaacaccttacgattattcaagatcctgaatacagacggtttggctgtactgtagatatgaacattgcactaacgactttcataccacatgacaaggggccagcagcaattgaagaatgctgtaattggtttcataaaagaatggaggaattaaattcagagaagcatcgactcattaactatcatcaggaacaggcagttaattgccttttgggaaatgtgttttatgaacgactggctggccatggtccaaaactaggacctgtcactagaaagcatcctttagttaccaggtattttactttcccatttgaagagatagacttctccatggaagaatctatgattcatctgccaaataaagcttgttttctgatggcacacaatggatgggtaatgggagatgatcctcttcgaaactttgctgaaccgggttcagaagtttacctaaggagagaacttatttgctggggagacagtgttaaattacgctatgggaataaaccagaggactgtccttatctctgggcacacatgaaaaaatacactgaaataactgcaacttatttccagggagtacgtcttgataactgccactcaacacctcttcacgtagctgagtacatgttggatgctgctaggaatttgcaacccaatttatatgtagtagctgaactgttcacaggaagtgaagatctggacaatgtctttgttactagactgggcattagttccttaataagagaggcaatgagtgcatataatagtcatgaagagggcagattagtttaccgatatggaggagaacctgttggatcctttgttcagccctgtttgaggcctttaatgccagctattgcacatgccctgtttatggatattacgcatgataatgagtgtcctattgtgcatagatcagcgtatgatgctcttccaagtactacaattgtttctatggcatgttgtgctagtggaagtacaagaggctatgatgaattagtgcctcatcagatttcagtggtttctgaagaacggttttacactaagtggaatcctgaagcattgccttcaaacacaggtgaagttaatttccaaagcggcattattgcagccaggtgtgctatcagtaaacttcatcaggagcttggagccaagggttttattcaggtgtatgtggatcaagttgatgaagacatagtggcagtaacaagacactcacctagcatccatcagtctgttgtggctgtatctagaactgctttcaggaatcccaagacttcattttacagcaaggaagtgcctcaaatgtgcatccctggcaaaattgaagaagtagttcttgaagctagaactattgagagaaacacgaaaccttataggaaggatgagaattcaatcaatggaacaccagatatcacagtagaaattagagaacatattcagcttaatgaaagtaaaattgttaaacaagctggagttgccacaaaagggcccaatgaatatattcaagaaatagaatttgaaaacttgtctccaggaagtgttattatattcagagttagtcttgatccacatgcacaagtcgctgttggaattcttcgaaatcatctgacacaattcagtcctcactttaaatctggcagcctagctgttgacaatgcagatcctatattaaaaattccttttgcttctcttgcctccagattaactttggctgagctaaatcagatcctttaccgatgtgaatcagaagaaaaggaagatggtggagggtgctatgacataccaaactggtcagcccttaaatatgcaggtcttcaaggtttaatgtctgtattggcagaaataagaccaaagaatgacttggggcatcctttttgtaataatttgagatctggagattggatgattgactatgtcagtaaccggcttatttcacgatcaggaactattgctgaagttggtaaatggttgcaggctatgttcttctacctgaagcagatcccacgttaccttatcccatgttactttgatgctatattaattggtgcatataccactcttctggatacagcatggaagcagatgtcaagctttgttcagaatggttcaacctttgtgaaacacctttcattgggttcagttcaactgtgtggagtaggaaaattcccttccctgccaattctttcacctgccctaatggatgtaccttataggttaaatgagatcacaaaagaaaaggagcaatgttgtgtttctctagctgcaggcttacctcatttttcttctggtattttccgctgctggggaagggatacttttattgcacttagaggtatactgctgattactggacgctatgtagaagccaggaatattattttagcatttgcgggtaccctgaggcatggtctcattcctaatctactgggtgaaggaatttatgccagatacaattgtcgggatgctgtgtggtggtggctgcagtgtatccaggattactgtaaaatggttccaaatggtctagacattctcaagtgcccagtttccagaatgtatcctacagatgattctgctcctttgcctgctggcacactggatcagccattgtttgaagtcatacaggaagcaatgcaaaaacacatgcagggcatacagttccgagaaaggaatgctggtccccagatagatcgaaacatgaaggacgaaggttttaatataactgcaggagttgatgaagaaacaggatttgtttatggaggaaatcgtttcaattgtggcacatggatggataaaatgggagaaagtgacagagctagaaacagaggaatcccagccacaccaagagatgggtctgctgtggaaattgtgggcctgagtaaatctgctgttcgctggttgctggaattatccaaaaaaaatattttcccttatcatgaagtcacagtaaaaagacatggaaaggctataaaggtctcatatgatgagtggaacagaaaaatacaagacaactttgaaaagctatttcatgtttccgaagacccttcagatttaaatgaaaagcatccaaatctggttcacaaacgtggcatatacaaagatagttatggagcttcaagtccttggtgtgactatcagctcaggcctaattttaccatagcaatggttgtggcccctgagctctttactacagaaaaagcatggaaagctttggagattgcagaaaaaaaattgcttggtccccttggcatgaaaactttagatccagatgatatggtttactgtggaatttatgacaatgcattagacaatgacaactacaatcttgctaaaggtttcaattatcaccaaggacctgagtggctgtggcctattgggtattttcttcgtgcaaaattatatttttccagattgatgggcccggagactactgcaaagactatagttttggttaaaaatgttctttcccgacattatgttcatcttgagagatccccttggaaaggacttccagaactgaccaatgagaatgcccagtactgtcctttcagctgtgaaacacaagcctggtcaattgctactattcttgagacactttatgatttatagtttattacagatattaagtatgcaattacttgtattataggatgcaaggtcatcatatgtaaatgccttatatgcacaggctcaagttgttttaaaaatctcatttattataatattgatgctcaattaggtaagattgtaaaagcattgattttttttaatgtacagaggtagatttcaatttgaatcagaaagaaatatcattaccaatgaaatgtgtttgagttcagtaagaattattcaaatgcctagaaatccatagtttggaaaagaaaaatcatgtcatcttctatttgtacagaaatgaaaataaaatatgaaaataatgaaagaaatgaaaagatagcttttaattgtggtatatataatcttcagtaacaatacatactgaatacgctgtggttcattaatattaacaccacgtactatagtattcttaatacagtgctcactgcatttaataaatatttaataaatgatgaatgatagaagtttccatctacaatatatgttcctaaatggagcacagatgttcaaactatgctttcattttttcactgatatattaatttttgtgtaatgaatgccaacagtatattttatatgatttacttatgtgaggaaacatgcaaagcattaggaaatttatttcctaaaaacagttttgtaaaattagtattgagttctattgagtattataagatagcttacattttcaaaatggaaattgtcggtcatatttctagaactttaaagaaaaaagaatgttatattagttttctaaaactcaactatctttagtcatgttcaaaaatctattgctagatcatagtagatactggttttctattaactcaaaacctacattgacaagtttaacattgagaagaatcttaacaaaaatatggatatgaattcagtagatatcttaaattcaataaaatcactggaagtttttcatgataacttattttaagatgccttaaaaatcttaaagtcacaaaaggaaaaaggtttttaacatttacatgagttaacattttttcatagaacttatttcctagatagaattttttactgttttttactgttttcttaagaaaacagttaaatcattatgcattcagttggaagaaagtagtggcaagaattctttcattgctatataatattcagtggctcatttatacctaataaaataatggtattttaaaataatgctactttcaaagtagcatttttttagttagtttacaggttacatacccaaaaccttaactatgactaagaaattaaagaagaaaaccagcaaactaaaacttctgggcagcaaaaatatataaatgcttcagatgtcaaatacccatgcttgaaagctcgtgtaatttactttaagattatctgcctgctcttcttcaaagctgaccttgctttagaaatagttttaactagcttagttttctggtttccaaaactaaaatagattaaatcctacaaatttaaggacagttgtgacagtaatctgaccactatctataaatacattggacattggtttccaaatctccctttcttcttcagttccttccttgttcaatatatacccttctctaaactgtgcgggtaaaaggaatgactgtccttgagagaaccattagtttatcaaaggtttatgtagttttgttgctgtaccctaactttgatattcagggaggtaggaaaggtaacagaaaaccagcatatttaatcaaagcaagaagtaatcgctgacagttaaatgtgaccaaaaaaattaaaagttcacaatttttttaatgtagccatttggggttatctctagtaaggcagatacccacgttggtaaatttttaggatattgtgttgcactagaaaactaagtggttcatatttctaatgaggaagattaatgaaagaacattgttatattctgcgtggtatattttaaagtttaagaaggcatgttaaacattatttcctctatggtagttaaaatacagaattagatttttaacaggtgtcatttgactaaacgtttcggtagaatgcttcatacttgagtgatgctggataaggtattgtatttcaacaatggactatgccttggtttttcactaatcaaaatcaaaattactctttaacatgataaatgaatttaccagtttagtatgctgtggtattttaataagttttcaaagataattgggaaaacatgagactggtcatattgatgaatattgtaacatgtgaattgtgatccatttctgatatgtcttgaactactgtgtctagtgggcaaatgtcattgttacctctgtgtgttaagaaaataaaaatattttctaaaggtctgt

SEQ ID NO: 4069 - DNA, 1831 bp, Homo sapiens; identical to SEQ ID NO: 1421

SEQ ID NO: 4070 - DNA, 3557 bp, Homo sapiens; identical to SEQ ID NO: 2169

SEQ ID NO: 4071 - DNA, 7992 bp, Homo sapiens; identical to SEQ ID NO: 653

SEQ ID NO: 4072 - DNA, 3913 bp, Homo sapiens
acttcgcggcttcttcatgctttttcttctcaccatttctggccaaaactacaaacaagacttcgcagatcgagcctgcgtgctgccgaagcagggcgccgagtccatgcgaactgccatctgatccgctcttatcaatgaagcagccgatcatggcggatggcccccggtgcaagaggcgcaaacaagccaatcccaggaggaaaaacgtggtgaactatgacaatgtagtggacacaggttctgaaacagatgaggaagacaagcttcatattgctgaggatgacggtattgccaaccctctggaccaggagacgagtccagctagtgtgcccaaccatgagtcctccccacacgtgagccaagctctgttgccaagagaggaagaggaagatgaaataagggagggtggagtggaacacccctggcacaacaacgagattctacaagcctctgtagatggtccagaaatgaaggaagactatgacactatggggccagaagccacgatccagaccgcaattaacaatggtacagtgaagaatgcaaattgcacatcagattttgaggaatactttgccaaaagaaaactggaggaacgcgatggtcatgcagtcagcatcgaggagtaccttcagcgcagtgacacagccattatttacccagaagcccctgaggagctgtctcgccttggcacgccagaggccaatgggcaagaagaaaatgacctgccacctggaactccagatgcttttgcccaactgctgacctgcccctactgcgaccggggctacaagcgcttgacatcactgaaggagcacatcaagtaccgccacgagaagaatgaagagaacttttcctgccctctctgtagctacacgtttgcctaccgcacccagctcgagcggcatatggtgacacacaagccagggacagatcagcaccaaatgctaacccaaggagcaggtaatcgcaagttcaaatgcacagagtgtggcaaggccttcaaatataaacaccatctgaaagaacacctgcgaattcacagtggtgaaaaaccttacgagtgcccaaactgcaagaaacgtttctcccattctggttcctacagttcgcacatcagcagcaagaaatgtattggtttaatctctgtaaatggccgaatgagaaacaatatcaagacgggttcttcccctaattctgtttcttcttctcctactaattcagccattacccagttaagaaacaagttggagaatggaaaaccacttagtatgtctgaacagacaggcttacttaaaattaaaacagaaccactagacttcaatgactataaagttcttatggctacacacgggtttagtggcactagtccctttatgaatggtgggcttggagccaccagccctttaggagttcatccatctgctcagagtccaatgcagcacttaggtgtagggatggaagcccctttacttgggtttcccaccatgaatagtaatttaagtgaggtacaaaaggttctacagattgtggacaatactgtttccaggcaaaaaatggactgcaaggctgaagaaatttcaaagttgaaaggttatcacatgaaggatccatgctctcaacctgaggaacaaggagttacttctcctaatattccgcctgtcggtcttccggtagtgagtcataatggtgccactaaaagtattattgactatacgttggaaaaagtcaatgaagccaaagcttgcctccagagcttgactactgactcaaggagacagatcagtaatataaagaaagagaagctacgtactttaatagatttggtcactgatgacaaaatgattgagaaccacaacatatccactccattttcatgccagttctgtaaagaaagttttcctggccccatccctttgcatcagcatgaacgttacctttgtaagatgaatgaagagatcaaggcggtcctgcagcctcatgaaaacatagtccccaacaaagccggagtttttgttgataataaagccctcctcttgtcatctgtactttctgagaaaggaatgacaagccccatcaacccatacaaggaccacatgtctgtactcaaagcatactatgctatgaacatggagcccaactccgatgaactgctgaaaatttccattgctgtgggccttcctcaggaatttgtgaaggaatggtttgaacaacgaaaagtctaccagtactcaaattccaggtccccatccctggaaagaagctccaagccgttagctcccaacagtaaccctcccacaaaagactctttattacccaggtctcctgtaaaacctatggactccataacatcaccatctatagcagaactccacaacagtgttacgaattgtgatcctcctctcaggctaacaaaaccttcccattttaccaatattaaaccagttgaaaaattggaccactccaggagtaatactccttctcccttaaatctttcctccacatcttctaaaaactcccacagtagttcatacactccaaacagcttctcttctgaggagctccaggctgagcctttagacttgtcattaccaaaacaaatgaaagaacccaaaagtattatagccacaaagaacaaaacaaaagctagtagcatcagtttagatcataacagtgtttcttcctcatctgaaaactcagatgagcctctgaacttgacttttatcaagaaggaattttcaaattcaaataatctggacaacaaaagcactaacccagtgttcagcatgaacccatttagtgccaaacctttatacacagctcttccacctcaaagcgcatttccccctgctactttcatgccaccagtccagaccagtattcctgggctacgaccatacccaggactggatcagatgagcttcctaccacatatggcctacacctacccaactggagcagctacttttgctgatatgcagcaaaggagaaagtaccagcggaaacaaggatttcagggagaattgcttgatggagcacaagactacatgtcaggcctagatgatatgacagactccgactcctgtctgtctcgcaaaaagatcaagaagacagagagtggcatgtatgcatgtgacttatgtgacaagacattccagaaaagcagttcccttctgcgacataaatacgaacacacaggaaaaagaccacatcagtgtcagatttgtaagaaagcgtttaaacacaagcaccaccttatcgagcactcaaggcttcactcgggcgagaagccctatcagtgtgataaatgtggcaagcgcttctcacactcgggctcgtactcgcagcacatgaatcacaggtattcctactgcaagcgggaggcggaggagcgggaagcggcggagcgcgaggcgcgcgagaaagggcacttggaacccaccgagctgctgatgaaccgggcttacttgcagagcattacccctcaggggtactctgactcggaggagagggagagtatgccgagggatggcgagagcgagaaggagcacgagaaagaaggcgaggatggctacgggaagctgggcagacaggatggcgacgaggagttcgaggaggaagaggaagaaagtgaaaataaaagtatggatacggatcccgaaacgatacgagatgaagaagagactggagatcactccatggacgatagttcggaggatgggaaaatggaaaccaaatcagaccacgaggaagacaatatggaagatggcatgtaataaactactgcattttaagcttcctatttttttttccagtagtattgttacctgcttgaaaacactgctgtgttaagctgttcatgcacgtgcctgacgcttccaggaagctgtagagagggacagaaggggcg

SEQ ID NO: 4073 - DNA, 3912 bp, Homo sapiens
cgcggcttcttcatgctttttcttctcaccatttctggccaaaactacaaacaagacttcgcagatcgagcctgcgtgctgccgaagcagggcgccgagtccatgcgaactgccatctgatccgctcttatcaatgaagcagccgatcatggcggatggcccccggtgcaagaggcgcaaacaagccaatcccaggaggaaaaacgtggtgaactatgacaatgtagtggacacaggttctgaaacagatgaggaagacaagcttcatattgctgaggatgacggtattgccaaccctctggaccaggagacgagtccagctagtgtgcccaaccatgagtcctccccacacgtgagccaagctctgttgccaagagaggaagaggaagatgaaataagggagggtggagtggaacacccctggcacaacaacgagattctacaagcctctgtagatggtccagaagaaatgaaggaagactatgacactatggggccagaagccacgatccagaccgcaattaacaatggtacagtgaagaatgcaaattgcacatcagattttgaggaatactttgccaaaagaaaactggaggaacgcgatggtcatgcagtcagcatcgaggagtaccttcagcgcagtgacacagccattatttacccagaagcccctgaggagctgtctcgccttggcacgccagaggccaatgggcaagaagaaaatgacctgccacctggaactccagatgcttttgcccaactgctgacctgcccctactgcgaccggggctacaagcgcttgacatcactgaaggagcacatcaagtaccgccacgagaagaatgaagagaacttttcctgccctctctgtagctacacgtttgcctaccgcacccagctcgagcggcatatggtgacacacaagccagggacagatcagcaccaaatgctaacccaaggagcaggtaatcgcaagttcaaatgcacagagtgtggcaaggccttcaaatataaacaccatctgaaagaacacctgcgaattcacagtggtgaaaaaccttacgagtgcccaaactgcaagaaacgtttctcccattctggttcctacagttcgcacatcagcagcaagaaatgtattggtttaatctctgtaaatggccgaatgagaaacaatatcaagacgggttcttcccctaattctgtttcttcttctcctactaattcagccattacccagttaagaaacaagttggagaatggaaaaccacttagtatgtctgaacagacaggcttacttaaaattaaaacagaaccactagacttcaatgactataaagttcttatggctacacacgggtttagtggcactagtccctttatgaatggtgggcttggagccaccagccctttaggagttcatccatctgctcagagtccaatgcagcacttaggtgtagggatggaagcccctttacttgggtttcccaccatgaatagtaatttaagtgaggtacaaaaggttctacagattgtggacaatactgtttccaggcaaaaaatggactgcaaggctgaagaaatttcaaagttgaaaggttatcacatgaaggatccatgctctcaacctgaggaacaaggagttacttctcctaatattccgcctgtcggtcttccggtagtgagtcataatggtgccactaaaagtattattgactatacgttggaaaaagtcaatgaagccaaagcttgcctccagagcttgactactgactcaaggagacagatcagtaatataaagaaagagaagctacgtactttaatagatttggtcactgatgacaaaatgattgagaaccacaacatatccactccattttcatgccagttctgtaaagaaagttttcctggccccatccctttgcatcagcatgaacgttacctttgtaagatgaatgaagagatcaaggcggtcctgcagcctcatgaaaacatagtccccaacaaagccggagtttttgttgataataaagccctcctcttgtcatctgtactttctgagaaaggaatgacaagccccatcaacccatacaaggaccacatgtctgtactcaaagcatactatgctatgaacatggagcccaactccgatgaactgctgaaaatttccattgctgtgggccttcctcaggaatttgtgaaggaatggtttgaacaacgaaaagtctaccagtactcaaattccaggtccccatccctggaaagaagctccaagccgttagctcccaacagtaaccctcccacaaaagactctttattacccaggtctcctgtaaaacctatggactccataacatcaccatctatagcagaactccacaacagtgttacgaattgtgatcctcctctcaggctaacaaaaccttcccattttaccaatattaaaccagttgaaaaattggaccactccaggagtaatactccttctcccttaaatctttcctccacatcttctaaaaactcccacagtagttcatacactccaaacagcttctcttctgaggagctccaggctgagcctttagacttgtcattaccaaaacaaatgaaagaacccaaaagtattatagccacaaagaacaaaacaaaagctagtagcatcagtttagatcataacagtgtttcttcctcatctgaaaactcagatgagcctctgaacttgacttttatcaagaaggaattttcaaattcaaataatctggacaacaaaagcactaacccagtgttcagcatgaacccatttagtgccaaacctttatacacagctcttccacctcaaagcgcatttccccctgctactttcatgccaccagtccagaccagtattcctgggctacgaccatacccaggactggatcagatgagcttcctaccacatatggcctacacctacccaactggagcagctacttttgctgatatgcagcaaaggagaaagtaccagcggaaacaaggatttcagggagaattgcttgatggagcacaagactacatgtcaggcctagatgatatgacagactccgactcctgtctgtctcgcaaaaagatcaagaagacagagagtggcatgtatgcatgtgacttatgtgacaagacattccagaaaagcagttcccttctgcgacataaatacgaacacacaggaaaaagaccacatcagtgtcagatttgtaagaaagcgtttaaacacaagcaccaccttatcgagcactcaaggcttcactcgggcgagaagccctatcagtgtgataaatgtggcaagcgcttctcacactcgggctcgtactcgcagcacatgaatcacaggtattcctactgcaagcgggaggcggaggagcgggaagcggcggagcgcgaggcgcgcgagaaagggcacttggaacccaccgagctgctgatgaaccgggcttacttgcagagcattacccctcaggggtactctgactcggaggagagggagagtatgccgagggatggcgagagcgagaaggagcacgagaaagaaggcgaggatggctacgggaagctgggcagacaggatggcgacgaggagttcgaggaggaagaggaagaaagtgaaaataaaagtatggatacggatcccgaaacgatacgagatgaagaagagactggagatcactccatggacgatagttcggaggatgggaaaatggaaaccaaatcagaccacgaggaagacaatatggaagatggcatgtaataaactactgcattttaagcttcctatttttttttccagtagtattgttacctgcttgaaaacactgctgtgttaagctgttcatgcacgtgcctgacgcttccaggaagctgtagagagggacagaaggggcg

SEQ ID NO: 4074 - DNA, 3357 bp, Homo sapiens; identical to SEQ ID NO: 725

SEQ ID NO: 4075 - DNA, 1204 bp, Homo sapiens
agggcgtgagggagtgacagcagcgcattcgcgggacgagagcgatgagtgagaacgccgcaccaggtctgatctcagagctgaagctggctgtgccctggggccacatcgcagccaaagcctggggctccctgcagggccctccagttctctgcctgcacggctggctggacaatgccagctccttcgacagactcatccctcttctcccgcaagacttttattacgttgccatggatttcggaggtcatgggctctcgtcccattacagcccaggtgtcccatattacctccagacttttgtgagtgagatccgaagagttgtggcagccttgaaatggaatcgattctccattctgggccacagcttcggtggcgtcgtgggcggaatgtttttctgtaccttccccgagatggtggataaacttatcttgctggacacgccgctctttctcctggaatcagatgaaatggagaacttgctgacctacaagcggagagccatagagcacgtgctgcaggtagaggcctcccaggagccctcgcacgtgttcagcctgaagcagctgctgcagaggttactgaagagcaatagccacttgagtgaggagtgcggggagcttctcctgcaaagaggaaccacgaaggtggccacaggtctggttctgaacagagaccagaggctcgcctgggcagagaacagcattgacttcatcagcagggagctgtgtgcgcattccatcaggaagctgcaggcccatgtcctgttgatcaaagcagtccacggatattttgattcaagacagaattactctgagaaggagtccctgtcgttcatgatagacacgatgaaatccaccctcaaagagcagttccagtttgtggaagtcccaggcaatcactgtgtccacatgagcgaaccccagcacgtggccagtatcatcagctccttcttacagtgcacacacatgctcccagcccagctgtagctctgggcctggaactatgaagacctagtgctcccagactcaacactgggactctgagttcctgagccccacaacaaggccagggatggtggggacaggcctcactagtcttgaggcccagcctaggatggtagtcaggggaaggagcgagattccaacttcaacatctgtgacctcaagagggagacagagtctgggttccagggctgctttct

SEQ ID NO: 4076 - DNA, 1204 bp, Homo sapiens; identical to SEQ ID NO: 4075

SEQ ID NO: 4077 - DNA, 3039 bp, Homo sapiens; identical to SEQ ID NO: 2465

SEQ ID NO: 4078 - DNA, 5143 bp, Homo sapiens
ttattctgccccagctgatgtttgagccagcatgtcgcggaggaagcaagcgaagcctcaacatttccaatccgaccccgaagtggcctcgctcccccggcgagatggagacacagaaaagggtcaaccgagtcgccctactaagagcaaggatgcccacgtctgtggccggtgctgtgccgagttctttgaattatcagatcttctgctccacaagaagaactgtactaaaaatcaattagttttaatcgtaaatgaaaatccagcctccccacccgaaaccttctcccccagcccccctcctgataatcctgatgaacaaatgaatgacacagttaacaaaacagatcaagtggactgcagcgacctttcagaacacaacggacttgacagggaagagtccatggaggtggaggccccggttgctaacaaaagcggcagcggcacttccagcggcagccacagcagtaccgccccaagcagcagcagcagcagcagcagcagcagcggcggcggcggcagctcctccacaggtacctcagcgatcacaacctctctacctcaactcggggacctgacaacactgggcaacttctccgtaatcaacagcaacgtcatcatcgagaacctccagagcaccaaggtggcggtggcccagttctcccaggaagcgaggtgcggcggggcctctgggggcaagctggccgtcccagccctcatggaacaactcctagctctgcagcagcagcagatccaccagctgcaattgatcgaacagattcgtcaccaaatattgctgttggcttctcagaatgcagacttgccaacatcttctagtccttctcaaggtactttacgaacatctgccaaccccttgtccacgctaagttcccatttatctcagcagctggcagcagcagctggattggcacagagcctcgccagccaatctgccagcattagtggtgtgaaacagctacccccaatccagctacctcagagcagttctggcaacaccatcattccatccaacagcggctcttctcccaatatgaacatattggcagcggcagttaccaccccgtcctctgaaaaagtggcttcaagtgctggggcctcccatgtcagcaacccagcggtctcatcatcgtcctcaccagcttttgcaataagcagtttattaagtcctgcgtctaatccacttctacctcagcaagcctccgctaactcggttttccccagccctttgcccaacatcggaacaactgcagaggatttaaactccttgtctgccttggcccagcaaagaaaaagcaagccaccaaatgtcactgcctttgaagcgaaaagtacttccgatgaggcattcttcaaacacaagtgcaggttctgcgcgaaggtctttgggagtgacagtgccttgcagatccacttgcgttcccataccggagagaggccattcaagtgcaacatctgcgggaacaggttctccaccaaggggaatctgaaagtccactttcagcgccacaaagagaaataccctcatatccagatgaacccctatcctgtgcctgagcatttggacaatatccccacgagtactggcatcccatatggcatgtccatccctccagagaagccagtcaccagctggctagacaccaaaccagtcctgcctactctgaccacttcagtcggcctgccgttgcccccaaccctcccaagcctcatacccttcatcaagacggaagagccagcccccatccccatcagccattctgccaccagccccccaggctcagtcaaaagtgactccgggggccctgagtcagccacaagaaacctaggtgggctcccagaggaagccgaagggtccactctgccaccctctggtggcaaaagcgaagagagtggcatggtcaccaactcagtcccgacggcgagcagtagcgtcctgagctccccagcggcagactgcggccccgcgggcagtgccaccaccttcaccaaccctttgttgccgctcatgtccgagcagttcaaggccaagtttccttttgggggactcctggactcagctcaggcatcagagacgtccaagcttcagcaactggtagaaaacattgacaagaaggccactgaccccaatgagtgcatcatctgccaccgggttctcagctgccagagcgccttgaaaatgcactacaggacacacactggggagaggccctttaagtgtaagatctgtggccgggctttcaccacgaaagggaatcttaaaacccactacagtgtccatcgtgctatgcccccgctcagagtccagcattcctgccccatctgccagaagaagttcacgaacgctgtggtcctgcagcagcacatccgaatgcatatgggaggccagatccccaacaccccagtccccgacagctactctgagtccatggagtctgacacaggttcctttgatgagaaaaattttgatgacctagacaacttctctgatgaaaacatggaagactgtcctgagggcagcatccctgatacacctaagtctgcagacgcctcccaagacagcttatcctcttcgcctttgcccctcgagatgtcgagcatcgctgctttggaaaatcagatgaagatgatcaatgctggcctggcagagcagctacaggccagcctgaagtcagtggagaatgggtccatcgagggggatgtcctgaccaatgattcatcctcagtgggtggtgacatggaaagccaaagtgctggcagcccagccatctcagagtctacctcttccatgcaggctctgtccccgtccaacagcacgcaggagttccacaagtcacccagcattgaggagaaaccacagagagcggtcccaagcgagtttgccaatggtttgtctcccaccccagtgaatggtggggctttggatttgacatctagtcacgcagagaaaatcatcaaagaagattctttggggatcctcttcccttttagagaccggggtaaatttaaaaacactgcttgtgacatttgtggcaaaacatttgcttgtcagagtgccttggacattcactatagaagtcataccaaagagagaccatttatttgcacagtttgcaatcgtggcttttccacaaagggtaatttgaagcagcacatgttgacacatcagatgcgagatctgccatcccagctctttgagcccagttccaaccttggccccaatcagaactcagcggtgattcccgccaactcgttgtcatctctcatcaagacagaggtcaacggcttcgtgcatgtttctcctcaggacagtaaggacacccccaccagtcacgtcccgtctgggcctctgtcttcctctgccacatccccagttctgctccctgctctgcccaggagaactcccaagcagcactactgcaacacatgtggcaaaaccttctcctcatcgagtgccctgcagattcacgagagaactcacactggagagaaaccctttgcttgcactatttgtggaagagctttcacgactaaaggcaatcttaaggtacacatgggcactcacatgtggaatagcacccctgcacgacggggtcggcggctctctgtggatggccccatgacatttctaggaggcaatcccgtcaagttcccagaaatgttccagaaggatttggcggcaagatcaggaagtggggatccttccagcttctggaatcagtatgcagcagcgctctccaacgggctggcgatgaaggccaacgagatctccgtcattcagaacggtggcatccctccaattcctggaagcctcggcagtgggaacagctcacctgttagtgggctgacgggaaacctggagaggctccagaactcagagcccaatgctcccctggccggcctggagaaaatggcaagcagtgagaacggaaccaacttccgcttcacccgcttcgtggaggacagcaaggagatcgtcacgagttaaagcagctcgggctggagacatagcattcattcctgttcagaatgcgacctatggtggcctcctactccttgccccccaccccgccccgccccttccttctgttccccagatctatgaactacaacattatgaagacattcttttgtaccttgttcaactttagagttctaagaaagcttatttattagcgatataaccttgctttgcaaacagaatgcaagcgttaactttggtcttctgtattttggactaaatactaattgactagagtgctgtaaacttgctgtaacatttatggcaattgcaagttgccctgctaggcagttgtaatctggcattaacttattttctatatccagtttaatatgaatctggtgttgatgcaatgcctcagtgatgcattagatctctaataaagtctgtatatacatgtacactttgatcctgctggaaaattttatcagcaaacacattgtctaatctttcaaaacagatttaaggaaaggactgaaagtacagactgaacagtgtggttctttgaaaggtttggttttttaatttttattctaaaattcaacctttttttttgtcgatttaaccatttccattttgaactgctatttgtattgtgctttttacttgagtcgtcttcaatgttaataagtttctgtacagtaataagcacgcagaattctttagagaaaaagaaaacaagcgttgttttggtagttgaaactgagacgtaacattttgccttgtaggtatattcacgatagaaaatgtgtgctggaatttcacaatgctgctaagtatagcatcttgaacaaccttcagtggagaaaatgtagatgctcttgtatatacaataagaaatatcactttcattcaaatgtacatatgttccttacaagagcaaatgcttcttcttgatcaagagagcaggtatagtgtttgtttattttgtcttaggtatggaagaaaaaaattggactgttacatgcactttcttggaaagttgaaaggaaagggggggtccaatttctttaacatttaatacttactaacaacagagatactgtaattttactcaagtaatcaaatacattttttttgcaacagataaaacaaaatactgtg

SEQ ID NO: 4079 - DNA, 3766 bp, Homo sapiens
ggcggtcgcgcgcaggactcgagggcttctagccaccgtccccgccagcgccgcgccccgccacagggcggcatgagcccacccgcggccgcagccctagcgccctgctcctccgcctgggcggcccggctgcggtgacggctctcgctgcccgactgggggccatgaagccgagtccggccgggacggcgaaggagctggagcctccggcgccggcccgaggcgagcagcgcacggcggagcccgaggggcgctggcgggagaagggcgaggcagacaccgagcggcagcgcacccgggagcggcaggaggccacgctggccgggctggcggagctggagtacctgcgccagcgccaagagctgctggtcaggggcgccctgcgcggcgccgggggtgcgggagccgctgcgccccgcgctggggagctactgggggaggcggcgcagcgcagtcgcctggaggagaagttcttggaggagaacatcttgctgctaagaaagcaattgaactgtttgaggcgaagagatgctggtttgttgaatcagttgcaagagcttgacaagcagataagtgacctgagactggatgtagaaaagacatctgaagagcacctggagacagacagtcggcctagctcagggttttatgagctgagtgatggggcttcaggatccctttccaattcctctaactcggtgttcagtgagtgtttatccagttgtcattccagcacctgcttttgcagccccttggaggcgaccttgagtctctcagatggttgccccaaatctgcagatgtgaatcccaagtaccagtgtgatctggtgtctaaaaacgggaatgatgtatatcgctatcccagtccacttcatgctgtggctgtgcagagcccaatgtttctcctttgtctgacgggcaaccctctgagggaagaggacaggcttggaaaccatgccagtgacatttgcggtggatctgagctagatgccgtcaaaacagacagttccttaccgtccccaagcagtctgtggtctgcttcccatccttcatccagcaagaaaatggatggctacattctgagcctggtccagaaaaaaacacaccctgtaaggaccaacaaaccaagaaccagcgtgaacgctgaccccacgaaagggcttctgaggaacgggagcgtttgtgtcagagccccgggcggtgtctcacagggcaacagtgtgaaccttaagaattcgaaacaggcgtgtctgccctctggcgggataccttctctgaacaatgggacattctccccaccgaagcagtggtcgaaagaatcaaaggccgaacaagccgaaagcaagagggtgcccctgccagagggctgcccctcaggcgctgcctccgaccttcagagtaagcacctgccaaaaacggccaagccagcctcgcaagaacatgctcggtgttccgccattgggacaggggagtcccctaaggaaagcgctcagctctcaggggcctctccaaaagagagtcctagcagaggccctgccccgccgcaggagaacaaagttgtacagcccctgaaaaagatgtcacagaaaaacagcctgcagggcgtccccccggccactcctcccctgctgtctacagctttccccgtggaagagaggcctgccttggatttcaagagcgagggctcttcccaaagcctggaggaagcgcacctggtcaaggcccagtttatcccggggcagcagcccagtgtcaggctccaccggggccacaggaacatgggcgtcgtgaagaactccagcctgaagcaccgcggcccagccctccaggggctggagaacggcttgcccaccgtcagggagaaaacgcgggccgggagcaagaagtgtcgcttcccagatgacttggatacaaataagaaactcaagaaagcctcctccaaggggaggaagagtgggggcgggcccgaggctggtgttcccggcaggcccgcgggcgggggccacagggcggggagcagggcgcatggccacggacgggaggcggtggtggccaaacctaagcacaagcgaactgactaccggcggtggaagtcctcggccgagatttcctacgaagaggccctgaggagggcccggcgcggtcgccgggagaatgtggggctgtaccccgcgcctgtgcctctgccctacgccagcccctacgcctacgtggctagcgactccgagtactcggccgagtgcgagtccctgttccactccaccgtggtggacaccagtgaggacgagcagagcaattacaccaccaactgcttcggggacagcgagtcgagtgtgagcgagggcgagttcgtgggggagagcacaaccaccagcgactctgaagaaagcgggggcttaatttggtcccagtttgtccagactctgcccattcaaacggtaacggccccagaccttcacaaccaccccgcaaaaacctttgtcaaaattaaggcctcacataacctcaagaagaagatcctccgctttcggtctggctctttgaaactgatgacgacggtttgagtgacatcattggtgtagaaagtttgtgtgtttttttttcttctccctagttgccaaaattaaaaaggtggtgttttcatttttgtataatactttaatggaatgctttttaaaaaaatataaaaccaaggtaaattattgtttcatcttcacgtatggatgctagtgcctttaatggaaggtaaagaatgttttgctagttagaagtacatattgaggttttaatggtggtgatagtgagttttgtggcaccagctgttttttattttaaactttctgagcatccggcaaggtacaggttttgatgttcaagttttattgggataagatcttttgatcccaaggtcaggtggatggaatttttggatttatatttgttccttgagtcttcagggcagtgtctccatgagggttttcctgttgaggggcaccacatacaatagtgtgaagtaggtatgaggggcagtcattgtattctatagtttttttatgtagtctacatttctcagatgtatccccattcggttttattctcagaactgttactagactcatgacttggaggccaaaccttaaatccagagatagcagcctcgatagggaccttaaaaggattcacaaaaacttttgccacacttggtgcctaggccctgttcctaataaccccttctagggccgtttatccaacatttagatgccttcttttccctccctaatttgtagccagtccaacctttcattccttggaggatttagttttgggataaaattttggtccttgggcacagagacattcactattaatgaagtaacccttgggcatgactccaatcccagaattgctcactgagcgctatgccaccgaagcgttgacctgaacatattagtgcaatccagtccagattggacctttgatcctatgtggaagggctgttttttaagaaaaaatttttggtaaacagtattgtgtaaaattgctttttgtataccaatatatgcatgttttgtgcatgagtagtacttgtgttgatactcctgttgatgttaaattactatataatataaacagtatgtgtttttatatatcattgtgtaaatttaatataacatatgcagtaataaaccatttgttttactgctgttaagtttgttatttgggtataaaaccagatgtttacacctgtaaaaaaaaaaaaaaaaaa

SEQ ID NO: 4080 - DNA, 3877 bp, Homo sapiens; identical to SEQ ID NO: 703

SEQ ID NO: 4081 - DNA, 8080 bp, Homo sapiens; identical to SEQ ID NO: 751

SEQ ID NO: 4082 - DNA, 807 bp, Homo sapiens
acactctaccaccatgaatccattcctgatccttgcctttgtgggagctgctgttgctgtcccctttgacgatgatgacaagattgttgggggctacacctgtgaggagaattctctcccctaccaggtgtccctgaattctggctcccacttctgcggtggctccctcatcagcgaacagtgggtggtatcagcagctcactgctacaagacccgcatccaggtgagactgggagagcacaacatcaaagtcctggaggggaatgagcagttcatcaatgcagccaagatcatccgccacccccaatacgacaggaagactctgaacaatgacatcatgttaatcaagctctcctcacgtgcagtaatcaacgcccgcgtgtccaccatctctctgcccaccgcccctccagccactggcacgaagtgcctcatctctggctggggcaacactgcgagctctggcgccgactacccagacgagctgcagtgcctggacgctcctgtgctgagccaggctaagtgtgaagcctcctaccctggaaagattaccagcaacatgttctgtgtgggcttccttgagggaggcaaggattcatgtcagggtgattctggtggccctgtggtctgcaatggacagctccaaggagttgtctcctggggtgatggctgtgcccagaagaacaagcctggagtctacaccaaggtctacaactatgtgaaatggattaagaacaccatagctgccaacagctaaagcccccagtatctcttcagtctctataccaataaagtggccctgctctc

SEQ ID NO: 4083 - DNA, 807 bp, Homo sapiens
acactctaccaccatgaatccattcctgatccttacctttgtggcagctgctcttgctgccccctttgatgatgatgacaagatcgttgggggctacaactgtgaggagaattctgtcccctaccaggtgtccctgaattctggctaccacttctgtggtggctccctcatcaacgaacagtgggtggtatcagcaggccactgctacaagtcccgcatccaggtgagactgggagagcacaacatcgaagtcctggaggggaatgagcagttcatcaatgcagccaagatcatccgccacccccaatacgacaggaagactctgaacaatgacatcatgttaatcaagctctcctcacgtgcagtaatcaacgcccgcgtgtccaccatctctctgcccaccgcccctccagccactggcacgaagtgcctcatctctggctggggcaacactgcgagctctggcgccgactacccagacgagctgcagtgcctggatgctcctgtgctgagccaggctaagtgtgaagcctcctaccctggaaagattaccagcaacatgttctgtgtgggcttccttgagggaggcaaggattcatgtcagggtgattctggtggccctgtggtctgcaatggacagctccaaggagttgtctcctggggtgatggctgtgcccagaagaacaagcctggagtctacaccaaggtctacaactatgtgaaatggattaagaacaccatagctgccaatagctaaagcccccagtatctcttcagtctctataccaataaagtggccctgctctc

SEQ ID NO: 4084 - DNA, 1487 bp, Homo sapiens; identical to SEQ ID NO: 625

SEQ ID NO: 4085 - DNA, 3782 bp, Homo sapiens; identical to SEQ ID NO: 1761

SEQ ID NO: 4086 - DNA, 3597 bp, Homo sapiens
acccgcctctgcgcgcccccgggcacgaccccggagtctccgcgggcggccagggcgcgcgtgcgcggaggttctcctcgtccgcccgttgttcagcgagggaggctctgcgcgtgccgcagctgacggggaaactgaggcacggagcgggcctgtaggagctgtccaggccatctccaaccatgggagtgaggcacccgccctgctcccaccggctcctggccgtctgcgccctcgtgtccttggcaaccgctgcactcctggggcacatcctactccatgatttcctgctggttccccgagagctgagtggctcctccccagtcctggaggagactcacccagctcaccagcagggagccagcagaccagggccccgggatgcccaggcacaccccggccgtcccagagcagtgcccacacagtgcgacgtcccccccaacagccgcttcgattgcgcccctgacaaggccatcacccaggaacagtgcgaggcccgcggctgttgctacatccctgcaaagcaggggctgcagggagcccagatggggcagccctggtgcttcttcccacccagctaccccagctacaagctggagaacctgagctcctctgaaatgggctacacggccaccctgacccgtaccacccccaccttcttccccaaggacatcctgaccctgcggctggacgtgatgatggagactgagaaccgcctccacttcacgatcaaagatccagctaacaggcgctacgaggtgcccttggagaccccgcatgtccacagccgggcaccgtccccactctacagcgtggagttctccgaggagcccttcggggtgatcgtgcgccggcagctggacggccgcgtgctgctgaacacgacggtggcgcccctgttctttgcggaccagttccttcagctgtccacctcgctgccctcgcagtatatcacaggcctcgccgagcacctcagtcccctgatgctcagcaccagctggaccaggatcaccctgtggaaccgggaccttgcgcccacgcccggtgcgaacctctacgggtctcaccctttctacctggcgctggaggacggcgggtcggcacacggggtgttcctgctaaacagcaatgccatggatgtggtcctgcagccgagccctgcccttagctggaggtcgacaggtgggatcctggatgtctacatcttcctgggcccagagcccaagagcgtggtgcagcagtacctggacgttgtgggatacccgttcatgccgccatactggggcctgggcttccacctgtgccgctggggctactcctccaccgctatcacccgccaggtggtggagaacatgaccagggcccacttccccctggacgtccagtggaacgacctggactacatggactcccggagggacttcacgttcaacaaggatggcttccgggacttcccggccatggtgcaggagctgcaccagggcggccggcgctacatgatgatcgtggatcctgccatcagcagctcgggccctgccgggagctacaggccctacgacgagggtctgcggaggggggttttcatcaccaacgagaccggccagccgctgattgggaaggtatggcccgggtccactgccttccccgacttcaccaaccccacagccctggcctggtgggaggacatggtggctgagttccatgaccaggtgcccttcgacggcatgtggattgacatgaacgagccttccaacttcatcaggggctctgaggacggctgccccaacaatgagctggagaacccaccctacgtgcctggggtggttggggggaccctccaggcggccaccatctgtgcctccagccaccagtttctctccacacactacaacctgcacaacctctacggcctgaccgaagccatcgcctcccacagggcgctggtgaaggctcgggggacacgcccatttgtgatctcccgctcgacctttgctggccacggccgatacgccggccactggacgggggacgtgtggagctcctgggagcagctcgcctcctccgtgccagaaatcctgcagtttaacctgctgggggtgcctctggtcggggccgacgtctgcggcttcctgggcaacacctcagaggagctgtgtgtgcgctggacccagctgggggccttctaccccttcatgcggaaccacaacagcctgctcagtctgccccaggagccgtacagcttcagcgagccggcccagcaggccatgaggaaggccctcaccctgcgctacgcactcctcccccacctctacacactgttccaccaggcccacgtcgcgggggagaccgtggcccggcccctcttcctggagttccccaaggactctagcacctggactgtggaccaccagctcctgtggggggaggccctgctcatcaccccagtgctccaggccgggaaggccgaagtgactggctacttccccttgggcacatggtacgacctgcagacggtgccagtagaggcccttggcagcctcccacccccacctgcagctccccgtgagccagccatccacagcgaggggcagtgggtgacgctgccggcccccctggacaccatcaacgtccacctccgggctgggtacatcatccccctgcagggccctggcctcacaaccacagagtcccgccagcagcccatggccctggctgtggccctgaccaagggtggggaggcccgaggggagctgttctgggacgatggagagagcctggaagtgctggagcgaggggcctacacacaggtcatcttcctggccaggaataacacgatcgtgaatgagctggtacgtgtgaccagtgagggagctggcctgcagctgcagaaggtgactgtcctgggcgtggccacggcgccccagcaggtcctctccaacggtgtccctgtctccaacttcacctacagccccgacaccaaggtcctggacatctgtgtctcgctgttgatgggagagcagtttctcgtcagctggtgttagccgggcggagtgtgttagtctctccagagggaggctggttccccagggaagcagagcctgtgtgcgggcagcagctgtgtgcgggcctgggggttgcatgtgtcacctggagctgggcactaaccattccaagccgccgcatcgcttgtttccacctcctgggccggggctctggcccccaacgtgtctaggagagctttctccctagatcgcactgtgggccggggccctggagggctgctctgtgttaataagattgtaaggtttgccctcctcacctgttgccggcatgcgggtagtattagccacccccctccatctgttcccagcaccggagaagggggtgctcaggtggaggtgtggggtatgcacctgagctcctgcttcgcgcctgctgctctgccccaacgcgaccgctgcccggctgcccagagggctggatgcctgccggtccccgagcaagcctgggaactcaggaaaattcacaggacttgggagattctaaatcttaagtgcaattatttttaataaaaggggcatttggaatcaaaaaaaa

SEQ ID NO: 4087 - DNA, 3517 bp, Homo sapiens
acccgcctctgcgcgcccccgggcacgaccccggagtctccgcgggcggccagggcgcgcgtgcgcggaggcctgtaggagctgtccaggccatctccaaccatgggagtgaggcacccgccctgctcccaccggctcctggccgtctgcgccctcgtgtccttggcaaccgctgcactcctggggcacatcctactccatgatttcctgctggttccccgagagctgagtggctcctccccagtcctggaggagactcacccagctcaccagcagggagccagcagaccagggccccgggatgcccaggcacaccccggccgtcccagagcagtgcccacacagtgcgacgtcccccccaacagccgcttcgattgcgcccctgacaaggccatcacccaggaacagtgcgaggcccgcggctgttgctacatccctgcaaagcaggggctgcagggagcccagatggggcagccctggtgcttcttcccacccagctaccccagctacaagctggagaacctgagctcctctgaaatgggctacacggccaccctgacccgtaccacccccaccttcttccccaaggacatcctgaccctgcggctggacgtgatgatggagactgagaaccgcctccacttcacgatcaaagatccagctaacaggcgctacgaggtgcccttggagaccccgcatgtccacagccgggcaccgtccccactctacagcgtggagttctccgaggagcccttcggggtgatcgtgcgccggcagctggacggccgcgtgctgctgaacacgacggtggcgcccctgttctttgcggaccagttccttcagctgtccacctcgctgccctcgcagtatatcacaggcctcgccgagcacctcagtcccctgatgctcagcaccagctggaccaggatcaccctgtggaaccgggaccttgcgcccacgcccggtgcgaacctctacgggtctcaccctttctacctggcgctggaggacggcgggtcggcacacggggtgttcctgctaaacagcaatgccatggatgtggtcctgcagccgagccctgcccttagctggaggtcgacaggtgggatcctggatgtctacatcttcctgggcccagagcccaagagcgtggtgcagcagtacctggacgttgtgggatacccgttcatgccgccatactggggcctgggcttccacctgtgccgctggggctactcctccaccgctatcacccgccaggtggtggagaacatgaccagggcccacttccccctggacgtccagtggaacgacctggactacatggactcccggagggacttcacgttcaacaaggatggcttccgggacttcccggccatggtgcaggagctgcaccagggcggccggcgctacatgatgatcgtggatcctgccatcagcagctcgggccctgccgggagctacaggccctacgacgagggtctgcggaggggggttttcatcaccaacgagaccggccagccgctgattgggaaggtatggcccgggtccactgccttccccgacttcaccaaccccacagccctggcctggtgggaggacatggtggctgagttccatgaccaggtgcccttcgacggcatgtggattgacatgaacgagccttccaacttcatcaggggctctgaggacggctgccccaacaatgagctggagaacccaccctacgtgcctggggtggttggggggaccctccaggcggccaccatctgtgcctccagccaccagtttctctccacacactacaacctgcacaacctctacggcctgaccgaagccatcgcctcccacagggcgctggtgaaggctcgggggacacgcccatttgtgatctcccgctcgacctttgctggccacggccgatacgccggccactggacgggggacgtgtggagctcctgggagcagctcgcctcctccgtgccagaaatcctgcagtttaacctgctgggggtgcctctggtcggggccgacgtctgcggcttcctgggcaacacctcagaggagctgtgtgtgcgctggacccagctgggggccttctaccccttcatgcggaaccacaacagcctgctcagtctgccccaggagccgtacagcttcagcgagccggcccagcaggccatgaggaaggccctcaccctgcgctacgcactcctcccccacctctacacactgttccaccaggcccacgtcgcgggggagaccgtggcccggcccctcttcctggagttccccaaggactctagcacctggactgtggaccaccagctcctgtggggggaggccctgctcatcaccccagtgctccaggccgggaaggccgaagtgactggctacttccccttgggcacatggtacgacctgcagacggtgccagtagaggcccttggcagcctcccacccccacctgcagctccccgtgagccagccatccacagcgaggggcagtgggtgacgctgccggcccccctggacaccatcaacgtccacctccgggctgggtacatcatccccctgcagggccctggcctcacaaccacagagtcccgccagcagcccatggccctggctgtggccctgaccaagggtggggaggcccgaggggagctgttctgggacgatggagagagcctggaagtgctggagcgaggggcctacacacaggtcatcttcctggccaggaataacacgatcgtgaatgagctggtacgtgtgaccagtgagggagctggcctgcagctgcagaaggtgactgtcctgggcgtggccacggcgccccagcaggtcctctccaacggtgtccctgtctccaacttcacctacagccccgacaccaaggtcctggacatctgtgtctcgctgttgatgggagagcagtttctcgtcagctggtgttagccgggcggagtgtgttagtctctccagagggaggctggttccccagggaagcagagcctgtgtgcgggcagcagctgtgtgcgggcctgggggttgcatgtgtcacctggagctgggcactaaccattccaagccgccgcatcgcttgtttccacctcctgggccggggctctggcccccaacgtgtctaggagagctttctccctagatcgcactgtgggccggggccctggagggctgctctgtgttaataagattgtaaggtttgccctcctcacctgttgccggcatgcgggtagtattagccacccccctccatctgttcccagcaccggagaagggggtgctcaggtggaggtgtggggtatgcacctgagctcctgcttcgcgcctgctgctctgccccaacgcgaccgctgcccggctgcccagagggctggatgcctgccggtccccgagcaagcctgggaactcaggaaaattcacaggacttgggagattctaaatcttaagtgcaattatttttaataaaaggggcatttggaatcaaaaaaaa

SEQ ID NO: 4088 - DNA, 6314 bp, Homo sapiens; identical to SEQ ID NO: 195

SEQ ID NO: 4089 - DNA, 9708 bp, Homo sapiens; identical to SEQ ID NO: 1779

SEQ ID NO: 4090 - DNA, 9696 bp, Homo sapiens
ttccccagcagctgctgctcgctcagctcacaagccaaggccaggggacagggcggcagcgactcctctggctcccgagaagtggatccggtcgcggccactacgatgccgggagccgccggggtcctcctccttctgctgctctccggaggcctcgggggcgtacaggcgcagcggccgcagcagcagcggcagtcacaggcacatcagcaaagaggtttattccctgctgtcctgaatcttgcttctaatgctcttatcacgaccaatgcaacatgtggagaaaaaggacctgaaatgtactgcaaattggtagaacatgtccctgggcagcctgtgaggaacccgcagtgtcgaatctgcaatcaaaacagcagcaatccaaaccagagacacccgattacaaatgctattgatggaaagaacacttggtggcagagtcccagtattaagaatggaatcgaataccattatgtgacaattaccctggatttacagcaggtgttccagatcgcgtatgtgattgtgaaggcagctaactccccccggcctggaaactggattttggaacgctctcttgatgatgttgaatacaagccctggcagtatcatgctgtgacagacacggagtgcctaacgctttacaatatttatccccgcactgggccaccgtcatatgccaaagatgatgaggtcatctgcacttcattttactccaagatacaccccttagaaaatggagagattcacatctctttaatcaatgggagaccaagtgccgatgatccttctccagaactgctagaatttacctccgctcgctatattcgcctgagatttcagaggatccgcacactgaatgctgacttgatgatgtttgctcacaaagacccaagagaaattgaccccattgtcaccagaagatattactactcggtcaaggatatttcagttggagggatgtgcatctgctatggtcatgccagggcttgtccacttgatccagcgacaaataaatctcgctgtgagtgtgagcataacacatgtggcgatagctgtgatcagtgctgtccaggattccatcagaaaccctggagagctggaacttttctaactaaaactgaatgtgaagcatgcaattgtcatggaaaagctgaagaatgctattatgatgaaaatgttgccagaagaaatctgagtttgaatatacgtggaaagtacattggagggggtgtctgcattaattgtacccaaaacactgctggtataaactgcgagacatgtactgatggcttcttcagacccaaaggggtatctccaaattatccaaggccatgccagccatgtcattgcgatccaattggttccttaaatgaagtctgtgtcaaggatgagaaacatgctcgacgaggtttggcacctggatcctgtcattgcaaaactggttttggaggtgtgagctgtgatcggtgtgccaggggctacactggctacccggactgcaaagcctgtaactgcagtgggttagggagcaaaaatgaggatccttgttttggcccctgtatctgcaaggaaaatgttgaaggaggagactgtagtcgttgcaaatccggcttcttcaatttgcaagaggataattggaaaggctgcgatgagtgtttctgttcaggggtttcaaacagatgtcagagttcctactggacctatggcaaaatacaagatatgagtggctggtatctgactgaccttcctggccgcattcgagtggctccccagcaggacgacttggactcacctcagcagatcagcatcagtaacgcggaggcccggcaagccctgccgcacagctactactggagcgcgccggctccctatctgggaaacaaactcccagcagtaggaggacagttgacatttaccatatcatatgaccttgaagaagaggaagaagatacagaacgtgttctccagcttatgattatcttagagggtaatgacttgagcatcagcacagcccaagatgaggtgtacctgcacccatctgaagaacatactaatgtattgttacttaaagaagaatcatttaccatacatggcacacattttccagtccgtagaaaggaatttatgacagtgcttgcgaatttgaagagagtcctcctacaaatcacatacagctttgggatggatgccatcttcaggttgagctctgttaaccttgaatccgctgtctcctatcctactgatggaagcattgcagcagctgtagaagtgtgtcagtgcccaccagggtatactggctcctcttgtgaatcttgttggcctaggcacaggcgagttaacggcactatttttggtggcatctgtgagccatgtcagtgctttggtcatgcggagtcctgtgatgacgtcactggagaatgcctgaactgtaaggatcacacaggtggcccatattgtgataaatgtcttcctggtttctatggcgagcctactaaaggaacctctgaagactgtcaaccctgtgcctgtccactcaatatcccatccaataactttagcccaacgtgccatttagaccggagtcttggattgatctgtgatggatgccctgtcgggtacacaggaccacgctgtgagaggtgtgcagaaggctattttggacaaccctctgtacctggaggatcatgtcagccatgccaatgcaatgacaaccttgacttctccatccctggcagctgtgacagcttgtctggctcctgtctgatatgtaaaccaggtacaacaggccggtactgtgagctctgtgctgatggatattttggagatgcagttgatgcgaagaactgtcagccctgtcgctgtaatgccggtggctctttctctgaggtttgccacagtcaaactggacagtgtgagtgcagagccaacgttcagggtcagagatgtgacaaatgcaaggctgggacctttggcctacaatcagcaaggggctgtgttccctgcaactgcaattcttttgggtctaagtcattcgactgtgaagagagtggacaatgttggtgccaacctggagtcacagggaagaaatgtgaccgctgtgcccacggctatttcaacttccaagaaggaggctgcacagcttgtgaatgttctcatctgggtaataattgtgacccaaagactgggcgatgcatttgccctcccaataccattggagagaaatgttctaaatgtgcacccaatacctggggccacagcattaccactggttgtaaggcttgtaactgcagcacagtgggatccttggatttccaatgcaatgtaaatacaggccaatgcaactgtcatccaaaattctctggtgcaaaatgtacagagtgcagtcgaggtcactggaactaccctcgctgcaatctctgtgactgcttcctccctgggacagatgccacaacctgtgattcagagactaaaaaatgctcctgtagtgatcaaactgggcagtgcacttgtaaggtgaatgtggaaggcatccactgtgacagatgccggcctggcaaattcggactcgatgccaagaatccacttggctgcagcagctgctattgcttcggcactactacccagtgctctgaagcaaaaggactgatccggacgtgggtgactctgaaggctgagcagaccattctacccctggtagatgaggctctgcagcacacgaccaccaagggcattgtttttcaacatccagagattgttgcccacatggacctgatgagagaagatctccatttggaacctttttattggaaacttccagaacaatttgaaggaaagaagttgatggcctatgggggcaaactcaagtatgcaatctatttcgaggctcgggaagaaacaggtttctctacatataatcctcaagtgatcattcgaggtgggacacctactcatgctagaattatcgtcaggcatatggctgctcctctgattggccaattgacaaggcatgaaattgaaatgacagagaaagaatggaaatattatggggatgatcctcgagtccatagaactgtgacccgagaagacttcttggatatactatatgatattcattacattcttatcaaagctacttatggaaatttcatgcgacaaagcaggatttctgaaatctcaatggaggtagctgaacaaggacgtggaacaacaatgactcctccagctgacttgattgaaaaatgtgattgtcccctgggctattctggcctgtcctgtgaggcatgcttgccgggattttatcgactgcgttctcaaccaggtggccgcacccctggaccaaccctgggcacctgtgttccatgtcaatgtaatggacacagcagcctgtgtgaccctgaaacatcgatatgccagaattgtcaacatcacactgctggtgacttctgtgaacgatgtgctcttggatactatggaattgtcaagggattgccaaatgactgtcagcaatgtgcctgccctctgatttcttccagtaacaatttcagcccctcttgtgtcgcagaaggacttgacgactaccgctgcacggcttgtccacggggatatgaaggccagtactgtgaaaggtgtgcccctggctatactggcagtccaggcaaccctggaggctcctgccaagaatgtgagtgtgatccctatggctcactgcctgtgccctgtgaccctgtcacaggattctgcacgtgccgacctggagccacgggaaggaagtgtgacggctgcaagcactggcatgcacgcgagggctgggagtgtgttttttgtggagatgagtgcactggccttcttctcggtgacttggctcgcctggagcagatggtcatgagcatcaacctcactggtccgctgcctgcgccatataaaatgctgtatggtcttgaaaatatgactcaggagctaaagcacttgctgtcacctcagcgggccccagagaggcttattcagctggcagagggcaatctgaatacactcgtgaccgaaatgaacgagctgctgaccagggctaccaaagtgacagcagatggcgagcagaccggacaggatgctgagaggaccaacacaagagcaaagtccctgggagaattcattaaggagcttgcccgggatgcagaagctgtaaatgaaaaagctataaaactaaatgaaactctaggaactcgagacgaggcctttgagagaaatttggaagggcttcagaaagagattgaccagatgattaaagaactgaggaggaaaaatctagagacacaaaaggaaattgctgaagatgagttggtagctgcagaagcccttctgaaaaaagtgaagaagctgtttggagagtcccggggggaaaatgaagaaatggagaaggatctccgggaaaaactggctgactacaaaaacaaagttgatgatgcttgggaccttttgagagaagccacagataaaatcagagaagctaatcgcctatttgcagtaaatcagaaaaacatgactgcattggagaaaaagaaggaggctgttgaaagcggcaaacgacaaattgagaacactttaaaagagggcaatgacatactcgatgaagccaaccgtcttgcagatgaaatcaactccatcatagactatgttgaagacatccaaactaaattgccacctatgtctgaggagcttaatgataaaatagatgacctctcccaagaaataaaggacaggaagcttgctgagaaggtgtcccaggctgagagccacgcagctcagttgaatgactcatctgctgtccttgatggaatccttgatgaggctaaaaacatctccttcaatgccactgcagccttcaaagcttacagcaatattaaggactatattgatgaagctgagaaagttgccaaagaagccaaagatcttgcacatgaagctacaaaactggcaacaggtcctcggggtttattaaaggaagatgccaaaggctgtcttcagaaaagcttcaggattcttaacgaagccaagaagttagcaaatgatgtaaaagaaaatgaagaccatctaaatggcttaaaaaccaggatagaaaatgctgatgctagaaatggggatctcttgagaactttgaatgacactttgggaaagttatcagctattccaaatgatacagctgctaaactgcaagctgttaaggacaaagccagacaagccaacgacacagctaaagatgtactggcacagattacagagctccaccagaacctcgatggcctgaagaagaattacaataaactagcagacagcgtcgccaaaacgaatgctgtggttaaagatccttccaagaacaaaatcattgccgatgcagatgccactgtcaaaaatttagaacaggaagctgaccggctaatagataaactcaaacccatcaaggaacttgaggataacctaaagaaaaacatctctgagataaaggaattgataaaccaagctcggaaacaagccaattctatcaaagtatctgtgtcttcaggaggtgactgcattcgaacatacaaaccagaaatcaagaaaggaagttacaataatattgttgtcaacgtaaagacagctgttgctgataacctcctcttttatcttggaagtgccaaatttattgactttctggctatagaaatgcgtaaaggcaaagtcagcttcctctgggatgttggatctggagttggacgtgtagagtacccagatttgactattgatgactcatattggtaccgtatcgtagcatcaagaactgggagaaatggaactatttctgtgagagccctggatggacccaaagccagcattgtgcccagcacacaccattcgacgtctcctccagggtacacgattctagatgtggatgcaaatgcaatgctgtttgttggtggcctgactgggaaattaaagaaggctgatgctgtacgtgtgattacattcactggctgcatgggagaaacatactttgacaacaaacctataggtttgtggaatttccgagaaaaagaaggtgactgcaaaggatgcactgtcagtcctcaggtggaagatagtgaggggactattcaatttgatggagaaggttatgcattggtcagccgtcccattcgctggtaccccaacatctccactgtcatgttcaagttcagaacattttcttcgagtgctcttctgatgtatcttgccacacgagacctgagagatttcatgagtgtggagctcactgatgggcacataaaagtcagttacgatctgggctcaggaatggcttccgttgtcagcaatcaaaaccataatgatgggaaatggaaatcattcactctgtcaagaattcaaaaacaagccaatatatcaattgtagatatagatactaatcaggaggagaatatagcaacttcgtcttctggaaacaactttggtcttgacttgaaagcagatgacaaaatatattttggtggcctgccaacgctgagaaacttgaggccagaagtaaatctgaagaaatattccggctgcctcaaagatattgaaatttcaagaactccgtacaatatactcagtagtcccgattatgttggtgttaccaaaggatgttccctggagaatgtttacacagttagctttcctaagcctggttttgtggagctctcccctgtgccaattgatgtaggaacagaaatcaacctgtcattcagcaccaagaatgagtccggcatcattcttttgggaagtggagggacaccagcaccacctaggagaaaacgaaggcagactggacaggcctattatgtaatactcctcaacaggggccgtctggaagtgcatctctccacaggggcacgaacaatgaggaaaattgtgatcagaccagagccgaatctgtttcatgatggaagagaacattccgttcatgtagagcgaactagaggcatctttacagttcaagtggatgaaaacagaagatacatgcaaaacctgacagttgaacagcctatcgaagttaaaaagcttttcgttgggggtgctccacctgaatttcaaccttccccactcagaaatattcctccttttgaaggctgcatatggaatcttgttattaactctgtccccatggactttgcaaggcctgtgtccttcaaaaatgctgacattggtcgctgtgcccatcagaaactccgtgaagatgaagatggagcagctccagctgaaatagttatccagcctgagccagttcccaccccagcctttcctacgcccaccccagttctgacacatggtccttgtgctgcagaatcagaaccagctcttttgatagggagcaagcagttcgggctttcaagaaacagtcacattgcaattgcatttgatgacaccaaagttaaaaaccgtctcacaattgagttggaagtaagaaccgaagctgaatccggcttgcttttttacatggctcgcatcaatcatgctgattttgcaacagttcagctgagaaatggattgccctacttcagctatgacttggggagtggggacacccacaccatgatccccaccaaaatcaatgatggccagtggcacaagattaagataatgagaagtaagcaagaaggaattctttatgtagatggggcttccaacagaaccatcagtcccaaaaaagccgacatcctggatgtcgtgggaatgctgtatgttggtgggttacccatcaactacactacccgaagaattggtccagtgacctatagcattgatggctgcgtcaggaatctccacatggcagaggcccctgccgatctggaacaacccacctccagcttccatgttgggacatgttttgcaaatgctcagaggggaacatattttgacggaaccggttttgccaaagcagttggtggattcaaagtgggattggaccttcttgtagaatttgaattccgcacaactacaacgactggagttcttctggggatcagtagtcaaaaaatggatggaatgggtattgaaatgattgatgaaaagttgatgtttcatgtggacaatggtgcgggcagattcactgctgtctatgatgctggggttccagggcatttgtgtgatggacaatggcataaagtcactgccaacaagatcaaacaccgcattgagctcacagtcgatgggaaccaggtggaagcccaaagcccaaacccagcatctacatcagctgacacaaatgaccctgtgtttgttggaggcttcccagatgacctcaagcagtttggcctaacaaccagtattccgttccgaggttgcatcagatccctgaagctcaccaaaggcacaggcaagccactggaggttaattttgccaaggccctggaactgaggggcgttcaacctgtatcatgcccagccaactaataaaaataagtgtaaccccaggaagagtctgtcaaaacaagtatatcaagtaaaacaaacaaatatattttacctatatatgttaattaaactaatttgtgcatgtacatagaattctttctgtattcagatggtgctaattcagactccagactgaattttaattcaagttctttctcaagtctataaataatattaaactgattatttcattctaaaaaaaaaaaaaaaaaa

SEQ ID NO: 4091 - DNA, 7938 bp, Homo sapiens; identical to SEQ ID NO: 1448

SEQ ID NO: 4092 - DNA, 939 bp, Homo sapiens; identical to SEQ ID NO: 3719

SEQ ID NO: 4093 - DNA, 16179 bp, Homo sapiens; identical to SEQ ID NO: 2435

SEQ ID NO: 4094 - DNA, 3115 bp, Homo sapiens
aaagcagtggtgttttaccactctgcagagaaagctaaggttgctaaccaaacaaaataactttacactgacaatgccaatttttacatttctttcagaacaagggacactcaaactaccagagaaacggaccaatggactgcgaagaactcctaaacaggtggatccaggtttaccaaagatgcaggtcattaggaactattctggaacaccacccccagctctgcatgaaggaccccctttacagctccaggccggggataccgttgaacttctgaaaggagatgcacacagtctgttttggcagggcagaaatttagcatctggagaggttggattttttccaagtgatgcagtcaagccttgcccatgtgtgcccaaaccagtagattattcttgccaaccctggtatgctggagcaatggaaagattgcaagcagagaccgaacttattaatagggtaaatagtacttaccttgtgaggcacaggaccaaagagtcaggagaatatgcaattagcattaagtacaataatgaagcaaagcacatcaagattttaacaagagatggcttttttcacattgcagaaaatagaaaatttaaaagtttaatggaacttgtggagtactacaagcatcattctctcaaggaagggttcagaaccttagatacaactctgcagtttccatacaaggagccagaacattcagctggacagaggggtaatagagcaggcaacagcttgttaagtccaaaagtgctgggcattgccatcgctcggtatgacttctgtgcaagagatatgagagagttgtccttgttgaaaggagatgtggtgaagatttacacaaagatgagtgcaaatggctggtggagaggagaagtaaatggcagggtgggctggtttccatccacatatgtggaagaggatgaataaattcaaatcccgtgttgcaccctgcaccaaaaatttcagagaagggataaatagaagcctgcacagcatcgtgaattaactgaagtgtttaaaaagctgcatttctggctgttcaacatcctccctccttagcccctcctaagtcttaatgctgagatttctaaagatgctggtactgacagattaatggcttgcctagagctgtgcaagaaacagcctgccagtctgtcattgtcagggaccagggcaaaaccaagagctgttcttcccagaagagccctgcaaacacattggttcgtgcttccctttacttcttctggtcagataccatgaatgccagtcatcagtaaatcttaatacacttttgctttattctcacatgccattcaccagattatttgatggtacaaagaagcagaagtgtaattttccttttcccagcatgacgaaaaattggagttctgccatttgagcagcttactggaaagatccagccttacttgtcttaaattgtccaacaaggtgactcattgcccggcaaacacttttaccctcagatgttactcatgatattataaaatatgaggccagtgctcaggtttgcatcataagtgagctatccctgaagggttttaattacttatttggtgtcctgattatatttgcaaacttctttataaaaggtgaaaaaagcacacaaaagagagggtgtcttcatattaaaccttcacaaccttcatgatttcataggattattttggaaatatagcacttgactttatgaaaggatctgggctaggtatattaagggtagttgccaataacctgaagaagctggcattgtttacagaaacagatcaagggctataatttatgtcattttatagcagcagtatctattaatacatgccttttcctcccatccacctcccccgcacacacacaaagatgacctgggacatgatttttttattcccacattttcttggagcacaaacaactttgttgaggattttggaaggaaagcacaactgggtcctttattcatttctgggacagaaagagggtcagtggacttttgtgggcctccagcttctctcagagtctccccctctgcagcccatcctgggagtgtattaactggagggaagatgggtcttgcagtacatttgttttgcccagccatcactcttttttgtgaggagcctaaatacattcttcctggggtccagagtccccattcaaggcagtcaagttaagacactaacttggccctttcctgatggaaatatttcctccatagcagaagttgtgttctgacaagactgagagagttacatgttgggaaaaaaaagaagcattaacttagtagaactgaaccaggagcattaagttctgaaattttgaatcatctctgaaatgaagcaggtgtagcctgccctctcatcaatccgtctgggtgccagaactcaaggttcagtggacacatccccctgttagagaccctcatgggctaggacttttcatctaggatagattcaagacctttacctcagaattatgtaaactgtgattgtgttttagaaaaattattatttgctaaaaccatttaagtctttgtatatgtgtaaatgatcacaaaaatgtattttataaaatgttctgtacaataaagttacacctcaaagtgtactcttggaatggattctttcctgtaaagtcttatctgcgactctgtctcgggaatgttttgtctgttgccgtcagccgaactttgttatggagggagcagcctcacacaagcagaaacactcctgtggatggtattgtagcatgtattgtttattttagtcaatagaccctctccttataaatggtgtttagtcttcctgttgcatttcatgggcctgggggtttcctagcagaggatattggagcccctttttgtgacattaccaattacatctttgtccacgtttaatactttgttttggaaaatttaaatgctgcagatttgtgtagagttctaataccaaagacagaagtaaatgttttccatatactttgtcttgcctgtatgcagccctcgtgtaatacggtgaattagagtggtatttcactttgtattattttgtaaatatgtcaatataataaatagtgactaaattgataaaaaaa

SEQ ID NO: 4095 - DNA, 4776 bp, Homo sapiens; identical to SEQ ID NO: 752

SEQ ID NO: 4096 - DNA, 4013 bp, Homo sapiens
gactagtgcagtgcctggagatgaccaccaaacggaaaatcatcggccgtctggtgccatgccgatgtttccgaggtgaagaagaaatcatctcagttttagattactcccactgcagtcttcagcaggtgccaaaggaggtctttaacttcgaacgaacattagaggagctttatctagatgccaatcaaattgaagaactacccaagcaattgttcaactgtcaagctctacgaaaactaagtattcctgataacgacctttcaaatctgccaaccactattgctagtttagttaatcttaaagaactcgacatcagtaaaaatggtgtacaagaatttccagaaaacataaagtgctgtaagtgtttaacaattattgaagccagtgtcaatcccatttctaaactacctgatggcttcacacagctcctaaacctgacccagctctacctgaatgacgcctttcttgaatttcttccagccaattttggaagacttgtcaaattgcggatcttggagttaagagaaaatcacttgaaaactctaccaaagtcaatgcacaaactggcccagttggaaagacttgacctaggcaataatgaattcggtgagctgcctgaagttctggatcaaatacaaaatttgagggagttatggatggataataatgcattacaagtgttacctgggtctatagggaagttaaagatgttggtatacctggatatgtcaaaaaacagaatagaaacagttgacatggacatttctggatgtgaagcccttgaggacctcttattgtcatccaatatgttgcaacaattgcctgattctataggacttttgaaaaaactaacaactctaaaagtagatgacaatcaacttacaatgctacccaatacaattggaaatttatctttattagaagaatttgactgtagctgtaatgaactggagtcactaccttctactattggctaccttcatagtcttcggacattagcagttgatgagaatttccttccagaattacccagagaaattggaagttgtaagaatgtaacagtcatgtctctacgctccaacaaattagaatttcttcctgaagagattggacagatgcagaaactaagagtcctaaatttgagtgacaacagattgaagaatttaccattctcatttaccaaacttaaagagcttgcagctttgtggctttctgacaatcagtccaaagcccttatccctttacaaacagaagcccatccagaaacaaagcaaagagtattgactaactacatgtttccccagcagcctcgtggtgatgaagatttccagtcagacagtgacagctttaaccctacactgtgggaagagcggagacaacaacgcatgactgttgcctttgaatttgaagacaaaaaagaagatgacgaaaatgctgggaaagttaaggattgcaccatctttcccacagcctcttgattcaaagccattactcagccagcgggaggctgttcccccaggcaatataccacagcgtcctgaccggctgcccatgagtgatactttcactgacaactggactgatggctcgcattatgacaacacagggtttgttgctgaggaaaccacagccgagaatgccaacagtaatcctctcttaagttcgaaatctagaagcacatcttcgcatggacgcaggcctttgatcaggcaagacaggattgttggtgttcccctggaactcgagcagtctacacacagacacacaccagaaacagaagtgcctccttccaatccttggcagaattggaccagaacccctagtccgtttgaagacaggaccgcttttccttccaaattagagacaacccccactaccagcccattgcctgaaaggaaagaacatataaaggaatctactgaaatacctagtcctttttctccaggcgtaccatgggagtatcatgattccaatcccaacaggagtcttagtaatgtcttttctcaaatccacagccgcccggaatcttctaaaggtgttatttcaattagcaaaagcacagagaggctttcccccctaatgaaagatatcaagtctaataaattcaaaaagtcacagagtatcgatgagattgacattggtacatataaggtgtataacataccattagaaaactatgcttctgggagtgatcacttaggaagccacgaacgaccggataagatgctgggaccagagcatggtatgtccagtatgtctcgaagccagtcagtcccaatgctggatgatgagatgctcacctacggaagtagtaaggggccacaacaacaaaaagcttctatgacaaaaaaagtctatcagtttgaccaaagcttcaatcctcaaggatcagtggaagtgaaagccgaaaagaggataccacccccttttcaacacaatcccgagtacgtgcaacaggccagcaaaaacatcgccaaggatttgattagtcctagagcttacagaggatacccaccgatggagcaaatgttttcattttctcagccatctgtgaatgaggatgctgtggtgaatgcccagttcgcaagccaaggggccagggcgggcttcctgagaagggccgactccctggtgagcgccacagaaatggccatgtttagaagggtcaatgagcctcatgagctgcccccaactgataggtacggcagacccccatataggggagggctggatcgccaaagcagcgttacagtgactgagtcccagttcctgaaaaggaatggcaggtatgaagatgaacacccttcatatcaagaagtgaaagctcaggcgggaagttttccggttaaaaaccttacccaaaggaggccattgtctgcgagaagctacagtacagagagttacggtgcctcccaaaccaggccagtttcagctaggcctactatggcagctcttttggaaaaaataccatctgactataacttgggtaactatggtgacaagccatcagataacagtgatttaaagacgaggcctactcctgtgaagggagaggagagctgtggtaaaatgcctgcagactggagacaacagctgcttagacatatagaagctagacggttagacaggaatgctgcttacaaacacaatacagttaaccttggcatgctgccctatggaggtatttcagcaatgcatgcaggcagaagcatgactttaaacttgcagactaagtctaaatttgatcatcaagaactacctcttcagaaaaccccgtcccagcaaagcaacattttagacaatggacaagaagatgtatctcctagtggccaatggaatccttatccacttgggaggcgggatgtacctccggacaccattactaagaaggcaggcagccacatccagacgttgatggggtcccaaagccttcagcatcgcagccgggagcagcagccgtatgaaggaaatataaacaaagtgaccatccagcaatttcagtcaccattgcctattcagatcccctcttcacaggccacccggggacctcagcctggacggtgcttaattcaaactaaagggcaaaggagtatggatggatatccagagcagttttgtgtgagaatagaaaagaatcctggccttggatttagtatcagtggtggaattagtggacaaggaaatccattcaaaccttctgacaagggtatctttgttactagggttcagcctgatgggccagcatcaaacctactgcagcctggtgataagatccttcaggcaaatggacacagttttgtacatatggaacatgaaaaagctgtattactactgaagagtttccagaacacagtagacctagttattcaacgtgagcttactgtctaaatattttttataaatagtgaagatacgtctagccagacctaatgttcaaaaataaatttatacatagaaacaaattttgccaattgctggaccaatggcaaacattaagctttctagaccat

SEQ ID NO: 4097 - DNA, 3110 bp, Homo sapiens
attggatcaaacatgtcacaagagtcggacaataataaaagactagtggccttagtgcccatgcccagtgaccctccattcaatacccgaagagcctacaccagtgaggatgaagcctggaagtcatacttggagaatcccctgacagcagccaccaaggccatgatgagcattaatggtgatgaggacagtgctgctgccctcggcctgctctatgactactacaaggttcctcgagacaagaggctgctgtctgtaagcaaagcaagtgacagccaagaagaccaggagaaaagaaactgccttggcaccagtgaagcccagagtaatttgagtggaggagaaaaccgagtgcaagtcctaaagactgttccagtgaacctttccctaaatcaagatcacctggagaattccaagcgggaacagtacagcatcagcttccccgagagctctgccatcatcccggtgtcgggaatcacggtggtgaaagctgaagatttcacaccagttttcatggccccacctgtgcactatccccggggagatggggaagagcaacgagtggttatctttgaacagactcagtatgacgtgccctcgctggccacccacagcgcctatctcaaagacgaccagcgcagcactccggacagcacatacagcgagagcttcaaggacgcagccacagagaaatttcggagtgcttcagttggggctgaggagtacatgtatgatcagacatcaagtggcacatttcagtacaccctggaagccaccaaatctctccgtcagaagcagggggagggccccatgacctacctcaacaaaggacagttctatgccataacactcagcgagaccggagacaacaaatgcttccgacaccccatcagcaaagtcaggagtgtggtgatggtggtcttcagtgaagacaaaaacagagatgaacagctcaaatactggaaatactggcactctcggcagcatacggcgaagcagagggtccttgacattgccgattacaaggagagctttaatacgattggaaacattgaagagattgcatataatgctgtttcctttacctgggacgtgaatgaagaggcgaagattttcatcaccgtgaattgcttgagcacagatttctcctcccaaaaaggggtgaaaggacttcctttgatgattcagattgacacatacagttataacaatcgtagcaataaacccattcatagagcttattgccagatcaaggtcttctgtgacaaaggagcagaaagaaaaatccgagatgaagagcggaagcagaacaggaagaaagggaaaggccaggcctcccaaactcaatgcaacagctcctctgatgggaagttggctgccatacctttacagaagaagagtgacatcacctacttcaaaaccatgcctgatctccactcacagccagttctcttcatacctgatgttcactttgcaaacctgcagaggaccggacaggtgtattacaacacggatgatgaacgagaaggtggcagtgtccttgttaaacggatgttccggcccatggaagaggagtttggtccagtgccttcaaagcagatgaaagaagaagggacaaagcgagtgctcttgtacgtgaggaaggagactgacgatgtgttcgatgcattgatgttgaagtctcccacagtgaagggcctgatggaagcgatatctgagaaatatgggctgcccgtggagaagatagcaaagctttacaagaaaagcaaaaaaggcatcttggtgaacatggatgacaacatcatcgagcactactcgaacgaggacaccttcatcctcaacatggagagcatggtggagggcttcaaggtcacgctcatggaaatctagccctgggtttggcatccgctttggctggagctctcagtgcgttcctccctgagagagacagaagccccagccccagaacctggagacccatctcccccatctcacaactgctgttacaagaccgtgctggggagtggggcaagggacaggccccactgtcggtgtgcttggcccatccactggcacctaccacggagctgaagcctgagcccctcaggaaggtgccttaggcctgttggattcctatttattgcccaccttttcctggagcccaggtccaggcccgccaggactctgcaggtcactgctagctccagatgagaccgtccagcgttcccccttcaagagaaacactcatcccgaacagcctaaaaaattcccatcccttctctctcacccctccatatctatctcccgagtggctggacaaaatgagctacgtctgggtgcagtagttataggtggggcaagaggtggatgcccactttctggtcagacacctttaggttgctctggggaaggctgtcttgctaaatacctccagggttcccagcaagtggccaccaggccttgtacaggaagacattcagtcaccgtgtaattagtaacacagaaagtctgcctgtctgcattgtacatagtgtttataatattgtaataatatattttacctgtggtatgtgggcatgtttactgccactggcctagaggagacacagacctggagaccgttttaatgggggtttttgcctctgtgcctgttcaagagacttgcagggctaggtagagggcctttgggatgttaaggtgactgcagctgatgccaagatggactctgcaatgggcatacctgggggctcgttccctgtccccagaggaagccccctctccttctccatgggcatgactctccttcgaggccaccacgtttatctcacaatgatgtgttttgcttgactttccctttgcgctgtctcatgggaaaggtcattctgtctgagaccccagctccttctccagctttggctgcgggcatggcctgagctttctggagagcctctgcagggggtttgccatcagggccctgtggctgggtctgctgcagagctccttggctatcaggagaatcctggacactgtactgtgcctcccagtttacaaacacgcccttcatctcaagtggccctttaaaaggcctgctgccatgtgagagctgtgaa

SEQ ID NO: 4098 - DNA, 3110 bp, Homo sapiens; identical to SEQ ID NO: 4097

SEQ ID NO: 4099 - DNA, 1836 bp, Homo sapiens
ttcaggaaggagcccaggagcagaggaagtagagagagagacaacatgttacatctgcaccattcttgtttgtgtttcaggagctggctgccagcgatgctcgctgtactgctaagtttggcgccatcagcttccagcgacatttccgcctcccgaccgaacatccttcttctgatggcggacgaccttggcattggggacgttggctgctatggcaacaacaccatgaggactccgaatattgaccgccttgcagaggacggcgtgaagctgacccaacacatctctgccgcatctttgtgcaccccaagcagagccgccttcctcacgggcagataccctgtgcgatcagggatggtttccagcattggttaccgtgttcttcagtggaccggagcatctggaggtcttccaacaaatgagacaacttttgcaaaaatactgaaagagaaaggctatgccactggactcattggaaaatggcatctgggtctcaactgtgagtcagccagtgatcattgccaccaccctctccatcatggctttgaccatttctacggaatgcctttctccttgatgggtgattgcgcccgctgggaactctcagagaagcgtgtcaacctggaacaaaaactcaacttcctcttccaagtcctggccttggttgccctcacactggtagcagggaagctcacacacctgatacccgtctcgtggatgccggtcatctggtcagccctttcggccgtcctcctcctcgcaagctcctattttgtgggtgctctgattgtccatgccgattgctttctgatgagaaaccacaccatcacggagcagcccatgtgcttccaaagaacgacaccccttattctgcaggaggttgcgtcctttctcaaaaggaataagcatgggcctttcctcctctttgtttcctttctacacgttcacatccctcttatcactatggagaacttcctcgggaagagtctccacgggctgtatggggacaacgtagaggagatggactggatggtaggacggatccttgacactttggacgtggagggtttgagcaacagcaccctcatttattttacgtcggatcacggcggttccctagagaatcaacttggaaacacccagtatggtggctggaatggaatttataaaggtgggaagggcatgggaggatgggaaggtgggatccgcgtgcccgggatcttccgctggcccggggtgctcccggccggccgagtgattggcgagcccacgagtctgatggacgtgttccccaccgtggtccggctggcgggcggcgaggtgccccaggacagagtgattgacggccaagaccttctgcccttgctcctggggacagcccaacactcagaccacgagttcctgatgcattattgtgagaggtttctgcacgcagccaggtggcatcaacgggacagaggaacaatgtggaaagtccactttgtgacgcctgtgttccagccagagggagccggtgcctgctatggaagaaaggtctgcccgtgctttggggaaaaagtagtccaccacgatccacctttgctctttgacctctcaagagacccttctgagacccacatcctcacaccagcctcagagcccgtgttctatcaggtgatggaacgagtccagcaggcggtgtgggaacaccagcggacactcagcccagttcctctgcagctggacaggctgggcaacatctggagaccgtggctgcagccctgctgtggcccgttccccctctgctggtgccttagggaagatgacccacaataaatgtctgcagtgaaaagctgg

SEQ ID NO: 4100 - DNA, 7143 bp, Homo sapiens
ggagggaggggtgggaagcaccatgcagtttgtatcctgggccacactgctaacgctcctggtgcgggacctggccgagatggggagcccagacgccgcggcggccgtgcgcaaggacaggctgcacccgaggcaagtgaaattattagagaccctgagcgaatacgaaatcgtgtctcccatccgagtgaacgctctcggagaaccctttcccacgaacgtccacttcaaaagaacgcgacggagcattaactctgccactgacccctggcctgccttcgcctcctcctcttcctcctctacctcctcccaggcgcattaccgcctctctgccttcggccagcagtttctatttaatctcaccgccaatgccggatttatcgctccactgttcactgtcaccctcctcgggacgcccggggtgaatcagaccaagttttattccgaagaggaagcggaactcaagcactgtttctacaaaggctatgtcaataccaactccgagcacacggccgtcatcagcctctgctcaggaatgctgggcacattccggtctcatgatggggattattttattgaaccactacagtctatggatgaacaagaagatgaagaggaacaaaacaaaccccacatcatttataggcgcagcgccccccagagagagccctcaacaggaaggcatgcatgtgacacctcagaacacaaaaataggcacagtaaagacaagaagaaaaccagagcaagaaaatggggagaaaggattaacctggctggtgacgtagcagcattaaacagcggcttagcaacagaggcattttctgcttatggtaataagacggacaacacaagagaaaagaggacccacagaaggacaaaacgttttttatcctatccacggtttgtagaagtcttggtggtggcagacaacagaatggtttcataccatggagaaaaccttcaacactatattttaactttaatgtcaattgtagcctctatctataaagacccaagtattggaaatttaattaatattgttattgtgaacttaattgtgattcataatgaacaggatgggccttccatatcttttaatgctcagacaacattaaaaaacttttgccagtggcagcattcgaagaacagtccaggtggaatccatcatgatactgctgttctcttaacaagacaggatatctgcagagctcacgacaaatgtgataccttaggcctggctgaactgggaaccatttgtgatccctatagaagctgttctattagtgaagatagtggattgagtacagcttttacgatcgcccatgagctgggccatgtgtttaacatgcctcatgatgacaacaacaaatgtaaagaagaaggagttaagagtccccagcatgtcatggctccaacactgaacttctacaccaacccctggatgtggtcaaagtgtagtcgaaaatatatcactgagtttttagacactggttatggcgagtgtttgcttaacgaacctgaatccagaccctaccctttgcctgtccaactgccaggcatcctttacaacgtgaataaacaatgtgaattgatttttggaccaggttctcaggtgtgcccatatatgatgcagtgcagacggctctggtgcaataacgtcaatggagtacacaaaggctgccggactcagcacacaccctgggccgatgggacggagtgcgagcctggaaagcactgcaagtatggattttgtgttcccaaagaaatggatgtccccgtgacagatggatcctggggaagttggagtccctttggaacctgctccagaacatgtggagggggcatcaaaacagccattcgagagtgcaacagaccagaaccaaaaaatggtggaaaatactgtgtaggacgtagaatgaaatttaagtcctgcaacacggagccatgtctcaagcagaagcgagacttccgagatgaacagtgtgctcactttgacgggaagcattttaacatcaacggtctgcttcccaatgtgcgctgggtccctaaatacagtggaattctgatgaaggaccggtgcaagttgttctgcagagtggcagggaacacagcctactatcagcttcgagacagagtgatagatggaactccttgtggccaggacacaaatgatatctgtgtccagggcctttgccggcaagctggatgcgatcatgttttaaactcaaaagcccggagagataaatgtggggtttgtggtggcgataattcttcatgcaaaacagtggcaggaacatttaatacagtacattatggttacaatactgtggtccgaattccagctggtgctaccaatattgatgtgcggcagcacagtttctcaggggaaacagacgatgacaactacttagctttatcaagcagtaaaggtgaattcttgctaaatggaaactttgttgtcacaatggccaaaagggaaattcgcattgggaatgctgtggtagagtacagtgggtccgagactgccgtagaaagaattaactcaacagatcgcattgagcaagaacttttgcttcaggttttgtcggtgggaaagttgtacaaccccgatgtacgctattctttcaatattccaattgaagataaacctcagcagttttactggaacagtcatgggccatggcaagcatgcagtaaaccctgccaaggggaacggaaacgaaaacttgtttgcaccagggaatctgatcagcttactgtttctgatcaaagatgcgatcggctgccccagcctggacacattactgaaccctgtggtacagactgtgacctgaggtggcatgttgccagcaggagtgaatgtagtgcccagtgtggcttgggttaccgcacattggacatctactgtgccaaatatagcaggctggatgggaagactgagaaggttgatgatggtttttgcagcagccatcccaaaccaagcaaccgtgaaaaatgctcaggggaatgtaacacgggtggctggcgctattctgcctggactgaatgttcaaaaagctgtgacggtgggacccagaggagaagggctatttgtgtcaatacccgaaatgatgtactggatgacagcaaatgcacacatcaagagaaagttaccattcagaggtgcagtgagttcccttgtccacagtggaaatctggagactggtcagagtgcttggtcacctgtggaaaagggcataagcaccgccaggtctggtgtcagtttggtgaagatcgattaaatgatagaatgtgtgaccctgagaccaagccaacatctatgcagacttgtcagcagccggaatgtgcatcctggcaggcgggtccctggggacagtgcagtgtcacttgtggacagggataccagctaagagcagtgaaatgcatcattgggacttatatgtcagtggtagatgacaatgactgtaatgcagcaactagaccaactgatacccaggactgtgaattaccatcatgtcatcctcccccagctgccccggaaacgaggagaagcacatacagtgcaccaagaacccagtggcgatttgggtcttggaccccatgctcagccacttgtgggaaaggtacccggatgagatacgtcagctgccgagatgagaatggctctgtggctgacgagagtgcctgtgctaccctgcctagaccagtggcaaaggaagaatgttctgtgacaccctgtgggcaatggaaggccttggactggagctcttgctctgtgacctgtgggcaaggtagggcaacccggcaagtgatgtgtgtcaactacagtgaccacgtgatcgatcggagtgagtgtgaccaggattatatcccagaaactgaccaggactgttccatgtcaccatgccctcaaaggaccccagacagtggcttagctcagcaccccttccaaaatgaggactatcgtccccggagcgccagccccagccgcacccatgtgctcggtggaaaccagtggagaactggcccctggggagcatgttccagtacctgtgctggcggatcccagcggcgtgttgttgtatgtcaggatgaaaatggatacaccgcaaacgactgtgtggagagaataaaacctgatgagcaaagagcctgtgaatccggcccttgtcctcagtgggcttatggcaactggggagagtgcactaagctgtgtggtggaggcataagaacaagactggtggtctgtcagcggtccaacggtgaacggtttccagatttgagctgtgaaattcttgataaacctcccgatcgtgagcagtgtaacacacatgcttgtccacacgacgctgcatggagtactggcccttggagctcgtgttctgtctcttgtggtcgagggcataaacaacgaaatgtttactgcatggcaaaagatggaagccatttagaaagtgattactgtaagcacctggctaagccacatgggcacagaaagtgccgaggaggaagatgccccaaatggaaagctggcgcttggagtcagtgctctgtgtcctgtggccgaggcgtacagcagaggcatgtgggctgtcagatcggaacacacaaaatagccagagagaccgagtgcaacccatacaccagaccggagtcggaacgcgactgccaaggcccacggtgtcccctctacacttggagggcagaggaatggcaagaatgcaccaagacctgcggcgaaggctccaggtaccgcaaggtggtgtgtgtggatgacaacaaaaacgaggtgcatggggcacgctgtgacgtgagcaagcggccggtggaccgtgaaagctgtagtttgcaaccctgcgagtatgtctggatcacaggagaatggtcagagtgctcagtgacctgtggaaaaggctacaaacaaaggcttgtctcgtgcagcgagatttacaccgggaaggagaattatgaatacagctaccaaaccaccatcaactgcccaggcacgcagccccccagtgttcacccctgttacctgagggactgccctgtctcggccacctggagagttggcaactgggggagctgctcagtgtcttgtggtgttggagtgatgcagagatctgtgcaatgtttaaccaatgaggaccaacccagccacttatgccacactgatctgaagccagaagaacgaaaaacctgccgtaatgtctataactgtgagttaccccagaattgcaaggaggtaaaaagacttaaaggtgccagtgaagatggtgaatatttcctgatgattagaggaaagcttctgaagatattctgtgcggggatgcactctgaccaccccaaagagtacgtgacactggtgcatggagactctgagaatttctccgaggtttatgggcacaggttacacaacccaacagaatgtccctataacgggagccggcgcgatgactgccaatgtcggaaggattacacggccgctgggttttccagttttcagaaaatcagaatagacctgaccagcatgcagataatcaccactgacttacagtttgcaaggacaagcgaaggacatcccgtcccttttgccacagccggggattgctacagcgctgccaagtgcccacagggtcgttttagcatcaacctttatggaaccggcttgtctttaactgaatctgccagatggatatcacaagggaattatgctgtctctgacatcaagaagtcgccggatggtacccgagtcgtagggaaatgcggtggttactgtggaaaatgcactccatcctctggtactggcctggaggtgcgagttttatagctaaggtgctttgaagaggaagccattatggatggatgaaggatagtaatgcaatacctccaccttaatttgggtgcatgtgtatgtgtgtgtgtgtttgtgtgtgacttgtatgcttgtgtgtgtaaatgtgtgtacatatacatatatacatatctacacatacatatatacacatatatgtgtgtatgtagatatgtagactatcctaatgatgtaaagtttaatatttatgtttgaaattatttattgtgatgtaatatttttgtacgtaaaatgattctattatgactgcctttgcatgtagtaatatgacaaagtgatccttcattatcacggtacactattgtttacttttcatctgtaaatgttttattgttacttttttaaaatgaatttttttaaaacaatctagccatcatcaaggtgctataagagttgtataaaagatatttttggcatttctaggcaagtatcagccaataagtatgttagtgatatcacagattgtaccaactattaactatgttaaataagtattcagtttcatgtgatctctgggaaaaaaatatgctgccttggtgctaatattgtatgtatttaaatgatcatctgactcagaaatataaacacttttaatgaaagggaggaacggaaggacaatttccagtgcacagaatcacttggatgaaataagaccagctctttacccttatttttggatatgccttttttggaagagacttagactttatccttattgttgttagtgttgttaatattcgttgcttcagcccacggtgccttggtctctccacaatcaaatggaggatcccccaagcagcttcattacagagtgatattgggaaagtgagatcctctcaccattttgccaagatactctaaaatgacatccaagtttaccagtagaaagacacaggatgcacagaatgggcatgaccttcagctcacgagcacacctggagaaattcagaaccaggttctgaatcatcacgattgccttttgcatgaaaacatcggctggtgatgtgacttctcttcaggccatgagcctaacaccctgccggttttcatgcccgctgcagtaatggacgtttgtgtgaagaaatgaactgtggagtacaaaatgctttgagtctttccgattgctcattaattcacttttttgttacttctttccaaaatggaagtgctgaagccatggtctttctgcccctccaagctgatgaagggaagcctttgccaatggcccatggaagacacttggtttgagaaaccctgcccacttccaa

SEQ ID NO: 4101 - DNA, 4747 bp, Homo sapiens
ttgcccagtagttggaaagtgaactcgactcgtgatggttctcctgtcactttggttgatagcagccgctctggtagaggttaggacttcagctgatggacaagctggtaatgaagaaatggtgcaaatagatttaccaataaagagatatagagagtatgagctggtgactccagtcagcacaaatctagaaggacgctatctctcccatactctttctgcgagtcacaaaaagaggtcagcgagggacgtgtcttccaaccctgagcagttgttctttaacatcacggcatttggaaaagattttcatctgcgactaaagcccaacactcaactagtagctcctggggctgttgtggagtggcatgagacatctctggtgcctgggaatataaccgatcccattaacaaccatcaaccaggaagtgctacgtatagaatccggaaaacagagcctttgcagactaactgtgcttatgttggtgacatcgtggacattccaggaacctctgttgccatcagcaactgtgatggtctggctggaatgataaaaagtgataatgaagagtatttcattgaacccttggaaagaggtaaacagatggaggaagaaaaaggaaggattcatgttgtctacaagagatcagctgtagaacaggctcccatagacatgtccaaagacttccactacagagagtcggacctggaaggccttgatgatctaggtactgtttatggcaacatccaccagcagctgaatgaaacaatgagacgccgcagacacgcgggagaaaacgattacaatatcgaggtactgctgggagtggatgactctgtggtccgtttccatggcaaagagcacgtccaaaactacctcctgaccctaatgaacattgtgaatgaaatttaccatgatgagtccctcggagtgcatataaatgtggtcctggtgcgcatgataatgctgggatatgcaaagtccatcagcctcatagaaaggggaaacccatccagaagcttggagaatgtgtgtcgctgggcgtcccaacagcaaagatctgatctcaaccactctgaacaccatgaccatgcaatttttttaaccaggcaagactttggacctgctggaatgcaaggatatgctccagtcaccggcatgtgtcatccagtgagaagttgtaccctgaatcatgaggatggtttttcatctgcttttgtagtagcccatgaaacgggccatgtgttgggaatggagcatgatggacaaggcaacaggtgtggtgatgagactgctatgggaagtgtcatggctcccttggtacaagcagcattccatcgttaccactggtcccgatgcagtggtcaagaactgaaaagatatatccattcctatgactgtctccttgatgacccttttgatcatgattggcctaaactcccagaacttcctggaatcaattattctatggatgagcaatgtcgttttgattttggtgttggctataaaatgtgcaccgcgttccgaacctttgacccatgtaaacagctgtggtgtagccatcctgataatccctacttttgtaagactaaaaagggacctccacttgatgggactgaatgtgctgctggaaaatggtgctataagggtcattgcatgtggaagaatgctaatcagcaaaaacaagatggcaattgggggtcatggactaaatttggctcctgttctcggacatgtggaactggtgttcgtttcagaacacgccagtgcaataatcccatgcccatcaatggtggtcaggattgtcctggtgttaattttgagtaccagctttgtaacacagaagaatgccaaaaacactttgaggacttcagagcacagcagtgtcagcagcgaaactcccactttgaataccagaataccaaacaccactggttgccatatgaacatcctgaccccaagaaaagatgccacctttactgtcagtccaaggagactggagatgttgcttacatgaaacaactggtgcatgatggaacgcactgttcttacaaagatccatatagcatatgtgtgcgaggagagtgtgtgaaagtgggctgtgataaagaaattggttctaataaggttgaggataagtgtggtgtctgtggaggagataattcccactgccgaaccgtgaaggggacatttaccagaactcccaggaagcttgggtaccttaagatgtttgatataccccctggggctagacatgtgttaatccaagaagacgaggcttctcctcatattcttgctattaagaaccaggctacaggccattatattttaaatggcaaaggggaggaagccaagtcgcggaccttcatagatcttggtgtggagtgggattataacattgaagatgacattgaaagtcttcacaccgatggacctttacatgatcctgttattgttttgattatacctcaagaaaatgatacccgctctagcctgacatataagtacatcatccatgaagactctgtacctacaatcaacagcaacaatgtcatccaggaagaattagatacttttgagtgggctttgaagagctggtctcagtgttccaaaccctgtggtggaggtttccagtacactaaatatggatgccgtaggaaaagtgataataaaatggtccatcgcagcttctgtgaggccaacaaaaagccgaaacctattagacgaatgtgcaatattcaagagtgtacacatccactctgggtagcagaagaatgggaacactgcaccaaaacctgtggaagttctggctatcagcttcgcactgtacgctgccttcagccactccttgatggcaccaaccgctctgtgcacagcaaatactgcatgggtgaccgtcccgagagccgccggccctgtaacagagtgccctgccctgcacagtggaaaacaggaccctggagtgagtgttcagtgacctgcggtgaaggaacggaggtgaggcaggtcctctgcagggctggggaccactgtgatggtgaaaagcctgagtcggtcagagcctgtcaactgcctccttgtaatgatgaaccatgtttgggagacaagtccatattctgtcaaatggaagtgttggcacgatactgctccataccaggttataacaagttatgttgtgagtcctgcagcaagcgcagtagcaccctgccaccaccataccttctagaagctgctgaaactcatgatgatgtcatctctaaccctagtgacctccctagatctctagtgatgcctacatctttggttccttatcattcagagacccctgcaaagaagatgtctttgagtagcatctcttcagtgggaggtccaaatgcatatgctgctttcaggccaaacagtaaacctgatggtgctaatttacgccagaggagtgctcagcaagcaggaagtaagactgtgagactggtcaccgtaccatcctccccacccaccaagagggtccacctcagttcagcttcacaaatggctgctgcttccttctttgcagccagtgattcaataggtgcttcttctcaggcaagaacctcaaagaaagatggaaagatcattgacaacagacgtccgacaagatcatccaccttagaaagatgagaaagtgaaccaaaaaggctagaaaccagaggaaaacctggacaacctctctcttcccatggtgcatatgcttgtttaaagtggaaatctctatagatcgtcagctcattttatctgtaattggaagaacagaaagtgctggctcactttctagttgctttcatcctccttttgttctgcattgactcatttaccagaattcattggaagaaatcaccaaagattattacaaaagaaaaatatgttgctaagattgtgttggtcgctctctgaagcagaaaagggactggaaccaattgtgcatatcagctgactttttgtttgttttagaaaagttacagtaaaaattaaaaagagataccaatggtttacactttaacaagaaattttggatatggaacaaagaattcttagacttgtattcctatttatctatattagaaatattgtatgagcaaatttgcagctgttgtgtaaatactgtatattgcaaaaatcagtattattttaagagatgtgttctcaaatgattgtttactatattacatttctggatgttctaggtgcctgtcgttgagtattgccttgtttgacattctataggttaattttcaaagcagagtattacaaaagagaagttagaattacagctactgacaatataaagggttttgttgaatcaacaatgtgatacgtaaattatagaaaaagaaaagaaacacaaaagctatagatatacagatatcagcttacctattgccttctatacttataatttaaaggattggtgtcttagtacacttgtggtcacagggatcaacgaatagtaaataatgaactcgtgcaagacaaaactgaaaccctctttccaggacctcagtaggcaccgttgaggtgtcctttgtttttgtgtgtgtgtgttcttttttaattttcgcattgttgacagatacaaacagttatactcaatgtactgtaataatcgcaaaggaaaaagttttgggataacttatttgtatgttggtagctgagaaaaatatcatcagtctagaattgatatttgagtatagtagagctttggggctttgaaggcag

SEQ ID NO: 4102 - DNA, 3310 bp, Homo sapiens
ggacgcatcgtagaaaggggtggtggcgcccgaccccgcgccccggcccgaagctctgagggcttcccggcccccactgcctgcggcatggcccggggctcggcgctcccgcggcggccgctgctgtgcatcccggccgtctgggcggccgccgcgcttctgctctcagtgtcccggacttcaggtgaagtggaggttctggatccgaacgaccctttaggaccccttgatgggcaggacggcccgattccaactctgaaaggttactttctgaattttctggagccagtaaacaatatcaccattgtccaaggccagacggcaattctgcactgcaaggtggcaggaaacccaccccctaacgtgcggtggctaaagaatgatgccccggtggtgcaggagccgcggcggatcatcatccggaagacagaatatggttcacgactgcgaatccaggacctggacacgacagacactggctactaccagtgcgtggccaccaacgggatgaagaccattaccgccactggcgtcctgtttgtgcggctgggtccaacgcacagcccaaatcataactttcaggatgattaccacgaggatgggttctgccagccttaccggggaattgcctgtgcacgcttcattggcaaccggaccatttatgtggactcgcttcagatgcagggggagattgaaaaccgaatcacagcggccttcaccatgatcggcacgtctacgcacctgtcggaccagtgctcacagttcgccatcccatccttctgccacttcgtgtttcctctgtgcgacgcgcgctcccgggcacccaagccgcgtgagctgtgccgcgacgagtgcgaggtgctggagagcgacctgtgccgccaggagtacaccatcgcccgctccaacccgctcatcctcatgcggcttcagctgcccaagtgtgaggcgctgcccatgcctgagagccccgacgctgccaactgcatgcgcattggcatcccagccgagaggctgggccgctaccatcagtgctataacggctcaggcatggattacagaggaacggcaagcaccaccaagtcaggccaccagtgccagccgtgggccctgcagcacccccacagccaccacctgtccagcacagacttccctgagcttggaggggggcacgcctactgccggaaccccggaggccagatggagggcccctggtgctttacgcagaataaaaacgtacgcatggaactgtgtgacgtaccctcgtgtagtccccgagacagcagcaagatggggattctgtacatcttggtccccagcatcgcaattccactggtcatcgcttgccttttcttcttggtttgcatgtgccggaataagcagaaggcatctgcgtccacaccgcagcggcgacagctgatggcctcgcccagccaagacatggaaatgcccctcattaaccagcacaaacaggccaaactcaaagagatcagcctgtctgcggtgaggttcatggaggagctgggagaggaccggtttgggaaagtctacaaaggtcacctgttcggccctgccccgggggagcagacccaggctgtggccatcaaaacgctgaaggacaaagcggaggggcccctgcgggaggagttccggcatgaggctatgctgcgagcacggctgcaacaccccaacgtcgtctgcctgctgggcgtggtgaccaaggaccagcccctgagcatgatcttcagctactgttcgcacggcgacctccacgaattcctggtcatgcgctcgccgcactcggacgtgggcagcaccgatgatgaccgcacggtgaagtccgccctggagccccccgacttcgtgcaccttgtggcacagatcgcggcggggatggagtacctatccagccaccacgtggttcacaaggacctggccacccgcaatgtgctagtgtacgacaagctgaacgtgaagatctcagacttgggcctcttccgagaggtgtatgccgccgattactacaagctgctggggaactcgctgctgcctatccgctggatggccccagaggccatcatgtacggcaagttctccatcgactcagacatctggtcctacggtgtggtcctgtgggaggtcttcagctacggcctgcagccctactgcgggtattccaaccaggatgtggtggagatgatccggaaccggcaggtgctgccttgccccgatgactgtcccgcctgggtgtatgccctcatgatcgagtgctggaacgagttccccagccggcggccccgcttcaaggacatccacagccggctccgagcctggggcaacctttccaactacaacagctcggcgcagacctcgggggccagcaacaccacgcagaccagctccctgagcaccagcccagtgagcaatgtgagcaacgcccgctacgtggggcccaagcagaaggccccgcccttcccacagccccagttcatccccatgaagggccagatcagacccatggtgcccccgccgcagctctacatccccgtcaacggctaccagccggtgccggcctatggggcctacctgcccaacttctacccggtgcagatcccaatgcagatggccccgcagcaggtgcctcctcagatggtccccaagcccagctcacaccacagtggcagtggctccaccagcacaggctacgtcaccacggccccctccaacacatccatggcagacagggcagccctgctctcagagggcgctgatgacacacagaacgccccagaagatggggcccagagcaccgtgcaggaagcagaggaggaggaggaaggctctgtcccagagactgagctgctgggggactgtgacactctgcaggtggacgaggcccaagtccagctggaagcttgagtggcaccagggcccagggttcggggatagaagccccgccgagaccccacagggacctcagtcacctttgagaagacaccatactcagcaatcacaagagcccgccggccagtgggcttgtttgcagactgggtgaggtggagccctgctcctctctgtcctctgacacagctgccctgcctaggagcacccaagccaggcagggggtctggcagcacggcgtcctggggagcaggacacatggtcatccccagggctgtatacattgattctggtggtagactggtagtgagcagcaaatgcctttcaagaaaataggtggcagcttcactccatgtcatatatggagtgaatatttcaaaacgttgggaataagggcctgcaaaaggca

SEQ ID NO: 4103 - DNA, 3974 bp, Homo sapiens; identical to SEQ ID NO: 565

SEQ ID NO: 4104 - DNA, 3177 bp, Homo sapiens; identical to SEQ ID NO: 130

SEQ ID NO: 4105 - DNA, 3156 bp, Homo sapiens
ctctggtgatacagaagaaaagacagtctccattttcaaacagtccctcctgggagaacacagacaggcagaggattacaacacaaggcagcaagcactgggagacgaaagttttggcatctgttccctggctgtgccaagatgggcgattggagcttcctgggaaatttcctggaggaagtacacaagcactcgaccgtggtaggcaaggtctggctcactgtcctcttcatattccgtatgctcgtgctgggcacagctgctgagtcttcctggggggatgagcaggctgatttccggtgtgatacgattcagcctggctgccagaatgtctgctacgaccaggctttccccatctcccacattcgctactgggtgctgcagatcatcttcgtctccacgccctctctggtgtacatgggccacgccatgcacactgtgcgcatgcaggagaagcgcaagctacgggaggccgagagggccaaagaggtccggggctctggctcttacgagtacccggtggcagagaaggcagaactgtcctgctgggaggaagggaatggaaggattgccctccagggcactctgctcaacacctatgtgtgcagcatcctgatccgcaccaccatggaggtgggcttcattgtgggccagtacttcatctacggaatcttcctgaccaccctgcatgtctgccgcaggagtccctgtccccacccggtcaactgttacgtatcccggcccacagagaagaatgtcttcattgtctttatgctggctgtggctgcactgtccctcctccttagcctggctgaactctaccacctgggctggaagaagatcagacagcgatttgtcaaaccgcggcagcacatggctaagtgccagctttctggcccctctgtgggcatagtccagagctgcacaccaccccccgactttaatcagtgcctggagaatggccctgggggaaaattcttcaatcccttcagcaataatatggcctcccaacaaaacacagacaacctggtcaccgagcaagtacgaggtcaggagcagactcctggggaaggtttcatccaggttcgttatggccagaagcctgaggtgcccaatggagtctcaccaggtcaccgccttccccatggctatcatagtgacaagcgacgtcttagtaaggccagcagcaaggcaaggtcagatgacctatcagtgtgaccctcctttatgggaggatcaggaccaggtgggaacaaaggaggctcagagaagaaagacgtgtcccttctgaactgatgctttctcactgtcatcactgcttggctcctttgagccccgggtctcaatgacgttgctcattaattctagaaactataaccagggctctgggatagtaagagaggtgacaacccacccagactgcagttccctccccaccctctacccagtatacgaagcctttcagattactcatgaaacagggtagagggaaagaagggaagcatggcaaaagctggcctggaagggatagccagagggatagaatgactctctctctacataccagcagcataccaaatgcgttctctaagttcctacctccttgacctgatcaccctccctcctccaaggaagagctcaaagttcccagccaatagacagcatgaatcaaggaacttgcattatatgtgctcttgaatctgttgtctccatggaccattcctcggagtagtggtgagatggccttgggttgcccttggcttctcctccctctactcagccttaaaaagggcttcttggaactttaccagcagcctcagctttacaaatgccttggtatgtacctctggcaaatgccccaccttggtgatgttgcaacctttccttctgctagggtgtacacctagcctgtgcaggtgtcagccctgctagggagtcactgtacacacaaactctactggaattcctgccaacatctgtcaccctgcagctcctttacagttcaatccaatgatagaaaccatcccttccctttctcccttggctgttcacccagccattccctgaaggccttaccaacaggaatatccaagaagctgttgtcccctctcgaaccctgaccagatcatcagccactgaggccagtggaatttccccaggccttgttaaaacaaagaaagcattgtacctctcagattccccttgtggaaaaaaaaattctgctgtgaagatgaaaataaaaatggagagaaaacactggaaaactattttcccctcctatttacttcctttgctgactgccaacttagtgccaagaggaggtgtgatgacagctatggaggcccccagatctctctctcctggaggctttagcaggggcaaggaaatagtaggggaatctccagctctcttggcagggcctttatttaaagagcgcagagattcctatgtctccctagtgcccctaatgagactgccaagtgggggctgtagaaaagccttgccttccccagggattggcctggtctctgtattcactggatccataatgggttgctgttgttttggatgaaggtaaacgatgcttggaattggaaactgagacttatagagggattattacattattaaaatgcacgtgtgtgtgtgtgtgggtgctgatgggatgggtaaaggcttggggagtcctgaaataaggaaaggaaaccacagagaaacttgtgtcttcctgctctcctctccggctgcctggcagttattaacctaaacagatagccacaagaggttgggacagaggagggtaaaggctcagaaggaggttcaacctctgactcacctgcccatctctgggccctctgctgacacttggatgctattgttgggtggaaagataaatgagagtggagaggtggaggaaagtgactaggatgccatttaggaaggaatgtctgatcatcccgggtccctggaggggacaccttttaatctattgcctagcattaatattttctctccttctatctctgaaatgttttatgaaatgagtgttcttgaattagaaattctgtgggatcaatctttgatggtgagggttttagaaaggaaaaatatagtaaaatgtgtaatttgtcttaataaaatctatctctacatcta

SEQ ID NO: 4106 - DNA, 1118 bp, Homo sapiens
gttgttcctgaaaagaaggtgcctctggtggttcccaaaaagccagaagccccacctgctaaagtgcctgaagttccaaaagaagttgttccagaaaagaaagtagctgttcccaaaaagccagaagtcccaccagcaaaagtgccagaagtgccaaagaaacctgtcttggaagagaaaccagctgttcctgttccagaaagagcggagtctcctcccccagaagtatatgaagaacctgaggaaattgctcctgaagaggaaattgctcctgaagaggaaaagccagttcctgttgcagaagaggaggaaccagaggttccacctccagcagtgcctgaagagcccaagaagatcatcccagagaagaaagttcctgtcatcaaaaaaccagaagcaccgcctcctaaagaacctgagatgccaaagaaagttgttccagtgaagaaggtcccaactgttaagaagccagaaacaccagcagctaaagtgcctgaggtgcccaagaaacttgttccagtaaagaaagaacctgtgcctgttaccaaaaaaccagaagttcttccagaaaaagtgcccaaagtgcctgagaaaatcatcccagaaaaggaagtgtctgtgcctatccctgcagagccagaagttccacctgctgaagttgaagagactcctgaggaaataatatatgaagaaaaagcatctataaccattggtagaaaagagactccccctgttgaagaacgtgaaattgaaaagtatattaaacctgaagagcccgaacctgaaccacagcctgaagaaataccagtaaaagaacctgaacctgaaaaggttattgagaagccaaaactcaaaccaagacccccacctcctccacctgctccacctaaggaagatgtgaaggagaaaatattccaacttaaagctattccaaagaagaaagttcctgaaaaacctcaggttccagaaaaagtggagcttacacctctgaaagtaccagaaccaccacctccaaaacctgttgaagaggttgaagtacctactgttacaaaaagggaaaggaagattcctgaaccaacaaaagtgcctgaaatcaagccagcaatacctctccctgc

SEQ ID NO: 4107 - DNA, 1173 bp, Homo sapiens
agaagagaagaaacctgttcctgttcccaagaagaaggaagctccaccggcaaaagtgcctgaggttcctaagaagccagaggagaaagttcctgtgcttattcctaaaaaggagaagcctccgccagcaaaagttcctgaagtgcccaagaaacctgtgccagaggagaaagtaccagtaccagttcctaaaaaggtggaagctccacctgccaaagtgccagaggtacccaagaagcctgtgcctgagaagaaggtgccagttcctgctcctaagaaagtggaggctccacctgcaaaagtgccagaggtgcccaagaagctcatcccagaagaaaagaaaccaacacctgttccgaaaaaagtggaagcaccaccacccaaagtgccaaagaaacgtgaaccagttccagttcctgtagctctacctcaggaagaggaagttctatttgaagaagaaattgttcctgaagaggaagttctacctgaggaagaggaagttctacctgaggaagaggaagttctacctgaagaagaggaagttctacctgaagaagaggaaattccacctgaggaagaggaagttcctcccgaagaagaatatgtacctgaggaagaagaatttgtacctgaagaagaagtccttccagaagttaaacctaaggtgccagtacctgcaccagtgcctgaagtgccaaagaaacctgtacaagagaagaaagtccctgttcccgcccctaaaaaagtggaacctccaccaccacccaaagtgcctgaaattaagaagaaagtgacagagaagaaagtggtcattcccaagaaagaggaggctccccctgccaaagttcctgaggtgcctaagaaggtggaagaaaaacgaatcattctccctaaagaagaggaagttctaccagttgaagtgactgaggagcctgaagaagagcctatttcagaagaagaaatcccagaagaaccacctagcatagaggaagttgaagaggtggcaccacctagagtgcctgaagtgattaagaaagcagtacctgaagcacctactcctgttcctaaaaaagtggaggcaccaccagctaaagtgtcaaagaaaattcctgaggaaaaagtacctgttcctgttcagaaaaaagaggcacccccagccaaagtgcctgaagt

SEQ ID NO: 4108 - DNA, 3269 bp, Homo sapiens
tgacttccaggaccgtaagtttgcagaattactctcctatgatggcacagaaatcacaaggatctgacaaccttcaggaaggccaggaaaagagcaagagagagatcctgaagtgcaccaaaagcgcgtgggatccgctggatgagtggctgccccctgaccctgaggaggaaagccagagtctcaccatccccatgctggaagattccaagcaagaaagtattcagcagtggctggactctggattctttgtctctgcaaatgaaaactttcaacaagtcattgaccgcactgtttctttgtatgaacaagggatggttcaaatgactgtgaaagactacatgagatctttgcatcagttttcagaaactcccatcctatccagagggaccagtttcaactcttgctattctactgcaagtgtaccacaaagcattcctgaatggctggaattttgggagatagatccagtggagattctcttggatctggggtttggtgctgatgagccagacatctgcatgcaaatcccagccagattccttggttgtggctcagcagccagaggaatcaacatccgtgtttttcttgaagctcaaaagcagcgaatggacattgagaaccccaacttgtacggtcgtttccgacagctggaaatcctggaccatgtgaccaatgccttctcatctctgctgagtgatgtcagcatcctgccaaacagagctgaagagaaagctggaggagagagtgtgcaaagaacctcagtgagtgccgccaaagagcatcgaagaagaatgggtaaactcttaaggagagcttccaaacagaacatcaggcgggattgtaacccagaggtatcagagtccttcaaggtgaaggatgaagtttttgtcccctttacaaaaccatgggattgtggagcagagctagcagcaacctcaatcaaccacaagcaaaatcatttgtctctgtcagtagaacatcagtctctccaagcctgtgatgatttgctaccttatcctcctcatggtcttctgagcaagcagtggccttgctcatctatgccggccaagcaggctcctccttcctgtgtgtctgaggggtcagtcaagggcagaactcagaaggagaacttatttcagactaacaagctcaagagcttgtctcgtcttgcaggcaaaggaccagactcatttgaaatggaagaggtccaaagctttgaagaagagactggtaatcctcttgacatgacttcaggaactgtaggtgccagggtggacagagcaaatagctgccagtctgacagcagcgggttcctggaggagccgctggaaccgctgcccctccagatgccttccttgccaaacagccagagtcctgctgagaatggaggtagaaagccaagagatcagagccacagcttagtatcatcccaggactgtcagctagagtcggatgggccagattccaaaagtagggcgagcatgtctttttcaagccaagaagtgaatgccttggaacaaagggcctcagtatctgtgatggaggaagagtttctgcttgaggccatggaggggccaccagagctgtatatcccagacatggcctgtgccaagaccaccacgaggggagaatgcccaaggaaagacagccatctgtggcagcttctgccaatgccccatgctgagtatgaggtcaccagacccacagccacttccaaatatgatcatcctctggggtttatggtaacccacgtcacagaaatgcaggacagttttgtgaggcctgagggagctggcaaagtgcaaagccaccacaatgagtctcaaaggtcacctggaaatgatcatactcaagacaagttccttcatgttgactctgaggccccacgagaagaggaaagcagtggattctgtcctcacaccaaccacagcttactcgtaccagaaagctcatcacagtgtatccccaagcacagtgaaatcacaccttatgcaactgaccttgctcaaacatctgaaaagctcattccccacctccataaactgcctggagatcctgcccaggtgaagtcaaggtctggtactttgggtcagatactacctgggacagaagctgagatggaaaaccttcctctaaatactggcagctccaggtctgtaatgacccagatgtcctccagcctggtgtcggctgctcagagggctgtggccttggggactggtcccagaggaacatctttagaatgcactgtgtgtgatcctgttaccgcaacagaaacaagactggggacaaaagcaagacagttaaatgatgcttccattcagacttcagctctaagcaacaagaccttgacacatgggccccagcccctcaccaaatccgtctctctagactcaggcttctctagtatctgcccaatgggcacctgccatgctatacctgcccactgctgcatctgctatcatcaccaccctcactgccacggggagaggcaaagccctggccctgaaccctcagtctgtaggcactgcctgtgttcactaactggtcaccaggaagcccagttcatgacgactttgaaagcccttcaggacactacagtgagggagctatgttcctgcacagtccatgagatggaagccatgaagacgatatgccaaagtttccgggagtatttagaagaaattgaacagcaccttatgggacagcaggccctcttttccagggacatgtcagaggaggaaagggaggaggccgagcaactgcaaacgttacgtgaggccctgaggcagcaggtggcagagttggaatttcagttaggagaccgggctcagcaaatcagagaagggattttactgcagctggaggttctcacagcagagccacctgaacactattcaaatctgcatcaatataactggatagaagaaagcaatgggcagacttcatgttctaaaatccacccaggcatggccccgaggactgtgtttcctcccgatgatggccaggaggctccctgttcaggtgggacccagttggctgccttcactccacccaccttggagaacagcaccaggatgtctccttcatcatcagcttgggcaaagttaggtccaacccctttgtcaaattgtcctgttggagaaaaggatgcagatgtcttcctctagatcagagcaggtttgttaaccttcatacaaaatataaaggcccagaacagatgtagcaaggaaatttcaattttccccaaggagaagggtctgcca

SEQ ID NO: 4109 - DNA, 2744 bp, Homo sapiens
gagtggctgcgaggctaggcgagccgggaaagggggcgccgcccagccccgagccccgcgccccgtgccccgagcccggagccccctgcccgccgcggcaccatgcgcgccgagccggcgtgaccggctccgcccgcggccgccccgcagctagcccggcgctctcgccggccacacggagcggcgcccgggagctatgagccatgaagccgcccggcagcagctcgcggcagccgcccctggcgggctgcagccttgccggcgcttcctgcggcccccaacgcggccccgccggctcggtgcctgccagcgccccggcccgcacgccgccctgccgcctgcttctcgtccttctcctgctgcctccgctcgccgcctcgtcccggccccgcgcctggggggctgctgcgcccagcgctccgcattggaatgaaactgcagaaaaaaatttgggagtcctggcagatgaagacaatacattgcaacagaatagcagcagtaatatcagttacagcaatgcaatgcagaaagaaatcacactgccttcaagactcatatattacatcaaccaagactcggaaagcccttatcacgttcttgacacaaaggcaagacaccagcaaaaacataataaggctgtccatctggcccaggcaagcttccagattgaagccttcggctccaaattcattcttgacctcatactgaacaatggtttgttgtcttctgattatgtggagattcactacgaaaatgggaaaccacagtactctaagggtggagagcactgttactaccatggaagcatcagaggcgtcaaagactccaaggtggctctgtcaacctgcaatggacttcatggcatgtttgaagatgataccttcgtgtatatgatagagccactagagctggttcatgatgagaaaagcacaggtcgaccacatataatccagaaaaccttggcaggacagtattctaagcaaatgaagaatctcactatggaaagaggtgaccagtggccctttctctctgaattacagtggttgaaaagaaggaagagagcagtgaatccatcacgtggtatatttgaagaaatgaaatatttggaacttatgattgttaatgatcacaaaacgtataagaagcatcgctcttctcatgcacataccaacaactttgcaaagtccgtggtcaaccttgtggattctatttacaaggagcagctcaacaccagggttgtcctggtggctgtagagacctggactgagaaggatcagattgacatcaccaccaaccctgtgcagatgctccatgagttctcaaaataccggcagcgcattaagcagcatgctgatgctgtgcacctcatctcgcgggtgacatttcactataagagaagcagtctgagttactttggaggtgtctgttctcgcacaagaggagttggtgtgaatgagtatggtcttccaatggcagtggcacaagtattatcgcagagcctggctcaaaaccttggaatccaatgggaaccttctagcagaaagccaaaatgtgactgcacagaatcctggggtggctgcatcatggaggaaacaggggtgtcccattctcgaaaattttcaaagtgcagcattttggagtatagagactttttacagagaggaggtggagcctgccttttcaacaggccaacaaagctatttgagcccacggaatgtggaaatggatacgtggaagctggggaggagtgtgattgtggttttcatgtggaatgctatggattatgctgtaagaaatgttccctctccaacggggctcactgcagcgacgggccctgctgtaacaatacctcatgtctttttcagccacgagggtatgaatgccgggatgctgtgaacgagtgtgatattactgaatattgtactggagactctggtcagtgcccaccaaatcttcataagcaagacggatatgcatgcaatcaaaatcagggccgctgctacaatggcgagtgcaagaccagagacaaccagtgtcagtacatctggggaacaaaggctgcagggtctgacaagttctgctatgaaaagctgaatacagaaggcactgagaagggaaactgcgggaaggatggagaccggtggattcagtgcagcaaacatgatgtgttctgtggattcttactctgtaccaatcttactcgagctccacgtattggtcaacttcagggtgagatcattccaacttccttctaccatcaaggccgggtgattgactgcagtggtgcccatgtagttttagatgatgatacggatgtgggctatgtagaagatggaacgccatgtggcccgtctatgatgtgtttagatcggaagtgcctacaaattcaagccctaaatatgagcagctgtccactcgattccaagggtaaagtctgttcgggccatggggtgtgtagtaatgaagccacctgcatttgtgatttcacctgggcagggacagattgcagtatccgggatccagttaggaaccttcacccccccaaggatgaaggacccaagggtcctagtgccaccaatctcataataggctccatcgctggtgccatcctggtagcagctattgtccttgggggcacaggctggggatttaaaaatgtcaagaagagaaggttcgatcctactcagcaaggccccatctgaatcagctgcgctggatggacaccgccttgcactgttggattc

SEQ ID NO: 4110 - DNA, 1018 bp, Homo sapiens
gagaccgtcctgcgctctctggagacgcgctgtccgcgcccagggtggtgccatgtggggcgctcgccgctcgtccgtctcctcatcctggaacgccgcttcgctcctgcagctgctgctggctgcgctgctggcggcgggggcgagggccagcggcgagtactgccacggctggctggacgcgcagggcgtctggcgcatcggcttccagtgtcccgagcgcttcgacggcggcgacgccaccatctgctgcggcagctgcgcgttgcgctactgctgctccagcgccgaggcgcgcctggaccagggcggctgcgacaatgaccgccagcagggcgctggcgagcctggccgggcggacaaagacggccccgacggctcggcagtgcccatctacgtgccgttcctcattgttggctccgtgtttgtcgcctttatcatcttggggtccctggtggcagcctgttgctgcagatgtctccggcctaagcaggatccccagcagagccgagccccagggggtaaccgcttgatggagaccatccccatgatccccagtgccagcacctcccgggggtcgtcctcacgccagtccagcacagctgccagttccagctccagcgccaactcaggggcccgggcgcccccaacaaggtcacagaccaactgttgcttgccggaagggaccatgaacaacgtgtatgtcaacatgcccacgaatttctctgtgctgaactgtcagcaggccacccagattgtgccacatcaagggcagtatctgcatcccccatacgtggggtacacggtgcagcacgactctgtgcccatgacagctgtgccacctttcatggacggcctgcagcctggctacaggcagattcagtcccccttccctcacaccaacagtgaacagaagatgtacccagcggtgactgtataaccgagagtcactggtgggttcctttactgaagggagacgaaggcaggggtggattctcgaggtggaagtccgcacatg

SEQ ID NO: 4111 - DNA, 5963 bp, Homo sapiens
ggacggaaggacagaccgacgtcgccgagctggaatcatgtgagggccaaccggggaaggtggagcagatgagcacacacaggagccgtctcctcaccgccgcccctctcagcatggaacagaggcggccctggccccgggccctggaggtggacagccgctctgtggtcctgctctcagtggtctgggtgctgctggcccccccagcagccggcatgcctcagttcagcaccttccactctgagaatcgtgactggaccttcaaccacttgaccgtccaccaagggacgggggccgtctatgtgggggccatcaaccgggtctataagctgacaggcaacctgaccatccaggtggctcataagacagggccagaagaggacaacaagtcttgttacccgcccctcatcgtgcagccctgcagcgaagtgctcaccctcaccaacaatgtcaacaagctgctcatcattgactactctgagaaccgcctgctggcctgtgggagcctctaccagggggtctgcaagctgctgcggctggatgacctcttcatcctggtggagccatcccacaagaaggagcactacctgtccagtgtcaacaagacgggcaccatgtacggggtgattgtgcgctctgagggtgaggatggcaagctcttcatcggcacggctgtggatgggaagcaggattacttcccgaccctgtccagccggaagctgccccgagaccctgagtcctcagccatgctcgactatgagctacacagcgattttgtctcctctctcatcaagatcccttcagacaccctggccctggtctcccactttgacatcttctacatctacggctttgctagtgggggctttgtctactttctcactgtccagcccgagacccctgagggtgtggccatcaactccgctggagacctcttctacacctcacgcatcgtgcggctctgcaaggatgaccccaagttccactcatacgtgtccctgcccttcggctgcacccgggccggggtggaataccgcctcctgcaggctgcttacctggccaagcctggggactcactggcccaggccttcaatatcaccagccaggacgatgtactctttgccatcttctccaaagggcagaagcagtatcaccacccgcccgatgactctgccctgtgtgccttccctatccgggccatcaacttgcagatcaaggagcgcctgcagtcctgctaccagggcgagggcaacctggagctcaactggctgctggggaaggacgtccagtgcaccaaggcgcctgtccccatcgatgataacttctgtggactggacatcaaccagcccctgggaggctcaactccagtggagggcctgaccctgtacaccaccagcagggaccgcatgacctctgtggcctcctacgtttacaacggctacagcgtggtttttgtggggactaagagtggcaagctgaaaaagattcgggccgacggtcccccccatggtggggtccagtacgagatggtctctgtgctcaaggacggaagccccatcctccgggacatggccttctccattgatcagcgctacctgtacgtcatgtctgagagacaggtcaccagggtccccgtggagtcatgtgagcagtatacgacttgtggggagtgcctgagctctggggaccctcactgtggctggtgtgccctgcacaacatgtgctcccgcagggacaaatgccaacaggcctgggaacctaatcgatttgctgccagcatcagccagtgtgtgagccttgcagtgcatcccagcagcatctcagtatctgagcacagccggttgcttagcctggtagtgagtgatgctcctgatctatctgcgggtatcgcctgtgcctttgggaacctgacagaggtggaggggcaggtgtccgggagccaggtcatctgcatctcacctgggcccaaggatgtccctgtcatcccgctggatcaagactggtttgggctggagctacagctgaggtccaaggagacagggaagatatttgtcagcaccgagttcaagttttacaactgcagtgcccaccaactgtgcctgtcctgtgtcaacagcgccttccgctgccattggtgcaagtaccgcaacctctgcactcatgaccccaccacctgctccttccaggagggccggatcaatatttcagaggactgtccccagctggtgcccacagaggagatcttgattccagtcggggaggtaaagccaatcacccttaaggcgcgaaatctgccccagccgcagtccggccagcgaggctatgagtgtgtcctcaacatacaaggagccatccaccgggtccccgctctgcgcttcaacagctccagcgttcagtgtcagaacagctcgtaccagtatgatggcatggacatcagcaatctggccgtggatttcgctgtggtgtggaacggcaatttcatcattgacaaccctcaggacctgaaagtccatctctacaagtgtgcagcccagcgggagagctgcggcctctgcctcaaggccgaccggaagtttgagtgtggctggtgcagcggcgagcgcaggtgcaccctccaccagcactgtaccagcccttccagcccctggctcgactggtccagccacaatgtcaagtgctccaaccctcaaatcaccgagattttgacggtgtctggaccgccggaaggagggacgcgagtgaccatccatggcgtgaacctgggtctggacttctccgagatcgcccaccatgtgcaggtggctggggtgccctgcacgcccctcccaggggaatacatcatcgctgagcagattgtctgtgagatgggccatgccctcgtgggaaccacctccgggccagtacgcctgtgtattggcgagtgtaagccagagttcatgacgaagtcccatcagcagtacaccttcgtgaacccttctgtgctgtcactcaacccaatccgaggtcccgagtcaggaggcactatggtgaccattaccggccattaccttggggctgggagcagcgtggcagtctacctgggcaaccagacctgcgagttctacgggaggtcaatgagtgagatcgtgtgtgtctcacccccatcatccaatggccttggcccggtccctgtttctgtgagtgtcgaccgagcccatgtggatagcaacctgcagtttgagtacatagatgaccctcgggtccagcgcatcgagccagagtggagcattgccagtggccacacacccctgaccatcacaggcttcaacctggatgtcattcaggagccaaggatccgagtcaaattcaatggcaaagaatctgtcaatgtgtgtaaagttgtgaacacaaccaccctcacctgcctggcaccctctctgaccacggactaccgccctggcctggacactgtggaacgcccagatgagtttggatttgtctttaacaatgtccaatccttgctaatttacaacgacaccaagtttatctactaccccaacccgacctttgaactgcttagccctactggagtcttggatcaaaagccaggatcgcccatcattctgaagggcaaaaacctctgccctcctgcctctggaggggccaaactcaactacactgtgctcatcggagagaccccttgtgctgtcaccgtatctgagacccagcttctctgcgagcctcccaacctcaccgggcagcacaaggtcatggttcacgtgggcgggatggtgttctcgcctggctcggtgagtgtcatctcagacagcttgctgaccctgccagccatcgtcagcatcgcggccggcggcagcctcctcctcatcatcgtcatcatcgtcctcattgcctacaagcgcaagtctcgagaaaatgacctcactctcaagcggctgcaaatgcagatggacaatctggagtcccgtgtggccttggagtgcaaggaagcttttgctgagctccagacggatatcaatgagttgaccagtgacctggaccgctcaggaatcccttacctggactatcgtacctacgctatgcgagtcctgttcccgggcatcgaggaccaccccgtcctgcgggagctggaggtacaaggaaacgggcagcagcacgtggagaaggccctgaagctctttgcccagctcatcaacaacaaggtgttcctgctgaccttcatccgcaccctggagctgcagcgcagtttctccatgcgcgaccggggcaacgtggcttcgctcatcatgaccggcctgcagggccgcctggaatatgccactgatgtcctcaagcagctgctctctgacctcatcgataagaacctggagaacaagaaccaccccaagctgctactccggaggacagagtctgtggctgaaaagatgctgaccaattggttcgccttcctcctgcacaagttcctaaaggagtgcgcaggggagccactcttcatgctatactgtgccatcaagcagcagatggagaagggccccattgatgccatcacgggcgaggcccgctactccctgagcgaggacaagctcatccggcagcagatcgagtacaagaccctgatcctgaactgcgtcaaccctgacaacgagaacagtccagagatcccagtgaaggtgttaaactgtgacaccatcacacaggtcaaggagaagattcttgatgccgtgtataagaatgtgccctattcccagcggccgagggcagtggacatggacttggagtggcgccaaggccggatcgcccgggtcgtgctgcaagatgaggacatcaccaccaagattgagggtgactggaagcggctcaacacactgatgcattatcaggtgtcagacaggtcggtggtggctctggtccccaaacagacctcctcctacaacatccctgcctctgccagcatctcccggacgtccatcagcagatatgactcctccttcaggtatacgggcagccccgacagcctgcggtcccgggccccgatgatcaccccagacctggaaagtggggtcaaggtgtggcatctggtgaagaaccatgaccacggtgaccagaaggagggtgaccggggcagcaagatggtgtccgagatctacctgacccggctactggccaccaagggcaccctgcagaagtttgtggacgacttgtttgagaccttgttcagcactgtgcaccggggcagcgctctccccctggccatcaagtacatgtttgatttcctagatgagcaggcagacaggcacagcatccatgacacagatgtgcggcacacctggaaaagcaactgcctccctctgcgcttctgggtgaacgtgattaagaacccccagttcgtgtttgacatccacaagggcagcatcacggacgcctgcctctctgtggtggcccagaccttcatggactcttgttcaacgtcagagcaccggctgggcaaggactccccctccaacaagctgctctatgccaaggacatccccagctacaagagctgggtggagagatactacgcagacatcgccaagctcccagccatcagtgaccaggacatgaatgcctacctcgccgagcagtcccgcctgcacgccgtggagttcaacatgctgagtgccctcaatgagatctactcctatgtcagcaagtatagtgaggagctcatcggggccctagagcaggatgagcaggcacggcggcagcggctggcttataaggtggagcagctcattaatgccatgtccattgagagctgagaggaggagcctcgcattcctgggaagagggacctgtccaagctgtcacactgggagtctcagatggaaggacaagtgatggggatcaggccccagagcttgctgtcccctgagaccccatcctggggagaggggaggactcctctccctacgccagccaagttt

SEQ ID NO: 4112 - DNA, 2086 bp, Homo sapiens
ggaggaggagaggaggcagcgcccggccaggctgggagcacctacggccgcgcgggggcgggagccaggtggcctcggcgcgcccgcctcgcccgggcaccgagcaggaagtggctgcggcgcggcctcctcgcggtgcaacagggcggggaggcggccgcagcccgagccggagcccgagcgccgggagcgagacctcatggcagcggtggcgcccgcgggccccggggactccgcctcggccgccctggacgagctgtcactgaatttcacgtacggggcaccaggcgccggcaacggctccctctcgggcgactggtaccgcaggaaccagattcacctttttggagttttgctggctattttaggaaacttggtgatcagtatttctctaaatattcagaaatattctcaccttcagctggcacaacaagagcacccaaggccatacttcaagagtgtgctgtggtggggtggtgtcctgctgatggccgtgggagagacggggaactttgcagcctatggatttgctcccattactctgatcgctccgttaggctgtgtgtctgttacaggtagtgccattatttctgttacatttctgaaagacaatttgagagcctcagacttactcggtacgacactggcatttgcaggaacatatttactggtgaactttgctccaaatataactcaggcaatctcagcaagaacagtacagtattaccttgtcggatggcagttcctgatctatgtgattttagaaatattaattttctgcattctcctgtatttctataaaagaaaaggaatgaagcatatggtgattctgctaaccctggtggcaattctagcctcattgactgttatttcagtaaaggccgtctcaggcatgatcactttttctgtgatggataaaatgcaactaacttaccccattttctatatcatgtttatcatcatgatagcatcttgtgttttccaagtcaagttcctgaatcaagccacgaaactctacaatacgacaacagtggtgccagttaatcatattttctttacaatcagtgccatcattgcaggtatcatattttatcaggaattccttggtgctccttttctcactgtatttatatatctttttgggtgttttctgtcattccttggtgtatttttggtcacaagaaatcgagaaaaggaacatctgcaacagtcttatattgattttggaaatattcctgggaaacaaatgttggacaaaatacaaccagattcacatagcttatcctatggaactttgcctgatggaagtgactcaacaaagagccaaagtggagagaagaaagaggtctaaatgctgagaaggatggctgttggcctgttattcgataccacctttttaaaaaattgcacatgttcaatttgtgtcagcagctcttttataagctgacatgtgctagcattcatttcagtcctttcccccacctcagcgtctatggacaatcggggacttcctaagctctgacagtctaatatttccatggaatgtgatttggagtgttccccacaccctggacctctccctagtgattatctagccagctacaccttactcagagcccggctgctctagcaggaatgttgcacagaaacatacatttgcggtttggccacaggtcgcataggtggcttctcccacgggtagtgtcagttgcttcactttaaaaagtcacttcagccccacaacctcactcccaaaagaaaggtttgagagcgctcattttttttctaagtcaccttttataagcctccctataaaaatctcacctttcaagtcctaaattagaattgcaagtcatcttttctgaaaactaatgctatcaaagtcctcctttgaaaattaagggtctctttaaaattagaatttataaatggcattcagtgatagtgtacaccaaaattaaaagaccttgactggtgggctttttacgtgtaaggaagaggaagtttaagaagtaggactctgcttgtttcagtagcccatgtactaaaataggaacaatgcagagattagcacagcccctgcaca

SEQ ID NO: 4113 - DNA, 2742 bp, Homo sapiens
gagtggctgcgaggctaggcgagccgggaaagggggcgccgcccagccccgagccccgcgccccgtgccccgagcccggagccccctgcccgccgcggcaccatgcgcgccgagccggcgtgaccggctccgcccgcggccgccccgcagctagcccggcgctctcgccggccacacggagcggcgcccgggagctatgagccatgaagccgcccggcagcagctcgcggcagccgcccctggcgggctgcagccttgccggcgcttcctgcggcccccaacgcggccccgccggctcggtgcctgccagcgccccggcccgcacgccgccctgccgcctgcttctcgtccttctcctgctgcctccgctcgccgcctcgtcccggccccgcgcctggggggctgctgcgcccagcgctccgcattggaatgaaactgcagaaaaaaatttgggagtcctggcagatgaagacaatacattgcaacagaatagcagcagtaatatcagttacagcaatgcaatgcagaaagaaatcacactgccttcaagactcatatattacatcaaccaagactcggaaagcccttatcacgttcttgacacaaaggcaagacaccagcaaaaacataataaggctgtccatctggcccaggcaagcttccagattgaagccttcggctccaaattcattcttgacctcatactgaacaatggtttgttgtcttctgattatgtggagattcactacgaaaatgggaaaccacagtactctaagggtggagagcactgttactaccatggaagcatcagaggcgtcaaagactccaaggtggctctgtcaacctgcaatggacttcatggcatgtttgaagatgataccttcgtgtatatgatagagccactagagctggttcatgatgagaaaagcacaggtcgaccacatataatccagaaaaccttggcaggacagtattctaagcaaatgaagaatctcactatggaaagaggtgaccagtggccctttctctctgaattacagtggttgaaaagaaggaagagagcagtgaatccatcacgtggtatatttgaagaaatgaaatatttggaacttatgattgttaatgatcacaaaacgtataagaagcatcgctcttctcatgcacataccaacaactttgcaaagtccgtggtcaaccttgtggattctatttacaaggagcagctcaacaccagggttgtcctggtggctgtagagacctggactgagaaggatcagattgacatcaccaccaaccctgtgcagatgctccatgagttctcaaaataccggcagcgcattaagcagcatgctgatgctgtgcacctcatctcgcgggtgacatttcactataagagaagcagtctgagttactttggaggtgtctgttctcgcacaagaggagttggtgtgaatgagtatggtcttccaatggcagtggcacaagtattatcgcagagcctggctcaaaaccttggaatccaatgggaaccttctagcagaaagccaaaatgtgactgcacagaatcctggggtggctgcatcatggaggaaacaggggtgtcccattctcgaaaattttcaaagtgcagcattttggagtatagagactttttacagagaggaggtggagcctgccttttcaacaggccaacaaagctatttgagcccacggaatgtggaaatggatacgtggaagctggggaggagtgtgattgtggttttcatgtggaatgctatggattatgctgtaagaaatgttccctctccaacggggctcactgcagcgacgggccctgctgtaacaatacctcatgtctttttcagccacgagggtatgaatgccgggatgctgtgaacgagtgtgatattactgaatattgtactggagactctggtcagtgcccaccaaatcttcataagcaagacggatatgcatgcaatcaaaatcagggccgctgctacaatggcgagtgcaagaccagagacaaccagtgtcagtacatctggggaacaaaggctgcagggtctgacaagttctgctatgaaaagctgaatacagaaggcactgagaagggaaactgcgggaaggatggagaccggtggattcagtgcagcaaacatgatgtgttctgtggattcttactctgtaccaatcttactcgagctccacgtattggtcaacttcagggtgagatcattccaacttccttctaccatcaaggccgggtgattgactgcagtggtgcccatgtagttttagatgatgatacggatgtgggctatgtagaagatggaacgccatgtggcccgtctatgatgtgtttagatcggaagtgcctacaaattcaagccctaaatatgagcagctgtccactcgattccaagggtaaagtctgttcgggccatggggtgtgtagtaatgaagccacctgcatttgtgatttcacctgggcagggacagattgcagtatccgggatccagttaggaaccttcacccccccaaggatgaaggacccaagggtcctagtgccaccaatctcataataggctccatcgctggtgccatcctggtagcagctattgtccttgggggcacaggctggggatttaaaaatgtcaagaagagaaggttcgatcctactcagcaaggccccatctgaatcagctgcgctggatggacaccgccttgcactgttggat

SEQ ID NO: 4114 - DNA, 3761 bp, Homo sapiens
tacacgtttcgcgttcgcttatgtattatgtgtaatcatggcacagtatcctgaagccgtcggagtctgtgtgctggtgcaaggtctgggacaaatttaagaagagagagaacctaaattggtaataaatcaataagaaatatttacattcactcagtgaaaagtgtcatgtctgagctcagcatatatcggagccacacatggacacctctccttcctccactaagagcggaaaatgaacaaatcccaggaacaagtgtcattcaaggatgtatgtgtggacttcactcaggaagagtggtatctgctggaccctgctcagaagattctatacagagatgtgatcctggaaaattatagcaatcttgtctcagtagggtattgcattactaaaccagaagtgatctttaagatcgagcaaggagaagagccctggatattagaaaaaggattcccaagccagtgccacccagaaaggaaatggaaagttgatgacgtgttagagagcagccaggaaaatgaagatgaccatttttgggagcttctattccacaacaacaaaacagtaagtgtagaaaatggagatagaggaagcaaaactttcaatttgggcacagaccctgtttctttaagaaattatccctataaaatatgtgactcatgtgaaatgaatttgaaaaatatttcgggcttaattattagtaaaaagaactgttccagaaagaagcctgatgagtttaatgtatgtgagaaattgctccttgatattaggcatgagaaaatccctattggagagaagtcttataaatatgatcaaaaaaggaatgccattaattatcaccaggatctcagtcagccaagttttggccaatcttttgagtatagtaaaaatggacaaggcttccatgatgaggcagcattttttacaaataagagatctcagataggagagacagtctgtaaatataacgaatgtggaagaaccttcattgaaagtttaaagctgaatatatctcaaagacctcatttggaaatggagccgtatggatgcagtatttgcgggaagtccttctgcatgaatttaaggtttggacatcagagagctcttacaaaggacaatccttatgaatataatgaatatggggaaatcttctgtgacaattcagctttcattatccatcagggagcttacacaagaaagattctccgtgaatataaagtgagtgacaaaacctgggaaaagtcagctctcttaaaacatcaaatagtacacatggggggaaagtcttatgattacaatgaaaatgggagtaatttcagcaagaagtcacatcttacccagcttcggagagctcacacaggagaaaaaacctttgaatgtggtgaatgtgggaaaaccttctgggagaagtcaaacctcactcaacatcagagaacacacacaggagagaagccctatgaatgtactgaatgtgggaaagccttttgccagaaaccacacctgaccaaccatcagcgaacacatacaggagaaaaaccctatgaatgtaagcaatgtggaaaaacattctgtgtgaagtcaaacctcactgaacatcagagaacacacacaggggagaagccctatgaatgtaatgcatgtgggaaatccttctgccacagatcagccctcactgtgcatcagagaacacacacaggggagaaaccgtttatatgtaatgaatgtggaaaatccttctgtgtgaagtcaaacctcattgtacatcaaagaactcacactggggagaaaccatataagtgtaatgaatgtgggaaaaccttctgtgaaaaatcagctctcactaaacatcagaggactcacacaggggagaagccgtatgagtgtaatgcatgtgggaagacctttagtcagaggtcagtgctcaccaaacatcagagaattcacacaagggtgaaagctctttcaacatcctgaatgttagaagccttcatacacttgtgaaattggttatacagtttcaaaaaaggagatcagagaaagccaaagaatgtcagaaatttgtagaaaatgacttcttgtttgaatatgtaaaagctttcaagaaaaattaaaacttttcattagaaaatttgtactgaggggaattctattcatctaagtaatatggtgaaaatatttatctggaatttatgttgtttagtgttatattccagacgtgataccaaaattttgttgcaaatataatggacaatatttatttatacccatattcacagtggaatctgaagcttataaaagttgaatgacagcagcattaaacatatatgtgaagagtccccgatgtttgtagaccttatgtgagtatgcaaatatataaatttgagtatgcttgatttgtatattggaactcaacatgatcataaggagaagatacgtacccttaattgagtaactactatggtatttgttaatattttctacactaaataccattggtgtctttataggttgacataattatatatgtgtatgtacatatgtttgtgtgtatatgtaaatatatttctacacacatacttaaatatagtgatgtgctagtataacctcatactgacttaaaagttctgattgttaaattttaaggaattttgtgagccagttattaaaagcagtcattatttaaaatatgtaaacttacagttaaaaacaaaggtaataaatactcagcactcatcacttcctaattattttgctacatttcactattacctttgctgttttacttatttaatctgtatgatgaaaatactgtataatagtgtgcactgcacatctgtctcttcccagctccacattcagtgctgtcttggtagcttggacttagtgggagtgtttacaccatggaaattgacaaactataaatcagggttttaattttctcagagaacctgctgtcaaatatttacagcacatcactgtgtatatatgaaaacgtatttggcaatacaaaccacataccccttctatttcctgacataaataaatggctatggccatttacagctgaaccacgtcttcaagaaagaagccaaaaatatttccgtgaggtttttaactacctctgaatctgtcctactctaaatactaccggagtctctttgtaggttggccagtatatgtttttagtgaaatattatttcacaaagaactatatcacgtacctttcctctgactgtttcctggcatatatgcatgaatatggccattattgaactatcacttcagtaaagaagttaaacagtacttttctgaggtttttcagctacctctgggtcattctgtaatgtaaatgttgttaataagaatggtttttacataaattatgcaaaggttaacaagcagtaacactgcactcctcaaaaagtggcggtatgtaatgaaaggcccttttgatatccttgatttttcattgtgtatctgtttgggcacggtctatgtaacactagttctgcgtattagtattttagagtatctctgcctcccttgtcctgttgtttcttttgcccccttggaacacattggtcagcagttctaagagacactgcccacatgatggccattccctacttcatccttgctgagctaaattttatatttttgtgcatccttctcccagatgacttaggtggtaagtccagattagtcaaagctaatcatggaagttccattttaatgattctgttggggtgaacttgggagc

SEQ ID NO: 4115 - DNA, 1412 bp, Homo sapiens; identical to SEQ ID NO: 1890

SEQ ID NO: 4116 - DNA, 2802 bp, Homo sapiens; identical to SEQ ID NO: 1451

SEQ ID NO: 4117 - DNA, 97 bp, Homo sapiens; identical to SEQ ID NO: 788

SEQ ID NO: 4118 - DNA, 98 bp, Homo sapiens; identical to SEQ ID NO: 727

SEQ ID NO: 4119 - DNA, 15735 bp, Homo sapiens; identical to SEQ ID NO: 802

SEQ ID NO: 4120 - DNA, 2096 bp, Homo sapiens; identical to SEQ ID NO: 623

SEQ ID NO: 4121 - DNA, 85 bp, Homo sapiens; identical to SEQ ID NO: 790

SEQ ID NO: 4122 - DNA, 1052 bp, Homo sapiens
ttaaggcacaatcagaaagaaaagctggagaattctctgaccttttgctctacaggtgtatttacaggagacagcaatggaaacctggtcagttgagcaggtctgcagttggttggtggagaaaaatttaggagagctagttcatagatttcaagaggaagaagtaagtggggccgctcttcttgcacttaatgatcggatggttcagcaactggtaaagaaaattgggcaccaggctgttctgatggatttaattaaaaaatacaagcagaacactcaaggactgaagtccccagaaaaccccaaaaaggcagccctggtcatgcaaacagaagcagctcgagattacagggatgaagagtcctccagtccagccaggcatggggagcagatgccatctttctatccagctgaaaaccttgataatggactaattgaccaaagagtattgaaacagagaagaaatgtgaaacaaattctagcaagaagcaaagcattacagtggacgaagtcctatgttttaccagagtttccctatgatgtcaaatgcatgttagcagagcagaagtgcccggatcacagcatgaggataaggatcattgagtttctccaggccgacatgactaagtatctggaaggctcactgtaccccagcacccagcagtacaatgacgtggttaatgccctgctgcaggcccaccctttcctggatgaggatggctgtggcttcgctggagtatagtggcgcgatctcagctcactgcaacctccgcctcctgggttcaagcaattctctggggcagcagttctaagctctggttgcacattaggattcctagagattcagattgaattaatttgaggatgggattattctaatgtacaaccacggctgagaaccactgccgctgacgtttcaacacaaagtttgctgtttgaacctgcctgtctcctggatttcaaagaccactgtcttcattgcacaacaatgtgaatataatcaacactattgaactgtacctaagaatagttaataaaaaactgagtgttta

SEQ ID NO: 4123 - DNA, 2602 bp, Homo sapiens; identical to SEQ ID NO: 598

SEQ ID NO: 4124 - DNA, 1772 bp, Homo sapiens; identical to SEQ ID NO: 532

SEQ ID NO: 4125 - DNA, 4995 bp, Homo sapiens; identical to SEQ ID NO: 764

SEQ ID NO: 4126 - DNA, 1490 bp, Homo sapiens; identical to SEQ ID NO: 613

SEQ ID NO: 4127 - DNA, 94 bp, Homo sapiens; identical to SEQ ID NO: 745

SEQ ID NO: 4128 - DNA, 94 bp, Homo sapiens; identical to SEQ ID NO: 779

SEQ ID NO: 4129 - DNA, 94 bp, Homo sapiens; identical to SEQ ID NO: 756

SEQ ID NO: 4130 - DNA, 94 bp, Homo sapiens
tggatcgatgatgacttccatatatacattccttggaaagctgaacaaaatgagtgaaaactctatactgtcatcctcgtcgaactgaggtcca

SEQ ID NO: 4131 - DNA, 94 bp, Homo sapiens; identical to SEQ ID NO: 744

SEQ ID NO: 4132 - DNA, 5507 bp, Homo sapiens; identical to SEQ ID NO: 1948

SEQ ID NO: 4133 - DNA, 1566 bp, Homo sapiens
actcctgtagacacccgccgccctctcccggctcggcgcagccgccgcccgcgcgcgactcgccccgggacccggcacaggttgaagaaatatggagatcaacacaaaactgctcatcagtgttacctgtatcagctttttcacctttcagcttcttttctactttgtaagttactggttttcagcaaaagtttctccaggtttcaatagtctcagcttcaaaaagaagattgaatggaactcaagggtagtatccacatgccattctttggtggttggtatttttggcctgtacattttcttattcgatgaggctactaaagctgatccactttggggtggtccatcacttgcaaacgtgaatattgctattgcctcaggctacctcatttctgatttgtccattataattttgtattggaaagtgattggtgacaaattttttataatgcatcattgtgcgtccctgtatgcatactaccttgtactgaaaaatggagtgctggcatacattgggaattttcgcctgcttgcagagctttccagcccgtttgtgaatcagcggtggttctttgaagctctgaagtatcccaagttttctaaagctatcgttatcaatggaatactcatgacagtagtattcttcatcgtgcggattgcctcaatgcttcctcattatggcttcatgtattccgtgtatggaacagaaccctacataaggcttggagttttaatccagttatcctgggtcattagttgtgttgttttggatgtgatgaatgtcatgtggatgatcaaaatttcaaaaggttgcatcaaagtcatctctcacatcagacaagagaaagccaaaaatagtcttcagaatggaaaacttgattaaaagagtgctaccgataagcaaacttcattactacccagcatatctgctgataggatgaattcttggcatgttcttgtgtacctttcttaattataattgttattcaggatttcagtgtcattttttttaaaccttagaaaagagaaggccgggcacggtggctcatgcctgtaatcccagcactttgggaggccaaggtgggtcgatcactgaggtcaggagttcgagactagcttggccaacatggtgaaacctcatctctactaaaaatacaaaaaaaagtagctgggcgtggtggttggcgcctgtaatcccagctactcgggaggctgaggcaggagaatcgcttgaacccgagagacggaggttgcagtgagctgatattgtgccactgcactccagcctgggcgacagagcaagactctgtctcaaaaaaaaaaaaaagagagaaactaaaattaaaatttagttttcatcccaagatgtcttttctgcctttcttttgccttatttacaagcatggataaaaatcttaaaggtttaaataaaaatgatcaatataatggtgaatcttttgagaaatctcttaactgcattggtattttttctctgtgaaagatgactatgataatctggtacaaatggttttatgtcaccaattttgctgcaagaatgggaactgc

SEQ ID NO: 4134 - DNA, 1899 bp, Homo sapiens; identical to SEQ ID NO: 2461

SEQ ID NO: 4135 - DNA, 3011 bp, Homo sapiens; identical to SEQ ID NO: 771

SEQ ID NO: 4136 - DNA, 119 bp, Homo sapiens
actctggtttctcttcaaatcgtataaatctttcgccttttactaaagatttccgtggagagaaacgagtgtgagtctgaaaccaattttttgaggccttgcgttttttagcagggctt

SEQ ID NO: 4137 - DNA, 8051 bp, Homo sapiens; identical to SEQ ID NO: 2318

SEQ ID NO: 4138 - DNA, 2360 bp, Homo sapiens
ccgagatgtggaatctccttcacgaaaccgactcggctgtggccaccgcgcgccgcccgcgctggctgtgcgctggggcgctggtgctggcgggtggcttctttctcctcggcttcctcttcgattaaaagccaactgcaaggtctaatgactgcaggatctagctatccattgtttctggccgcctatgcgtgcactgggtgtctggcagagaggctggggtggtttataaaatcctccaatgaagctactagcattactccaaagcataatatgaaagcatttttggatgaattgaaagctgagaacatcaagaagttcttatataattttacacagataccacatttagcaggaacagaacaaaactttcagcttgcaaagcaaactcaatcccagtggaaagaatttggcctggattctgttgagctagcacattatgatgtcctgttgtcctacccaaataagactcatcccaactacatctcaataattaatgaagatggaaatgagattttcaacacatcattatttgaaccacctcctccaggatatgaaaatgtttcggatattgtaccacctttcagtgctttctctcctcaaggaatgccagagggcgatctagtgtatgttaactatgcacgaactgaagacttctttaaattggaacgggacatgaaaatcaattgctctgggaaaattgtaattgccagatatgggaaagttttcagaggaaataaggttaaaaatgcccagctggcaggggccaaaggagtcattctctactccgaccctgctgactactttgctcctggggtgaagtcctatccagatggttggaatcttcctggaggtggtgtccagcgtggaaatatcctaaatctgaatggtgcaggagaccctctcacaccaggttacccagcaaatgaatatgcttataggcgtggaattgcagaggctgttggtcttccaagtattcctgttcatccaattggatactatgatgcacagaagctcctagaaaaaatgggtggctcagcaccaccagatagcagctggagaggaagtctcaaagtgccctacaatgttggacctggctttactggaaacttttctacacaaaaagtcaagatgcacatccactctaccaatgaagtgacaagaatttacaatgtgataggtactctcagaggagcagtggaaccagacagatatgtcattctgggaggtcaccgggactcatgggtgtttggtggtattgaccctcagagtggagcagctgttgttcatgaaattgtgaggagctttggaacactgaaaaaggaagggtggagacctagaagaacaattttgtttgcaagctgggatgcagaagaatttggtcttcttggttctactgagtgggcagaggagaattcaagactccttcaagagcgtggcgtggcttatattaatgctgactcatctatagaaggaaactacactctgagagttgattgtgcaccgctgatgtacagcttggtacacaacctaacaaaagagctgaaaagccctgatgaaggctttgaaggcaaatctctttatgaaagttggactaaaaaaagtccttccccagagttcagtggcatgcccaggataagcaaattgggatctggaaatgattttgaggtgttcttccaacgacttggaattgcttcaggcagagcacggtatactaaaaattgggaaacaaacaaattcagcggctatccactgtatcacagtgtctatgaaacatatgagttggtggaaaagttttatgatccaatgtttaaatatcacctcactgtggcccaggttcgaggagggatggtgtttgaactagccaattccatagtgctcccttttgattgtcgagattatgctgtagttttaagaaagtatgctgacaaaatctacagtatttctatgaaacatccacaggaaatgaagacatacagtgtatcatttgattcacttttttctgcagtaaagaattttacagaaattgcttccaagttcagtgagagactccaggactttgacaaaagcaacccaatagtattaagaatgatgaatgatcaactcatgtttctggaaagagcatttattgatccattagggttaccagacaggcctttttataggcatgtcatctatgctccaagcagccacaacaagtatgcaggggagtcattcccaggaatttatgatgctctgtttgatattgaaagcaaagtggacccttccaaggcctggggagaagtgaagagacagatttatgttgcagccttcacagtgcaggcagctgcagagactttgagtgaagtagcctaagagga

SEQ ID NO: 4139 - DNA, 3408 bp, Homo sapiens; identical to SEQ ID NO: 766

SEQ ID NO: 4140 - DNA, 2225 bp, Homo sapiens
ccaccgcgcgccgcccgcgctggctgtgcgctggggcgctggtgctggcgggtggcttctttctcctcggcttcctcttcggttaaaagccaactgcaaggtctaatgactgcaggatctagctatccattgtttctggccgcctatgcgtgcactgggtgtctggcagagaggctggggtggtttataaaatcctccaatgaagctactaacattactccaaagcataatatgaaagcatttttggatgaattgaaagctgagaacatcaagaagttcttatataattttacacagataccacatttagcaggaacagaacaaaactttcagcttgcaaagcaaattcaatcccagtggaaagaatttggcctggattctgttgagctagcacattatgatgtcctgttgtcctacccaaataagactcatcccaactacatctcaataattaatgaagatggaaatgagattttcaacacatcattatttgaaccacctcctccaggatatgaaaatgtttcggatattgtaccacctttcagtgctttctctcctcaaggaatgccagagggcgatctagtgtatgttaactatgcacgaactgaagacttctttaaattggaacgggacatgaaaatcaattgctctgggaaaattgtaattgccagatatgggaaagttttcagaggaaataaggttaaaaatgcccagctggcaggggccaaaggagtcattctctactccgaccctgctgactactttgctcctggggtgaagtcctatccagatggttggaatcttcctggaggtggtgtccagcgtggaaatatcctaaatctgaatggtgcaggagaccctctcacaccaggttacccagcaaatgaatatgcttataggcgtggaattgcagaggctgttggtcttccaagtattcctgttcatccaattggatactatgatgcacagaagctcctagaaaaaatgggtggctcagcaccaccagatagcagctggagaggaagtctcaaagtgccctacaatgttggacctggctttactggaaacttttctacacaaaaagtcaagatgcacatccactctaccaatgaagtgacaagaatttacaatgtgataggtactctcagaggagcagtggaaccagacagatatgtcattctgggaggtcaccgggactcatgggtgtttggtggtattgaccctcagagtggagcagctgttgttcatgaaaatgtgaggagctttggaacactgaagaaggaagggtggagacctagaagaacaattttgtttgcaagctgggatgcagaagaatttggtcttcttggttctactgagtgggcagaggagaattcaagactccttcaagagcgtggcgtggcttatattaatgctgactcatctatagaaggaaactacactctgagagttgattgtacaccgctgatgtacagcttggtacacaacctaacaaaagagctgaaaagccctgatgaaggctttgaaggcaaatctctttatgaaagttggactaaaaaaagtccttccccagagttcagtggcatgcccaggataagcaaattgggatctggaaatgattttgaggtgttcttccaacgacttggaattgcttcaggcagagcacggtatactaaaaattgggaaacaaacaaattcagcggctatccactgtatcacagtgtctatgaaacatatgagttggtggaaaagttttatgatccaatgtttaaatatcacctcactgtggcccaggttcgaggagggatggtgtttgagctagccaattccatagtgctcccttttgattgtcgagattatgctgtagttttaagaaagtatgctgacaaaatctacagtatttctatgaaacatccacaggaaatgaagacatacagtgtatcatttgattcacttttttctgcagtaaagaattttacagaaattgcttccaagttcagtgagagactccaggactttgacaaaagcaagcatgtcatctatgctccaagcagccacaacaagtatgcaggggagtcattcccaggaatttatgatgctctgtttgatattgaaagcaaagtggacccttccaaggcctggggagaagtgaagagacagatttatgttgcagccttcacagtgcaggcagctgcagagactttgagtgaagtagcctaagagga

SEQ ID NO: 4141 - DNA, 2350 bp, Homo sapiens; identical to SEQ ID NO: 635

SEQ ID NO: 4142 - DNA, 1887 bp, Homo sapiens
ggctgggagtgttgataggtgcaacaaacgaccatggcacacatctacttatgtaacaaacctccacactctgcacctgtatcctggaactcaaaaaaaaaaaaaagttaaaaggagttcttcagagtaaaggaaaatgatataggccagaaacttggctctacataaagaaataaagagcactgaaggaaaaaaaaaatgaatttgaggtacaagtagccagccgtagttcctgtccatgattctctagaaggctattttttaaggctgttgggcccaaaaattgaggcagctgggacctctcctgtattcagaaatgcttttctacctgatgggttaatcggtgtacatggcacctggttcctacaaatgaaatcttcaagttgcaaagagatttatgtgattgatctttcctggaattaagtgtgattggggatgagtgctgttcactcttcccagtatcttctcctttcctctcccttactgcccctccccaaacaataataaaaataagagaaagagaaagcaatgacaatctggatttataatgtcaaagtaagttcagagtaaaatgccttcttaggttttcattttaatgcctttactatgtgtgaaattgcctctttctctcttattacatttgaaattgccagaattaccgatcagcctatcaaccagcccgttctttattcaaggtgctgacctagctgaggaggaagagtgaccagtatacaggatttcttctaacattagaagaaatatgtgtgtgtgtgtgtgtgtgtgtgtgtgtgtattcattccttagaataagactgatacaaagaaggcagtttacttttgtagactactagaatatactgctttatgcattaattccatctgggatatgtgactgtacccaggccattacttaactattgtctgaacttgatgactatggaaaataatctctatgttcatgtctatatttttaagtgtattttcattaagttagtacttgacaaaagatattttctgggattagcctgcttgacctttgtgagtcaccagatacaaaattgagtgtgtcagggaaactattctgaaattaattggactgtgtatatattttttataccctctatcttccctgtggagaacaaaagttcttatgattggagctaggttctcacataccgtagaacatacattcaagtataaagggaccctaaaaataatgtgccacttgcaatgttatcagtgaagaaataaaagagaggtaaagtgatgtacaagggtcagtcacctcacacttagggcaatctgcgcacatggtagcccagtgctgagaattgtgcctgtggttccagcccatggcatgcatttgacctttgatgtagctgcattgcatactcttctccagtgttcgaaaagcagagtaagtcaacaggacagaagaaaactttcagtccgtcctctcattcctgtcattcccttgcaggccaacttgcccctgctgcagcgtgagctcctccactgcgcaagactggccaaacagaaccctgcccagtacctcgcccagcatgaacagctgcttctggatgccagcaccacctcacctgttgactcctcagagctgcttctcgatgtgaacgaaaacgggaagaggcgaactccagacagaaccaaagaaaatggctttgacagagagcctttgcactcagaacatccaagcaagcgaccatgcactattagcccaggccagcggtacagtccaaataacggcttatcctaccagcccaatggcctgcctcaccctaccccacctccacctcagcattaccgtttggatgatatggccattgcccaccactacagggactcctatcaacactcccagccaaacca

SEQ ID NO: 4143 - DNA, 1136 bp, Homo sapiens; identical to SEQ ID NO: 1435

SEQ ID NO: 4144 - DNA, 1108 bp, Homo sapiens
ccgcgctcagcgccttcactgccatccccgctgtccttgccgcccccgccatgggcctagagctgtttcttgacctggtgtcccagcccagccgcgccgtctacatcttcgccaagaagaatggcatccccttagagctgcgcaccgtggatttggtcaaagggcagcacaagagcaaggagttcttgcagatcaacagcctggggaaactgccgacgctcaaggatggtgatttcatcttgactgaaagctcggccatcctgatttacctgagctgtaagtaccagacgccggaccactggtatccatctgacctgcaggctcgtgcccgtgttcatgagtacctgggctggcatgccgactgcatccgtggcacctttggtatacccctgtgggtccaggtgttggggcccctcattggggtccaggtgcccgaggagaaggtggaacgcaacaggactgccatggaccaggccctgcaatggctggaggacaagttcctgggggacaggcccttcctcgctggccagcaggtgacactggctgatctcatggccctggaggagctgatgcagccggtggctctcggctatgaactgtttgagggacggccacgactggcagcatggcgtggacgagtggaggctttcctgggtgctgagctatgccaggaggcccacagcatcatcttgagcatcctggaacaggcggccaagaaaaccctcccaacaccctcaccagaggcctatcaggctatgctgcttcgaatcgccaggatcccctgaagggtctgggatgggggccaggagattagcaacaaggattcattctgttacttacttgcccctttttatctttccctcttgccccagtcccttctctccagcttcatgtgaagctctgcacagacaagacactcagtgtccttggcagtgctgctactcctcaggtgcagcatacataaccagtaagagactaaatctgcaatatataaagagctcctacaaatcagtaacatgaagaacactcaaaaattggcaaatgtcatcagtgttttaaacagaataaagattccaaacactttgaatagagaaaaaaaaaaaaaaaa

SEQ ID NO: 4145 - DNA, 6860 bp, Homo sapiens; identical to SEQ ID NO: 213

SEQ ID NO: 4146 - DNA, 5048 bp, Homo sapiens
atggtctagaaagctttgaacattttatctggcgtcatgtgtcatctgacaggaggcatcttgagtgatgattttcacattagatctcataagcctcttggttgtcttcagctttcagtttcctctaattcttcattattatcttctcctctttcatatcctccaagtacctgcatttctgcaatatttcttcgacctgcatttgcttgttctctttgtctgcttcctgatcctcttgatgacattgagcttgaggaactgggatctctgggattatttgatgttggaaaagtaggtctacaataaggtagaatatcctcttggatgagatgagtctttgctggtggaaggtctcgttttgctgccttgtttccacgtcctttcccgtcattttgctgttcctgtgcttctctgggatcacctggatttgttcgcatgtcaacaacctgtcttccatccaacacttctctccccttgtaactgcttccttttctgtctgatgatctgtctgttcttgcatccatagaagggagttttggcaccactacaggtcgtacttccagctgtgtcttggattgggcagtaggtgactttatagcaggtggcggcacaggaggtggtggaagatcatctgtgtaggtttctctgcgcagatgtcctggttggtgtttcagtttcttggctggtctggttttctgcattacggcggcactcatgttgctgtctgtagacacgggacttgtgggcctagggcactgagacgcatgaaaatgtcgacggccagcagcatcctgcatttgccgtcgtgctactttcagaccagcatactctgccgctgctgcgactgcctgggcaaagtcagcatcagtgaaaaaggagccgtccgaagaactaacactggagcgtccgctggaaatgttgtcctcctctgaggctgagccccagccgttgatcatggaccccgtgacagagctctccaggtccccaacactggaggcaggtgtctgctcaagcccacgtaacaaaagccttctggtttgcatcttggctacctccatgtcggcttcgtcttcttcctcctcttctggcgcatccgtatccatatctgagaccaggggtcctgaaatgtagccataggtatgtggaggggagatcggccgtggtggtggaggaggactcacaggctgccgtctcctgtcgggctggtgctgcatgtggccagtctcctctggacaatcctgtaacatgggctggagttcttcctgtggggagggagtcagagtggcagtggactgatggctataggacacggcagctggagaagaagctgctccccgaacagggggagtggggcctcgttcatcttcctcctcttctaattcatcttgttgcaaatacatccttgctggtggcacgggacatggcatttcttggtcatagctttcatctacagaaatgttgtactcttcgctattgctgtgtggaggaggatgtgctgggggaggaggaagcaggtctgcccagttcatgccaccctgttttggtaccttgggtgttcttgcccctttcttgtgcccctgactcccagatgtactactgccccggtctgagctgttgtaggatcctcctgtgttctggtcgtatgattggttgtatgggatagttggaggaactgtgtcatttgctcgataatctttgttcagcttgttttgctccacgatgttgtactgaactggtgccacttcttgtttctgctgtcccagtggtttccagtgcttctcgccagagtccccgctgccattgctcatgttgttgctgaggtttgactggatgagctgagtggtggcgtaaggagtaggctgccctgatggattgacaaaacgcccatccttcagatttgggctattgaaggttttcatctcattgattttgttactaaggtccacatcaccataaacagttgactcagggagcatcagatttgtttgtttgttatccagttggttgttataatttgctatacaatcagctgggcgactgtaggtagtgaggttgctgtcgctgtttccattgcctgccgtgcagcagctgatggagcagtcattgtggttgttgccagtattaggccacgtgtctgccagccatggctgcgcggcaggttcactgatgttgagaagtccaggcctccctccactgctgacagcttcgcctcctctctggtaagttactgttggtgtgaaggtaaaagacgggacttttctgatacccgcgtaggtactagtaagtccgtttctcttcttgcggtgtcgataaagccagatgctgaagaccatgaggatgatccaacaggctgctccaatacctgctatgaaggccggctgcttcaccacatctgaaatctgctgagcgaggctgacttggtcctcaggtgacacagggtttccatgggcatccagctggatgaactgaggctcactctttaccccagacccagccccagtgctggctgccacttccacactgtatcggattccaggaacaagaaagggaatgaccacggaaaaggtggaaccatccactgttttgttgatgtggtatcgagtttcattgcccagacaccaaaccttatactcttggaccattccattttgagtgtcttctggaggtggctgccaactaactagaattgcagttccgtttccatcattcttggatacagttacaccttggggtggggcactgggtgcttcttccagggttttggcaaacttgatttcactatctgctccttgaaattcattaaaaaaagggcgagccttaatttcatagttgactccctttctgagatcaggggttaccacactgtttttggctggcgtcctcacttcaaaaactaaccagtctgactctccgtggttggctccagatggccgatagagaattttatatccttgtatatactgagactgttgatctactgtccagtgcacttcgatggaagaggaagaaaggacggtggggttgtggaggtgcagaacagcatttcccagctctctctggacctgcttgtggtccaccccctgacttgttggtaggacatcttgtgttttcactggatctgatatttggcttggatcactaattccatatgcattagctgccctcacaaggaaaaggtaaattgcattaggtttgagtcctttaatggcagatgtttctgttttcacattctctgctacggtctgccagctgctaccagatgcatggctgaaggtttctataatataagatgttggagttgctcctgaattcaaatttggttgccacgataatgtgactgtatttctgctgacatctgtcacttcaggttttgatggggcactagggattaaatttgggtcagtaggtcttggaggctgaactggaactccaaattcttgaacttcaatgtaagcactccatgttgcttcaccactgggggttgatgcaatgcaggtgtaccgaccagtatcacccagcttagcatatcggatctgcagtactccattctccaactgtttgattcgagagtcttgggttgaaacgaggactccatcctttctccacagaatggtgggcactggactgcctgtggccacacagctgaggacgaaagtgccatccacggctacagtctgattcacaggaccttgtcgaataactgggggaggccgatctgcaatcacatctgtaacttccaaatatgcctttgtgatgatgcttccagcaacatttaaagtctggcagatgtaataaccaacatcagatcgctggacattagtaattgtgaggtcgccagtctgggagactgaaaatcggctggatgactgtggtggttgatatgagaaaagtagattctgactcccttctctcctccagaaaatagctggttgaggatttccggttgcttcacactgaaaagttacagtccgtcccaaagcaacaacctggtcacggggtttcacaacaaaatgtggaggttcttgaacagtcagagtagcagatgcttcagctttgcccaccatattttctgcaacacaagtgtatgaacccatgtcaccagctgtcaccttcctaattttcaaggtatgatcatctcggatttcatatctggatttgggcagctctccatcatctttcctccatcgtactgtaggtacagggtcacctcgggcctcacatttaaattctgcactgtcatccacagttactgccaagttactgggtctcttcacaaatgatggtctctctaagacagtcagctcggctacttcactctcacgttccccaaccatattggtaccaacacaaacatatttgccagcgtcacttttacgggtgtaagtgatcatgagctttcctcctcgtatagttattctttcatctttatcatccagtggagagccatctttcttccatgaaatggtgggctcaggatggcctcgtggaggttggcattccattactgcaggctctcctactgcaaccatgacatccgaagggttttgtctgaagtcatcccgaagtatggctacttccagcgatgcattgtggctcacagcctctccaaggtaattccttgctacacagacatagactccttcatcaggtctacttttccgtccatgtactatacgtaagaaaaataaagatccactcggtagcaacattcggtgtgagcgagggtcatctttgtctgtctccactctctctccccctttgtaccattcaatagtgggtgtggggcggccttcagctttgcagttcaaagttgcaggttctccttttgagacaatcaggtctgaagggtgttcaacaatgcgaggtggaaaatcttcctgacgaagacgggagcctgaacagagacatattaatccaaacaggtaaaagtgagcgggctccgcaatcattgtcctcgggtggatcctgtatacagtctcatgccaagaggagggagtggaaatagggtccccaaatgtatgaagccacacacgtcgactgataacttc

SEQ ID NO: 4147 - DNA, 8223 bp, Homo sapiens; identical to SEQ ID NO: 43

SEQ ID NO: 4148 - DNA, 8679 bp, Homo sapiens
atgactccgggcggtcggagaaggtctgccgggagtacacctgccctctgcctgaagcgtccccaagtgtcccgggcccgcgtcgttgccggatgcacaatgctgacacccttcccgggggcttccagtgtattctgcctcctcttgtgttcccgttgccacccttagctccctgactcttccagccaccttcccctcctccctcttccctgaggtgcctcctcgggcgattccagagcgcccatcttcccagtccgggcaaaacccggagaggtggaatccctcgcccggagcgccccggcggccactgggcatgctccgttgtcaggcaagttcggggctgcaggcagcttgcgcgccgcgcggattccagctgcggtcgcgcgtactcctcctcccaagtagggagcgggcgcatgatggcggccgcggcggcagcggctgcggggagctccagcagcggcggcggcggcggcggcagcggcagcagcagcagcagcagcgacacgtccagcaccggcgaggaggagaggatgcggcgcctcttccagacgtgcgacggcgacggggacggatacatcagcagaaatgacttgctaatggtctgtcgccagctgaatatggaagagtctgtggctgagatcatgaaccagttgggagcagatgaaaatgggaagatttcctttcaggatttcacaagatgccgcatgcagcttgttcgagaaattaggaaggaggaagtagatctttctgcaaagtcagacaactcctgtacaaagaagctgagggatagaattgcttcctggcccacgagcagtgacaacagtttgggtgccttatcagcagccagggagagctgggaatacgactctggtgccagggacctccagagcccggatgtgcagagccagtcagccctccagaagctgctcgagtatggcggaagctctttgcatcagcaggctgctctccacaaactgctcacacagtccccgcacattggcaactctgtaggaggaagctatctagagctggccaacacactccattcagcagccctggcatcactaaagggagatatagtggaacttaataaacgtctccagcaaacagagagggaacgggaccttctggaaaagaaattggccaaggcacagtgcgagcagtcccacctcatgagagagcatgaggatgtccaggagcgaacgacacttcgctatgaggaacgcatcacagagctccacagcgtcattgcggagctcaacaagaagatagaccgtctgcaaggcaccaccatcagggaggaagatgagtactcagaactgcgatcagaactcagccagagccaacacgaggtcaacgaggactctcgaagcatggaccaagaccagacctctgtctctatccccgaaaaccagtctaccatggttactgctgacatggacaactgcagtgacctgaactcagaactgcagagggtgctgacagggctggagaatgttgtctgcggcaggaagaagagcagctgcagcctctccgtggccgaggtggacaggcacattgagcagctcaccacagccagcgagcactgtgacctggctattaagacagtcgaggagattgagggggtgcttggccgggacctgtatcccaacctggctgaagagaggtctcggtgggagaaggagctggctgggctgagggaagagaatgagagcctgactgccatgctgtgcagcaaagaggaagaactgaaccggactaaggccaccatgaatgccatccgggaagagcgggaccggctccggaggagggtcagagagcttcaaactcgactacagagcgtgcaggccacaggtccctccagccctggccgcctcacttccaccaaccgcccgattaaccccagcactggggagctgagcacaagcagcagcagcaatgacattcccatcgccaagattgctgagagggtgaagctatcaaagacaaggtccgaatcgtcatcatctgatcggccagtcctgggctcagaaatcagtagcataggggtatccagcagtgtggctgaacacctggcccactcacttcaggactgctccaatatccaagagattttccaaacactctactcacacggatctgccatctcagaaagcaagattagagagtttgaggtggaaacagaacggctgaatagccggattgagcacctcaaatcccaaaatgacctcctgaccataaccttggaggaatgtaaaagcaatgccgagaggatgagcatgctggtgggaaaatacgaatccaatgccacagcgctgaggctggccttgcagtacagcgagcagtgcatcgaagcctacgaactcctcctggcgctggcagagagtgagcagagcctcatcctggggcagttccgagcggcgggcgtggggtcctcccctggagaccagtcgggggatgaaaacatcactcagatgctcaagcgagctcatgactgccggaagacagctgagaacgctgccaaggccctgctcatgaagctggacggcagctgtgggggagcctttgccgtggccggctgcagcgtgcagccctgggagagcctttcctccaacagccacaccagcacaaccagctccacagccagtagttgcgacaccgagttcactaaagaagacgagcagaggctgaaggattatatccagcagctcaagaatgacagggctgcggtcaagctgaccatgctggagctggaaagcatccacatcgatcctctcagctatgacgtcaagcctcggggagacagccagaggctggatctggaaaacgcagtgcttatgcaggagctcatggccatgaaggaggagatggccgagttgaaggcccagctctacctactggagaaagagaagaaggccctggagctgaagctgagcacgcgggaggcccaggagcaggcctacctggtgcacattgagcacctgaagtccgaggtggaggagcagaaggagcagcggatgcgatccctcagctccaccagcagcggcagcaaagacaaacctggcaaggagtgtgctgatgctgcctccccagctctgtccctagccgaactcaggacaacgtgcagcgagaatgagctggctgcggagttcaccaacgccattcgtcgagaaaagaagttgaaggccagagttcaagagctggtgagtgccttggagagactcaccaagagcagtgaaatccgacatcagcaatctgcagagttcgtgaatgatctaaagcgggccaacagcaacctggtggctgcctatgagaaagcaaagaaaaagcatcaaaacaaactgaagaagttagagtcgcagatgatggccatggtggagagacatgagacccaagtgaggatgctcaagcaaagaatagctctgctagaggaggagaactccaggccacacaccaatgaaacttcgctttaatcagcactcacgcaccggagttctgcccatgggaagtaaactgcagcaggccactggggacagaagggcccatgtacttgttgggaggaggaggaaagggaaggctggcaggtaggtcggcacttggacaatggagtgccccaactcaacccttggggcgactggccatggtgacattgtggactgtatccagaggtgcccgctcttccctcctgggcccacaacagcgtgtaaacacatgttctgtgcctgctcagcagagcctcgtttctgctttcagcactcactctccccctcctcttctggtctggcggctgtgcatcagtgggatcccagacatttgtttctgtaagattttccattgtatcctctttttggtagatgctgggctcatcttctagaatctcgtttctcctctttcctcctgcttcatgggaaaacagacctgtgtgtgcctccagcatttaaaaggactgctgatttgtttactacagcaaggctttggtttccaagtcccgggtctcaactttaagatagaggcggccataagaggtgatctctgggagttataggtcatgggaagagcgtagacaggtgttacttacagtcccagatacactaaagttacaaacagaccaccaccaggactgtgcctgaacaattttgtattgagagaataaaaacttccttcaatcttcattttggaggcagggctgggaagggagcgctctcttgattctgggatttctccctctcagtggagccttattaatatccaagacttagagctgggaatctttttgatacctgtagtggaactaaaattctgtcaggggtttcttcaagagctgagaaacattattagcacttcccgccccagggcactacataattgctgttctgctgaatcaaatctcttccacatgggtgcatttgtagctctggacctgtctctacctaaggacaagacactgaggagatactgaacattttgcaaaacttatcacgcctacttaagagtgctgtgtaacccccagttcaagacttagctcctgttgtcatgacggggacagagtgagggaatggtagttaaggcttcttttttgcccccagatacatggtgatggttagcatatggtgcttaaaaggttaaatttcaagcaaaatgcttacagggctaggcagtaccaaagtaactgaattatttcaggaaggtcttcaatcttaaaacaaattcattattctttttcagttttacctcttctctctcagttctacactgatacacttgaaggaccatttactgtttttttctgtagcaccagagaatccatccaaagttccctatgaaaaatgtgttccattgccatagctgactacaaattaaagttgaggaggtttctgcatagagtctttatgtccataagctacgggtaggtctattttcagagcatgatacaaattccacagccttctgttcgctggaggatactccagccaccagttcggagggcagacagctgtatcctaaaagcaaccactgagaggccagcagtgaggctgcccatctccaaaacgaaacaacagatcaactggtatcagtctagaaggaccagctttggggtgctttgatcactatgaaaatgttcactggtttctgtcaatcatttggtcaaagttagttcctgtgattttttttttttttttttgagatggagttttgctcgtcaccaggctgaagtgcagtggcgtgatcttggctcactgcaacctctgcctcctgagtagctggaattacaggtgcccgccaccatacccagctagtttttttgtatttttagtagagacagggtttcaccatgttggccaggctggtctcgaactcctgaccactgatccacccacctcggcctcccaaagtgctgggattacaggcatgagccaatgtgcctggccattcctgtgattttttagaatttttcacttttcatataaagttgcattttatcatgaggaaaatgttttggctgaaaaacatatgccccaaaaaaaaaaaaatcagttttcactatttttccagcttgcctagggaaacgtcctcccctgagcaaagtgggatgtgcatggctcttttttgtgattaagcaggcatcaaatgggcagttttcattttcactgacacagaaacatgtggctgaagcaggaataaaatcctgcctactgacttctgtctccattcttgctccaggtaaaatcagagaacctccccttctctgagaattcccccaggcagaggcggctccagctcctgttaagggccccagttttactcatgctacctgaccttagttttagtactttcaaatgtgatttgggtaaaaactattttgcaggcaaaagtgttaattttttataaatatgtataataaaaaagctataaaagtttttccttttcttgtatttttcaaatactccccaagacacaatccttgaaggtgaactaggtggcacttgattatgctaattgtgggagctactgaactaaactatactgattaaattaaatgcttgcaggttcctgggtaattttcctttgtgaataacctggcgctacctgaatttttctctaacaaacatctccaatgagggtaaacaatgatcttgattctaatttatatgaggttaaaaaccttcagatttcgtattttgaattgttctccctagtttcctcagtggttacccccttttagtcagtaaccatctctgttcagaattcagtctttggcttttgaagaaatgggcacagagccaaaggacccatttcacagttcccttggaatatatttcccattgttggactgaggcaaacaaaaccaactgtgcaaatcacaagcaaaagagacttctgtccgtagttgcgagtgccatcagtgtgagcttaccagctacaaaaatctgtcatggactggggaacagtatgattccttattgaaactttcatcctcatcggctggcttgtcagcgttctgaagttaatatccatgctgcctgaaacaaatgttatgtttaactagcacttaacttttaaaattgcttaattctcctttcagatgcatgcactaagtcttctctgagcctgcagcaatattttagagggacctcttctaagtcagagccttgacattctactccaaaaggaagtccaaattagagcccataggctttttcttaaaagctgttaaggagtagtaaagaaagttaccactctaaggaaaacatgaaactatctgaaagtcttctggttcctaactggatacagattagattattttaaatgagaaaaaagtgcaccgtagttacccgatcaagattggactgcctgtgtccctggcatgaattaaagaacctccatagttgcttgttcccttctgaaggtgtttcctatggcccacgagaattataaagcaatcactttttaagtctatcagtcaaccttaatagctctcaagagtttcgattatcaagctttaaagtgataacatatcaagatgactattaaaaaataaacatctctgaaagtgtcctttcctccataaggctttaaacaatttgcaaattcttaattgggagtatgtcccaatcattctattaaactatttacagctctacctacttctagattcagcaaacagagctactagttagagtattttgagagccaaaatagtaagagacttctgtaatggttgagatttctgcactgaccttaattagggtaccgccatagggctaccaaagtttttagtgagggctggggaggtggagcataagtaacattttttttctgcagaaggtgatggctttgtagaacactataaaatttttcaggaaaacatacagcaaattttcttatccagtgggaacagcctatttgacaaggaatgatatacaagtttgattcacctttgagcactcttatagagtttacagaagaggcgtaactggttacaaaacaaaagttacgccttcactatccagttcttaaagtttatccacatcctacaaatcttatgttcatgtaggtcaggttaaagtaagctccaaacttgtggccttcagaagcatctcctgtttaacacacctgaaattactctaacttaatacatttgtattctctaagaaataatgctgactgctgtcaccacagcatcactgatctctcagtggctgttaaaatataaacaagtggaaaaaaagtatacaagttgatagcagctgttcatgtattcttgttttgctaatacctgtgtagagaaagacagtttcacatgcagatcaccatacatttttgcttaaaggttacactgggtaaactgtttgtttatcacattacatctgggtgagattttgcatgtgaccaagaggaagaaatcattcagtcccggaaatagcaactgctatgtaaaaccacatccttgactagtacttcatctttccacagtcatccatctgctaatcaggtgaaatatcagctcagcagaacaaagcaagttatacacaaatttcccccacattcacactgatgccgtacttagtaattctggttctaccattcccttttgcactttttgcaagtcaaattcatgtggaaaaatgttctgtttgtagaactcatagtattcacttatagtgctcatgtcaggaatggcaagtgagtaagagcccctgataatctgcttttgttagaacgtaatgcaaagataataaaacatgtccacttcttttctagttctaatcagtttttagacatcaagatttatttactttgcatgagatttgtttcctattatttgaatatgtgctatacacttgaattagaaaaacctgcttgaatgtattgtcagttattaaagcacatgtgactaagtttgcatttgtcagtattgttctactgtttgtactgaaagtctcattttaaaattgctacttaacactgtactataccttgtaattttttagattctccacttgtattctttaaatgtttccagatgcctttagttttagctgctgtaaaatagctactttgcgttatttgatatagaattgttttttaaaaactccatttatttatacagagacatttataatattttacaaacattcttatattctgaataaatatttctaattccacagtgta

SEQ ID NO: 4149 - DNA, 3322 bp, Homo sapiens
aaagcacctgtgagcttgcggaagtcagttcagactccagcccgctccagcccggcccgacccgaccgcacccggcgcctgccctcgctcggcgtccccggccagccatgggcccttggagccgcagcctctcggcgctgctgctgctgctgcaggtctcctcttggctctgccaggagccggagccctgccaccctggctttgacgccgagagctacacgttcacggtgccccggcgccacctggagagaggccgcgtcctgggcagagtgaattttgaagattgcaccggtcgacaaaggacagcctatttttccctcgacacccgattcaaagtgggcacagatggtgtgattacagtcaaaaggcctctacggtttcataacccacagatccatttcttggtctacgcctgggactccacctacagaaagttttccaccaaagtcacgctgaatacagtggggcaccaccaccgccccccgccccatcaggcctccgtttctggaatccaagcagaattgctcacatttcccaactcctctcctggcctcagaagacagaagagagactgggttattcctcccatcagctgcccagaaaatgaaaaaggcccatttcctaaaaacctggttcagatcaaatccaacaaagacaaagaaggcaaggttttctacagcatcactggccaaggagctgacacaccccctgttggtgtctttattattgaaagagaaacaggatggctgaaggtgacagagcctctggatagagaacgcattgccacatacactctcttctctcacgctgtgtcatccaacgggaatgcagttgaggatccaatggagattttgatcacggtaaccgatcagaatgacaacaagcccgaattcacccaggaggtctttaaggggtctgtcatggaaggtgctcttccaggaacctctgtgatggaggtcacagccacagacgcggacgatgatgtgaacacctacaatgccgccatcgcttacaccatcctcagccaagatcctgagctccctgacaaaaatatgttcaccattaacaggaacacaggagtcatcagtgtggtcaccactgggctggaccgagagagtttccctgcgtataccctggtggttcaagctgctgaccttcaaggtgaggggttaagcacaacagcaacagctgtgatcacagtcactgacaccaacgataatcctccgatcttcaatcccaccacgtacaagggtcaggtgcctgagaacgaggctaacgtcgtaatcaccacactgaaagtgactgatgctgatgcccccaataccccagcgtgggaggctgtatacaccatattgaatgatgatggtggacaatttgtcgtcaccacaaatccagtgaacaacgatggcattttgaaaacagcaaagggcttggattttgaggccaagcagcagtacattctacacgtagcagtgacgaatgtggtaccttttgaggtctctctcaccacctccacagccaccgtcaccgtggatgtgctggatgtgaatgaagcccccatctttgtgcctcctgaaaagagagtggaagtgtccgaggactttggcgtgggccaggaaatcacatcctacactgcccaggagccagacacatttatggaacagaaaataacatatcggatttggagagacactgccaactggctggagattaatccggacactggtgccatttccactcgggctgagctggacagggaggattttgagcacgtgaagaacagcacgtacacagccctaatcatagctacagacaatggttctccagttgctactggaacagggacacttctgctgatcctgtctgatgtgaatgacaacgcccccataccagaacctcgaactatattcttctgtgagaggaatccaaagcctcaggtcataaacatcattgatgcagaccttcctcccatcttggcctcccagagtattgggattacagacatgagccactgcacctgcccagctccccaactccctgccattttttaagagacagtttcgctccatcgcccaggcctgggatgcagtgatgtgatcatagctcactgtaacctcaaactctggggctcaagcagttctcccaccagcctcctttttattttttttgtacagatggggtcttgctatgttgcccaagctggtcttaaactcctggcctcaagcaatccttctgccttggccccccaaagtgctgggattgtgggcatgagctgctgtgcccagcctccatgttttaatatcaactctcactcctgaattcagttgctttgcccaagataggagttctctgatgcagaaattattgggctcttttagggtaagaagtttgtgtctttgtctggccacatcttgactaggtattgtctactctgaagacctttaatggcttccctctttcatctcctgagtatgtaacttgcaatgggcagctatccagtgacttgttctgagtaagtgtgttcattaatgtttatttagctctgaagcaagagtgatatactccaggacttagaatagtgcctaaagtgctgcagccaaagacagagcggaactatgaaaagtgggcttggagatggcaggagagcttgtcattgagcctggcaatttagcaaactgatgctgaggatgattgaggtgggtctacctcatctctgaaaattctggaaggaatggaggagtctcaacatgtgtttctgacacaagatccgtggtttgtactcaaagcccagaatccccaagtgcctgcttttgatgatgtctacagaaaatgctggctgagctgaacacatttgcccaattccaggtgtgcacagaaaaccgagaatattcaaaattccaaatttttttcttaggagcaagaagaaaatgtggccctaaagggggttagttgaggggtagggggtagtgaggatcttgatttggatctctttttatttaaatgtgaatttcaacttttgacaatcaaagaaaagacttttgttgaaatagctttactgtttctcaagtgttttggagaaaaaaatcaaccctgcaatcactttttggaattgtcttgatttttcggcagttcaagctatatcgaatatagttctgtgtagagaatgtcactgtagttttgagtgtatacatgtgtgggtgctgataattgtgtattttctttgggggtggaaaaggaaaacaattcaagctgagaaaagtattctcaaagatgcatttttataaattttattaaacaattttgttaaaaaaaaaaaaaaaaa

SEQ ID NO: 4150 - DNA, 2678 bp, Homo sapiens; identical to SEQ ID NO: 636

SEQ ID NO: 4151 - DNA, 2802 bp, Homo sapiens; identical to SEQ ID NO: 1723

SEQ ID NO: 4152 - DNA, 5178 bp, Homo sapiens
tctgggggctcggctttgccgcgctcgctgcacttgggcgagagctggaacgtggaccagagctcggatcccatcgcagctaccgcgatgagaggcgctcgcggcgcctgggattttctctgcgttctgctcctactgcttcgcgtccagacaggctcttctcaaccatctgtgagtccaggggaaccgtctccaccatccatccatccaggaaaatcagacttaatagtccgcgtgggcgacgagattaggctgttatgcactgatccgggctttgtcaaatggacttttgagatcctggatgaaacgaatgagaataagcagaatgaatggatcacggaaaaggcagaagccaccaacaccggcaaatacacgtgcaccaacaaacacggcttaagcaattccatttatgtgtttgttagagatcctgccaagcttttccttgttgaccgctccttgtatgggaaagaagacaacgacacgctggtccgctgtcctctcacagacccagaagtgaccaattattccctcaaggggtgccaggggaagcctcttcccaaggacttgaggtttattcctgaccccaaggcgggcatcatgatcaaaagtgtgaaacgcgcctaccatcggctctgtctgcattgttctgtggaccaggagggcaagtcagtgctgtcggaaaaattcatcctgaaagtgaggccagccttcaaagctgtgcctgttgtgtctgtgtccaaagcaagctatcttcttagggaaggggaagaattcacagtgacgtgcacaataaaagatgtgtctagttctgtgtactcaacgtggaaaagagaaaacagtcagactaaactacaggagaaatataatagctggcatcacggtgacttcaattatgaacgtcaggcaacgttgactatcagttcagcgagagttaatgattctggagtgttcatgtgttatgccaataatacttttggatcagcaaatgtcacaacaaccttggaagtagtagataaaggattcattaatatcttccccatgataaacactacagtatttgtaaacgatggagaaaatgtagatttgattgttgaatatgaagcattccccaaacctgaacaccagcagtggatctatatgaacagaaccttcactgataaatgggaagattatcccaagtctgagaatgaaagtaatatcagatacgtaagtgaacttcatctaacgagattaaaaggcaccgaaggaggcacttacacattcctagtgtccaattctgacgtcaatgctgccatagcatttaatgtttatgtgaatacaaaaccagaaatcctgacttacgacaggctcgtgaatggcatgctccaatgtgtggcagcaggattcccagagcccacaatagattggtatttttgtccaggaactgagcagagatgctctgcttctgtactgccagtggatgtgcagacactaaactcatctgggccaccgtttggaaagctagtggttcagagttctatagattctagtgcattcaagcacaatggcacggttgaatgtaaggcttacaacgatgtgggcaagacttctgcctattttaactttgcatttaaagagcaaatccatccccacaccctgttcactcctttgctgattggtttcgtaatcgtagctggcatgatgtgcattattgtgatgattctgacctacaaatatttacagaaacccatgtatgaagtacagtggaaggttgttgaggagataaatggaaacaattatgtttacatagacccaacacaacttccttatgatcacaaatgggagtttcccagaaacaggctgagttttgggaaaaccctgggtgctggagctttcgggaaggttgttgaggcaactgcttatggcttaattaagtcagatgcggccatgactgtcgctgtaaagatgctcaagccgagtgcccatttgacagaacgggaagccctcatgtctgaactcaaagtcctgagttaccttggtaatcacatgaatattgtgaatctacttggagcctgcaccattggagggcccaccctggtcattacagaatattgttgctatggtgatcttttgaattttttgagaagaaaacgtgattcatttatttgttcaaagcaggaagatcatgcagaagctgcactttataagaatcttctgcattcaaaggagtcttcctgcagcgatagtactaatgagtacatggacatgaaacctggagtttcttatgttgtcccaaccaaggccgacaaaaggagatctgtgagaataggctcatacatagaaagagatgtgactcccgccatcatggaggatgacgagttggccctagacttagaagacttgctgagcttttcttaccaggtggcaaagggcatggctttcctcgcctccaagaattgtattcacagagacttggcagccagaaatatcctccttactcatggtcggatcacaaagatttgtgattttggtctagccagagacatcaagaatgattctaattatgtggttaaaggaaacgctcgactacctgtgaagtggatggcacctgaaagcattttcaactgtgtatacacgtttgaaagtgacgtctggtcctatgggatttttctttgggagctgttctctttaggaagcagcccctatcctggaatgccggtcgattctaagttctacaagatgatcaaggaaggcttccggatgctcagccctgaacacgcacctgctgaaatgtatgacataatgaagacttgctgggatgcagatcccctaaaaagaccaacattcaagcaaattgttcagctaattgagaagcagatttcagagagcaccaatcatatttactccaacttagcaaactgcagccccaaccgacagaagcccgtggtagaccattctgtgcggatcaattctgtcggcagcaccgcttcctcctcccagcctctgcttgtgcacgacgatgtctgagcagaatcagtgtttgggtcacccctccaggaatgatctcttcttttggcttccatgatggttattttcttttctttcaacttgcatccaactccaggatagtgggcaccccactgcaatcctgtctttctgagcacactttagtggccgatgatttttgtcatcagccaccatcctattgcaaaggttccaactgtatatattcccaatagcaacgtagcttctaccatgaacagaaaacattctgatttggaaaaagagagggaggtatggactgggggccagagtcctttccaaggcttctccaattctgcccaaaaatatggttgatagtttacctgaataaatggtagtaatcacagttggccttcagaaccatccatagtagtatgatgatacaagattagaagctgaaaacctaagtcctttatgtggaaaacagaacatcattagaacaaaggacagagtatgaacacctgggcttaagaaatctagtatttcatgctgggaatgagacataggccatgaaaaaaatgatccccaagtgtgaacaaaagatgctcttctgtggaccactgcatgagcttttatactaccgacctggtttttaaatagagtttgctattagagcattgaattggagagaaggcctccctagccagcacttgtatatacgcatctataaattgtccgtgttcatacatttgaggggaaaacaccataaggtttcgtttctgtatacaaccctggcattatgtccactgtgtatagaagtagattaagagccatataagtttgaaggaaacagttaataccattttttaaggaaacaatataaccacaaagcacagtttgaacaaaatctcctcttttagctgatgaacttattctgtagattctgtggaacaagcctatcagcttcagaatggcattgtactcaatggatttgatgctgtttgacaaagttactgattcactgcatggctcccacaggagtgggaaaacactgccatcttagtttggattcttatgtagcaggaaataaagtataggtttagcctccttcgcaggcatgtcctggacaccgggccagtatctatatatgtgtatgtacgtttgtatgtgtgtagacaaatatttggaggggtatttttgccctgagtccaagagggtcctttagtacctgaaaagtaacttggctttcattattagtactgctcttgtttcttttcacatagctgtctagagtagcttaccagaagcttccatagtggtgcagaggaagtggaaggcatcagtccctatgtatttgcagttcacctgcacttaaggcactctgttatttagactcatcttactgtacctgttccttagaccttccataatgctactgtctcactgaaacatttaaattttaccctttagactgtagcctggatattattcttgtagtttacctctttaaaaacaaaacaaaacaaaacaaaaaactccccttcctcactgcccaatataaaaggcaaatgtgtacatggcagagtttgtgtgttgtcttgaaagattcaggtatgttgcctttatggtttcccccttctacatttcttagactacatttagagaactgtggccgttatctggaagtaaccatttgcactggagttctatgctctcgcacctttccaaagttaacagattttggggttgtgttgtcacccaagagattgttgtttgccatactttgtctgaaaaattcctttgtgtttctattgacttcaatgatagtaagaaaagtggttgttagttatagatgtctaggtacttcaggggcacttcattgagagttttgtcttggatattcttgaaagtttatatttttataattttttcttacatcagatgtttctttgcagtggcttaatgtttgaaattattttgtggctttttttgtaaatattgaaatgtagcaataatgtcttttgaatattcccaagcccatgagtccttgaaaatattttttatatatacagtaactttatgtgtaaatacataagcggcgtaagtttaaaggatgttggtgttccacgtgttttattcctgtatgttgtccaattgttgacagttctgaagaattctaataaaatgtacatatataaatcaaaaaaaaaaaaaaaa

SEQ ID NO: 4153 - DNA, 5190 bp, Homo sapiens; identical to SEQ ID NO: 612

SEQ ID NO: 4154 - DNA, 2193 bp, Homo sapiens
ataaatatcagagtgtgctgctgtggctttgtggagctgccagagtaaagcaaagagaaaggaagcaggcccgttggaagtggttgtttaagttcttatcaagatatcatatataggacaaccccagcaatgtggagaagcctggggcttgccctggctctctgtctcctcccatcgggaggaacagagagccaggaccaaagctccttatgtaagcaacccccagcctggagcataagagatcaagatccaatgctaaactccaatggttcagtgactgtggttgctcttcttcaagccagctgatacctgtgcatactgcaggcatctaaattagaagacctgcgagtaaaactgaagaaagaaggatattctaatatttcttatattgttgttaatcatcaaggaatctcttctcgattaaaatacacacatcttaagaataaggtttcagagcatattcctgtttatcaacaagaagaaaaccaaacagatgtctggactcttttaaatggaagcaaagatgacttcctcatatatgatagatgtggccgtcttgtatatcatcttggtttgcctttttccttcctaactttcccatatgtagaagaagccattaagattgcttactgtgaaaagaaatgtggaaactgctctctcacgactctcaaagatgaagacttttgtaaacgtgtatctttggctactgtggataaaacagttgaaactccatcgcctcattaccatcatgagcatcatcacaatcatggacatcagcaccttggcagcagtgagctttcagagaatcagcaaccaggagcaccaaatgctcctactcatcctgctcctccaggccttcatcaccaccataagcacaagggtcagcataggcagggtcacccagagaaccgagatatgccagcaagtgaagatttacaagatttacaaaagaagctctgtcgaaagagatgtataaatcaattactctgtaaattgcccacagattcagagttggctcctaggagctgatgctgccattgtcgacatctgatatttgaaaaaacagggtctgcaatcacctgacagtgtaaagaaaacctcccatctttatgtagctgacagggacttcgggcagaggagaacataactgaatcttgtcagtgacgtttgcctccagctgcctgacaaataagtcagcagcttatacccacagaagccagtgccagttgacgctgaaagaatcaggcaaaaaagtgagaatgaccttcaaactaaatatttaaaataggacatactccccaatttagtctagacacaatttcatttccagcatttttataaactaccaaattagtgaaccaaaaatagaaattagatttgtgcaaacatggagaaatctactgaattggcttccagattttaaattttatgtcatagaaatattgactcaaaccatattttttatgatggagcaactgaaaggtgattgcagcttttggttaatatgtctttttttttctttttccagtgttctatttgctttaatgagaatagaaacgtaaactatgacctaggggtttctgttggataattagcagtttagaatggaggaagaacaacaaagacatgctttccatttttttctttacttatctctcaaaacaatattactttgtcttttcaatcttctacttttaactaataaaataagtggattttgtattttaagatccagaaatacttaacacgtgaatattttgctaaaaaagcatatataactattttaaatatccatttatcttttgtatatctaagactcatcctgatttttactatcacacatgaataaagcctttgtatctttctttctctaatgttgtatcatactcttctaaaacttgagtggctgtcttaaaagatataaggggaaagataatattgtctgtctctatattgcttagtaagtatttccatagtcaatgatggtttaataggtaaaccaaaccctataaacctgacctcctttatggttaatactattaagcaagaatgcagtacagaattggatacagtacggatttgtccaaataaattcaataaaaaccttaaagctgaaaaaaaaaaaaaaaaaaaaaaaaaaaaaaaaaaaaaaaaaaaaaaaaaaaaaaaaaaaaaaaaaaaaaaaaaaaaaaa

SEQ ID NO: 4155 - DNA, 2252 bp, Homo sapiens; identical to SEQ ID NO: 615

SEQ ID NO: 4156 - DNA, 5606 bp, Homo sapiens; identical to SEQ ID NO: 624

SEQ ID NO: 4157 - DNA, 5488 bp, Homo sapiens
gggcctctgggggcggccccggggcgggccacgctggtgtgagggctgcaggcgcagctccggagcgcctagagcgcggcgcggggcgggagcttggtggagcaggagcggctgggcatcctcctgagactccggggtcagacgcccactccagatttctttaaagactcgtgcagcacatcattatcgctggatgcccggacatgtaatacacctgacagcatgtgaagtgctcagaatggggcaggatgtcacctggaatcagcactaagtgattcagactttccttacttttaaatgtgctgctcttcatttcaagatgccgttgcagctctgataaatgcaaactgacaaccttcaaggccacgacggagggaaaatcattggtgcttggagcatagaagactgcccttcacaaaggaaatccctgattattgtttgaaatgctgaggacgttgctgcgaaggagacttttttcttatcccaccaaatactactttatggttcttgttttatccctaatcaccttctccgttttaaggattcatcaaaagcctgaatttgtaagtgtcagacacttggagcttgctggggagaatcctagtagtgatattaattgcaccaaagttttacagggtgatgtaaatgaaatccaaaaggtaaagcttgagatcctaacagtgaaatttaaaaagcgccctcggtggacacctgacgactatataaacatgaccagtgactgttcttctttcatcaagagacgcaaatatattgtagaaccccttagtaaagaagaggcggagtttccaatagcatattctatagtggttcatcacaagattgaaatgcttgacaggctgctgagggccatctatatgcctcagaatttctattgcattcatgtggacacaaaatccgaggattcctatttagctgcagtgatgggcatcgcttcctgttttagtaatgtctttgtggccagccgattggagagtgtggtttatgcatcgtggagccgggttcaggctgacctcaactgcatgaaggatctctatgcaatgagtgcaaactggaagtacttgataaatctttgtggtatggattttcccattaaaaccaacctagaaattgtcaggaagctcaagttgttaatgggagaaaacaacctggaaacggagaggatgccatcccataaagaagaaaggtggaagaagcggtatgaggtcgttaatggaaagctgacaaacacagggactgtcaaaatgcttcctccactcgaaacacctctcttttctggcagtgcctacttcgtggtcagtagggagtatgtggggtatgtactacagaatgaaaaaatccaaaagttgatggagtgggcacaagacacatacagccctgatgagtatctctgggccaccatccaaaggattcctgaagtcccgggctcactccctgccagccataagtatgatctgtctgacatgcaagcagttgccaggtttgtcaagtggcagtactttgagggtgatgtttccaagggtgctccctacccgccctgcgatggagtccatgtgcgctcagtgtgcattttcggagctggtgacttgaactggatgctgcgcaaacaccacttgtttgccaataagtttgacgtggatgttgacctctttgccatccagtgtttggatgagcatttgagacacaaagctttggagacattaaaacactgaccattacgggcaattttatgaacaagaagaaggatacacaaaacgtacccttatctgtttccccttccttgtcagcatcgggaagatggtatgaagtcctctttggggcagggactctagtagatcttcttgtcagagaagctgcatggtttctgcagagcacagttagctagaaaggtgatagcattaaatgttcatctagagttaatagtgggaggagtaaaggtagccttgaggccagagcaggtagcaaggcattgtggaaagaggggaccagggtggctggggaagaggccgatgcataaagtcagcctgttcaaagtgctcagggacttagcaaaatgagaagatgtgacctgtgccaaaactattttgagaattttaaatgtgaccatttttctggtatgaataaacttacagcaacaaataatcaaagatacaattaatctgatattatatttgttgaaatagaaatttgattgtactataaatgatttttgtaaataatttatattctgctctaatactgtactgtgtagtgtgtctccgtatgtcatctcagggagcttaaaatgggcttgatttaacattgtttttgtgttatttttgcttgaaacaacgcacacattttcaacaaccaaaaaatgacaatttctagtttagttaatttctacaaatcatcttatgttattagcaaggttaagacatcttttttaaaaaaattatagcttctaccaagagaaacactcaatttttctagagatttgcctctatcttcctttcctcagtcttcccagactgctatcaagctgtgtaaaaatttactttcactggaccctaaattattgtctctgctatctgactgccagtaattagtgcagaaaactaagacaggatgatacaggtttgaggggctggggagtgggaggggggagaaaaggaatgtatttaaacaatttccgatgcccatgatgagtttaaaaaccagcattgacaccatccccaaaattaaggctgtcgcttattgaatccacttgtgtccaacctcccaggattgttttatcctaatgtcacctgtatattcatttgaaaggacttggccctgttcttgggtcttcccgttacctgccccctgggtggtaagtttcctcctttctcaaccttccacgaggaggaaagaagtgtgcagtcattccacatggcctgttggaaggcctggggagggaactttgggtttgggacagatttttttttttgtttttggtatcattcacagcatacgatttttactctctccatcttcaccataagacagataatttggggttgctataatgctgtcacacatctcaaagtacattcaaatcttaaaaagaaattctcgtacttttgccatgttgatactgttcagcaaacaagctaccaggaactgtgaggctttgtcatttagcattagactttaaacaagaattaaaatcatgtgctgtatttttaaaatctagccaaattaaatagtacatgagaaattcagagtattagacagttttaaggcattcaactgagaaaactttatttgtcaaagtcagaaaacattttcatcttattgagagatatgtttttaaacttttatcatcatttgtaaatgtggaagttggtggattgctgtgtttttgcatgattagcatgggagtctgttggagcaagaggaacatgcttgttttgaaaactcgagatgatgagggtggtacatgcagtgtgttctctctttattggcttctaaaccagttttgtcctttaatgcatgtcaaatatttctcccatgcttctcttagcagaaaagtttttacctataagacagggcaccttttaactctaaaactagtgatactcagtgacatagactttgtcttataaacattttttcattttttattttgaaaaattgcaaatctacagcaaaagtaaaacagtagagtgaacaccatgtaaccctcacctggtgttaacattgtaccctatttgctttaagttgtatgtatttctgaacttggcaaaattggaaattaaaatttttaaaaattacaaatatacaaagttatttatcttagcacatttattatgtgtgactgcatctgatttatatttaaattggcaggttttgagggatttttttcttcatcataaatgtaaacataggattttagagtctatttccccaagcgccacattataactgtaaacttaccatcttctatgtagctgtgatatctcatctttctaaaatggaacttgttaaaaagtgttcaaacactatccctaatgcctgcggcagaatttatatacgatccattcattggggctcaaagtatcttttagacttttaaggacaatttacagcaaatgaaatttatgatgctgtgacaagaaatttaaagaatcaaaacgatggtttgaaaaggaaacctatgatacatgcaggagaagcaaaacccaagtgattggtgagaaatatagaaattatttaaattactttatagtaattattaaacactaatttttgtactgtcattgaaggtgttttatagagaaatctgagaaatcacattcacaaattagaagtcaaacatggccaggcacagtggctcacacctgtaatcttcaggatttcaagaccagcctagccaacatgacgaaaccccatctctactgaaaatagaaaaaaaaaattagccaggcttgcacctgtaatcccagttacctgggaggctgaggcaggagaatctcttgagcccaggaggcggaggttgcagtgagctgagatgccaccaccacaccagcctgggtgacagagtgaaactcgtatctccaaacaaacaaacaaaaagtccttaaacatatgtgaacaaaaattttgtgatggaaggattctagttaatgagtattgcatcaagatttacatctttcttactaaggaaaagagttaataaaaattgttctttattttacaggcagttactgaggctcttcccagatctcagtaaacagccactcagccttgaaaatggagtgttgttgtttctaaacatatatttatgtcatttattaagtacagttcacttaaataacataagtagattttctcttgtagtgatttgggtaggaagaggccatgtttcagttcgttttctctgtagggtcgattgaattggaccttttcagttgttcagaaaaataaaaataatttctcatattaaatacagacgctcctcaacttatgatgtgggtaggtcccagtaaacccattataatttgaaaatatcacattgaaaatgcatttaatatctcttacctgaaatcataacttagccaagcctaccttaaatgttctcagaacatttagcctgcagttgggcaaaaccatttaacacaaagcctattttataatgaagtgttgaatagctcatgttatttactgaatactgttgtgaaagtgaaaaacaatgattgtatgggtactcaaagtataatttctactgaatgcatatcacttgtgcactgttgtaaagctgaaaaaccgttaagcctctacgatttttaagtaagttggggaccatcagtttaaaataaatgcaatactatttcatgataaacatggtcactgtaagttttactcttttgaatgagggtgcgacagaatgcagttagaatcagttcatatcaccattaaaatcatccattcagaaaccaaaaaaaaaaaa

SEQ ID NO: 4158 - DNA, 5984 bp, Homo sapiens
acagaccataggtgaactgttaaggagggagaagccgcagtgtcaccttccacagtcctgctcccattaagacctatgaagtggaaaatgcagattattctttgaggtttcctgggaccagaaaaggtcagagactcttaatgggtaatgcagacaactggaatgcaatcatcaggtattcatttctgttttaaggttttatgtctgagaaacctgaaacctgaagaagtaaagcaatcatgattttttaaaaacttaataatatggttttggatttaaaaagaaagactgactcagagctggggaaaacactcacttgtgatacggatcaatgtgaaaacagcttaactctgttccatggcaattcgcacagtgtgactcagagacacctctcttcaccagctctggctcaggggatgtgaagccagaagcagaggtcacagtgacttcatctgagaaggacttaactgaccattgctggttttgaagccggaggaaggcccacagtcaatgaatgagagaggcttcgagaagctagaaatggcaaggaaatagattttcctctaaagctcccagaaagaaacacggttctgctgacacctcgattttaggccagtgagacctgcttcagacttctgacctacagaacgatttctttaaagactcgtgcagcacatcattatcgctggatgcccggacatgtaatacacctgacagcatgtgaagtgctcagaatggggcaggatgtcacctggaatcagcactaagtgattcagactttccttacttttaaatgtgctgctcttcatttcaagatgccgttgcagctctgataaatgcaaactgacaaccttcaaggccacgacggagggaaaatcattggtgcttggagcatagaagactgcccttcacaaaggaaatccctgattattgtttgaaatgctgaggacgttgctgcgaaggagacttttttcttatcccaccaaatactactttatggttcttgttttatccctaatcaccttctccgttttaaggattcatcaaaagcctgaatttgtaagtgtcagacacttggagcttgctggggagaatcctagtagtgatattaattgcaccaaagttttacagggtgatgtaaatgaaatccaaaaggtaaagcttgagatcctaacagtgaaatttaaaaagcgccctcggtggacacctgacgactatataaacatgaccagtgactgttcttctttcatcaagagacgcaaatatattgtagaaccccttagtaaagaagaggcggagtttccaatagcatattctatagtggttcatcacaagattgaaatgcttgacaggctgctgagggccatctatatgcctcagaatttctattgcattcatgtggacacaaaatccgaggattcctatttagctgcagtgatgggcatcgcttcctgttttagtaatgtctttgtggccagccgattggagagtgtggtttatgcatcgtggagccgggttcaggctgacctcaactgcatgaaggatctctatgcaatgagtgcaaactggaagtacttgataaatctttgtggtatggattttcccattaaaaccaacctagaaattgtcaggaagctcaagttgttaatgggagaaaacaacctggaaacggagaggatgccatcccataaagaagaaaggtggaagaagcggtatgaggtcgttaatggaaagctgacaaacacagggactgtcaaaatgcttcctccactcgaaacacctctcttttctggcagtgcctacttcgtggtcagtagggagtatgtggggtatgtactacagaatgaaaaaatccaaaagttgatggagtgggcacaagacacatacagccctgatgagtatctctgggccaccatccaaaggattcctgaagtcccgggctcactccctgccagccataagtatgatctgtctgacatgcaagcagttgccaggtttgtcaagtggcagtactttgagggtgatgtttccaagggtgctccctacccgccctgcgatggagtccatgtgcgctcagtgtgcattttcggagctggtgacttgaactggatgctgcgcaaacaccacttgtttgccaataagtttgacgtggatgttgacctctttgccatccagtgtttggatgagcatttgagacacaaagctttggagacattaaaacactgaccattacgggcaattttatgaacaagaagaaggatacacaaaacgtacccttatctgtttccccttccttgtcagcatcgggaagatggtatgaagtcctctttggggcagggactctagtagatcttcttgtcagagaagctgcatggtttctgcagagcacagttagctagaaaggtgatagcattaaatgttcatctagagttaatagtgggaggagtaaaggtagccttgaggccagagcaggtagcaaggcattgtggaaagaggggaccagggtggctggggaagaggccgatgcataaagtcagcctgttcaaagtgctcagggacttagcaaaatgagaagatgtgacctgtgccaaaactattttgagaattttaaatgtgaccatttttctggtatgaataaacttacagcaacaaataatcaaagatacaattaatctgatattatatttgttgaaatagaaatttgattgtactataaatgatttttgtaaataatttatattctgctctaatactgtactgtgtagtgtgtctccgtatgtcatctcagggagcttaaaatgggcttgatttaacattgtttttgtgttatttttgcttgaaacaacgcacacattttcaacaaccaaaaaatgacaatttctagtttagttaatttctacaaatcatcttatgttattagcaaggttaagacatcttttttaaaaaaattatagcttctaccaagagaaacactcaatttttctagagatttgcctctatcttcctttcctcagtcttcccagactgctatcaagctgtgtaaaaatttactttcactggaccctaaattattgtctctgctatctgactgccagtaattagtgcagaaaactaagacaggatgatacaggtttgaggggctggggagtgggaggggggagaaaaggaatgtatttaaacaatttccgatgcccatgatgagtttaaaaaccagcattgacaccatccccaaaattaaggctgtcgcttattgaatccacttgtgtccaacctcccaggattgttttatcctaatgtcacctgtatattcatttgaaaggacttggccctgttcttgggtcttcccgttacctgccccctgggtggtaagtttcctcctttctcaaccttccacgaggaggaaagaagtgtgcagtcattccacatggcctgttggaaggcctggggagggaactttgggtttgggacagatttttttttttgtttttggtatcattcacagcatacgatttttactctctccatcttcaccataagacagataatttggggttgctataatgctgtcacacatctcaaagtacattcaaatcttaaaaagaaattctcgtacttttgccatgttgatactgttcagcaaacaagctaccaggaactgtgaggctttgtcatttagcattagactttaaacaagaattaaaatcatgtgctgtatttttaaaatctagccaaattaaatagtacatgagaaattcagagtattagacagttttaaggcattcaactgagaaaactttatttgtcaaagtcagaaaacattttcatcttattgagagatatgtttttaaacttttatcatcatttgtaaatgtggaagttggtggattgctgtgtttttgcatgattagcatgggagtctgttggagcaagaggaacatgcttgttttgaaaactcgagatgatgagggtggtacatgcagtgtgttctctctttattggcttctaaaccagttttgtcctttaatgcatgtcaaatatttctcccatgcttctcttagcagaaaagtttttacctataagacagggcaccttttaactctaaaactagtgatactcagtgacatagactttgtcttataaacattttttcattttttattttgaaaaattgcaaatctacagcaaaagtaaaacagtagagtgaacaccatgtaaccctcacctggtgttaacattgtaccctatttgctttaagttgtatgtatttctgaacttggcaaaattggaaattaaaatttttaaaaattacaaatatacaaagttatttatcttagcacatttattatgtgtgactgcatctgatttatatttaaattggcaggttttgagggatttttttcttcatcataaatgtaaacataggattttagagtctatttccccaagcgccacattataactgtaaacttaccatcttctatgtagctgtgatatctcatctttctaaaatggaacttgttaaaaagtgttcaaacactatccctaatgcctgcggcagaatttatatacgatccattcattggggctcaaagtatcttttagacttttaaggacaatttacagcaaatgaaatttatgatgctgtgacaagaaatttaaagaatcaaaacgatggtttgaaaaggaaacctatgatacatgcaggagaagcaaaacccaagtgattggtgagaaatatagaaattatttaaattactttatagtaattattaaacactaatttttgtactgtcattgaaggtgttttatagagaaatctgagaaatcacattcacaaattagaagtcaaacatggccaggcacagtggctcacacctgtaatcttcaggatttcaagaccagcctagccaacatgacgaaaccccatctctactgaaaatagaaaaaaaaaattagccaggcttgcacctgtaatcccagttacctgggaggctgaggcaggagaatctcttgagcccaggaggcggaggttgcagtgagctgagatgccaccaccacaccagcctgggtgacagagtgaaactcgtatctccaaacaaacaaacaaaaagtccttaaacatatgtgaacaaaaattttgtgatggaaggattctagttaatgagtattgcatcaagatttacatctttcttactaaggaaaagagttaataaaaattgttctttattttacaggcagttactgaggctcttcccagatctcagtaaacagccactcagccttgaaaatggagtgttgttgtttctaaacatatatttatgtcatttattaagtacagttcacttaaataacataagtagattttctcttgtagtgatttgggtaggaagaggccatgtttcagttcgttttctctgtagggtcgattgaattggaccttttcagttgttcagaaaaataaaaataatttctcatattaaatacagacgctcctcaacttatgatgtgggtaggtcccagtaaacccattataatttgaaaatatcacattgaaaatgcatttaatatctcttacctgaaatcataacttagccaagcctaccttaaatgttctcagaacatttagcctgcagttgggcaaaaccatttaacacaaagcctattttataatgaagtgttgaatagctcatgttatttactgaatactgttgtgaaagtgaaaaacaatgattgtatgggtactcaaagtataatttctactgaatgcatatcacttgtgcactgttgtaaagctgaaaaaccgttaagcctctacgatttttaagtaagttggggaccatcagtttaaaataaatgcaatactatttcatgataaacatggtcactgtaagttttactcttttgaatgagggtgcgacagaatgcagttagaatcagttcatatcaccattaaaatcatccattcagaaaccaaaaaaaaaaaa

SEQ ID NO: 4159 - DNA, 5524 bp, Homo sapiens
gcatgccatctttaagagctgtaacgctcactgcgaaggtctgcggcttcattcctgaggtcagggagaccacgaacccacgggaaggaagaaactcaggacacatctgaacatctgaaggaacaaactccagatgcatcatctttaagagctgtaatactcaccgggagggtccgcagcttcattcttgatttctttaaagactcgtgcagcacatcattatcgctggatgcccggacatgtaatacacctgacagcatgtgaagtgctcagaatggggcaggatgtcacctggaatcagcactaagtgattcagactttccttacttttaaatgtgctgctcttcatttcaagatgccgttgcagctctgataaatgcaaactgacaaccttcaaggccacgacggagggaaaatcattggtgcttggagcatagaagactgcccttcacaaaggaaatccctgattattgtttgaaatgctgaggacgttgctgcgaaggagacttttttcttatcccaccaaatactactttatggttcttgttttatccctaatcaccttctccgttttaaggattcatcaaaagcctgaatttgtaagtgtcagacacttggagcttgctggggagaatcctagtagtgatattaattgcaccaaagttttacagggtgatgtaaatgaaatccaaaaggtaaagcttgagatcctaacagtgaaatttaaaaagcgccctcggtggacacctgacgactatataaacatgaccagtgactgttcttctttcatcaagagacgcaaatatattgtagaaccccttagtaaagaagaggcggagtttccaatagcatattctatagtggttcatcacaagattgaaatgcttgacaggctgctgagggccatctatatgcctcagaatttctattgcattcatgtggacacaaaatccgaggattcctatttagctgcagtgatgggcatcgcttcctgttttagtaatgtctttgtggccagccgattggagagtgtggtttatgcatcgtggagccgggttcaggctgacctcaactgcatgaaggatctctatgcaatgagtgcaaactggaagtacttgataaatctttgtggtatggattttcccattaaaaccaacctagaaattgtcaggaagctcaagttgttaatgggagaaaacaacctggaaacggagaggatgccatcccataaagaagaaaggtggaagaagcggtatgaggtcgttaatggaaagctgacaaacacagggactgtcaaaatgcttcctccactcgaaacacctctcttttctggcagtgcctacttcgtggtcagtagggagtatgtggggtatgtactacagaatgaaaaaatccaaaagttgatggagtgggcacaagacacatacagccctgatgagtatctctgggccaccatccaaaggattcctgaagtcccgggctcactccctgccagccataagtatgatctgtctgacatgcaagcagttgccaggtttgtcaagtggcagtactttgagggtgatgtttccaagggtgctccctacccgccctgcgatggagtccatgtgcgctcagtgtgcattttcggagctggtgacttgaactggatgctgcgcaaacaccacttgtttgccaataagtttgacgtggatgttgacctctttgccatccagtgtttggatgagcatttgagacacaaagctttggagacattaaaacactgaccattacgggcaattttatgaacaagaagaaggatacacaaaacgtacccttatctgtttccccttccttgtcagcatcgggaagatggtatgaagtcctctttggggcagggactctagtagatcttcttgtcagagaagctgcatggtttctgcagagcacagttagctagaaaggtgatagcattaaatgttcatctagagttaatagtgggaggagtaaaggtagccttgaggccagagcaggtagcaaggcattgtggaaagaggggaccagggtggctggggaagaggccgatgcataaagtcagcctgttcaaagtgctcagggacttagcaaaatgagaagatgtgacctgtgccaaaactattttgagaattttaaatgtgaccatttttctggtatgaataaacttacagcaacaaataatcaaagatacaattaatctgatattatatttgttgaaatagaaatttgattgtactataaatgatttttgtaaataatttatattctgctctaatactgtactgtgtagtgtgtctccgtatgtcatctcagggagcttaaaatgggcttgatttaacattgtttttgtgttatttttgcttgaaacaacgcacacattttcaacaaccaaaaaatgacaatttctagtttagttaatttctacaaatcatcttatgttattagcaaggttaagacatcttttttaaaaaaattatagcttctaccaagagaaacactcaatttttctagagatttgcctctatcttcctttcctcagtcttcccagactgctatcaagctgtgtaaaaatttactttcactggaccctaaattattgtctctgctatctgactgccagtaattagtgcagaaaactaagacaggatgatacaggtttgaggggctggggagtgggaggggggagaaaaggaatgtatttaaacaatttccgatgcccatgatgagtttaaaaaccagcattgacaccatccccaaaattaaggctgtcgcttattgaatccacttgtgtccaacctcccaggattgttttatcctaatgtcacctgtatattcatttgaaaggacttggccctgttcttgggtcttcccgttacctgccccctgggtggtaagtttcctcctttctcaaccttccacgaggaggaaagaagtgtgcagtcattccacatggcctgttggaaggcctggggagggaactttgggtttgggacagatttttttttttgtttttggtatcattcacagcatacgatttttactctctccatcttcaccataagacagataatttggggttgctataatgctgtcacacatctcaaagtacattcaaatcttaaaaagaaattctcgtacttttgccatgttgatactgttcagcaaacaagctaccaggaactgtgaggctttgtcatttagcattagactttaaacaagaattaaaatcatgtgctgtatttttaaaatctagccaaattaaatagtacatgagaaattcagagtattagacagttttaaggcattcaactgagaaaactttatttgtcaaagtcagaaaacattttcatcttattgagagatatgtttttaaacttttatcatcatttgtaaatgtggaagttggtggattgctgtgtttttgcatgattagcatgggagtctgttggagcaagaggaacatgcttgttttgaaaactcgagatgatgagggtggtacatgcagtgtgttctctctttattggcttctaaaccagttttgtcctttaatgcatgtcaaatatttctcccatgcttctcttagcagaaaagtttttacctataagacagggcaccttttaactctaaaactagtgatactcagtgacatagactttgtcttataaacattttttcattttttattttgaaaaattgcaaatctacagcaaaagtaaaacagtagagtgaacaccatgtaaccctcacctggtgttaacattgtaccctatttgctttaagttgtatgtatttctgaacttggcaaaattggaaattaaaatttttaaaaattacaaatatacaaagttatttatcttagcacatttattatgtgtgactgcatctgatttatatttaaattggcaggttttgagggatttttttcttcatcataaatgtaaacataggattttagagtctatttccccaagcgccacattataactgtaaacttaccatcttctatgtagctgtgatatctcatctttctaaaatggaacttgttaaaaagtgttcaaacactatccctaatgcctgcggcagaatttatatacgatccattcattggggctcaaagtatcttttagacttttaaggacaatttacagcaaatgaaatttatgatgctgtgacaagaaatttaaagaatcaaaacgatggtttgaaaaggaaacctatgatacatgcaggagaagcaaaacccaagtgattggtgagaaatatagaaattatttaaattactttatagtaattattaaacactaatttttgtactgtcattgaaggtgttttatagagaaatctgagaaatcacattcacaaattagaagtcaaacatggccaggcacagtggctcacacctgtaatcttcaggatttcaagaccagcctagccaacatgacgaaaccccatctctactgaaaatagaaaaaaaaaattagccaggcttgcacctgtaatcccagttacctgggaggctgaggcaggagaatctcttgagcccaggaggcggaggttgcagtgagctgagatgccaccaccacaccagcctgggtgacagagtgaaactcgtatctccaaacaaacaaacaaaaagtccttaaacatatgtgaacaaaaattttgtgatggaaggattctagttaatgagtattgcatcaagatttacatctttcttactaaggaaaagagttaataaaaattgttctttattttacaggcagttactgaggctcttcccagatctcagtaaacagccactcagccttgaaaatggagtgttgttgtttctaaacatatatttatgtcatttattaagtacagttcacttaaataacataagtagattttctcttgtagtgatttgggtaggaagaggccatgtttcagttcgttttctctgtagggtcgattgaattggaccttttcagttgttcagaaaaataaaaataatttctcatattaaatacagacgctcctcaacttatgatgtgggtaggtcccagtaaacccattataatttgaaaatatcacattgaaaatgcatttaatatctcttacctgaaatcataacttagccaagcctaccttaaatgttctcagaacatttagcctgcagttgggcaaaaccatttaacacaaagcctattttataatgaagtgttgaatagctcatgttatttactgaatactgttgtgaaagtgaaaaacaatgattgtatgggtactcaaagtataatttctactgaatgcatatcacttgtgcactgttgtaaagctgaaaaaccgttaagcctctacgatttttaagtaagttggggaccatcagtttaaaataaatgcaatactatttcatgataaacatggtcactgtaagttttactcttttgaatgagggtgcgacagaatgcagttagaatcagttcatatcaccattaaaatcatccattcagaaaccaaaaaaaaaaaa

SEQ ID NO: 4160 - DNA, 5617 bp, Homo sapiens
aaactgttccttggtatacattaagggaaatgctgctagagttttctttcaaagaacttaacctaaatttcagggtgttttcaaatctttagcaatccacaaacatagaattagaaaaataagtaagactagagagaaggaaattttaaaagagaaaagttaaccacccataattttgagaaaaaaaagcaaatatgtaggattagttcaccaacatattttctgagtgtgtgaatactatgtgtccatatatcccttgtcacattgttttttaatttcacagatttctttaaagactcgtgcagcacatcattatcgctggatgcccggacatgtaatacacctgacagcatgtgaagtgctcagaatggggcaggatgtcacctggaatcagcactaagtgattcagactttccttacttttaaatgtgctgctcttcatttcaagatgccgttgcagctctgataaatgcaaactgacaaccttcaaggccacgacggagggaaaatcattggtgcttggagcatagaagactgcccttcacaaaggaaatccctgattattgtttgaaatgctgaggacgttgctgcgaaggagacttttttcttatcccaccaaatactactttatggttcttgttttatccctaatcaccttctccgttttaaggattcatcaaaagcctgaatttgtaagtgtcagacacttggagcttgctggggagaatcctagtagtgatattaattgcaccaaagttttacagggtgatgtaaatgaaatccaaaaggtaaagcttgagatcctaacagtgaaatttaaaaagcgccctcggtggacacctgacgactatataaacatgaccagtgactgttcttctttcatcaagagacgcaaatatattgtagaaccccttagtaaagaagaggcggagtttccaatagcatattctatagtggttcatcacaagattgaaatgcttgacaggctgctgagggccatctatatgcctcagaatttctattgcattcatgtggacacaaaatccgaggattcctatttagctgcagtgatgggcatcgcttcctgttttagtaatgtctttgtggccagccgattggagagtgtggtttatgcatcgtggagccgggttcaggctgacctcaactgcatgaaggatctctatgcaatgagtgcaaactggaagtacttgataaatctttgtggtatggattttcccattaaaaccaacctagaaattgtcaggaagctcaagttgttaatgggagaaaacaacctggaaacggagaggatgccatcccataaagaagaaaggtggaagaagcggtatgaggtcgttaatggaaagctgacaaacacagggactgtcaaaatgcttcctccactcgaaacacctctcttttctggcagtgcctacttcgtggtcagtagggagtatgtggggtatgtactacagaatgaaaaaatccaaaagttgatggagtgggcacaagacacatacagccctgatgagtatctctgggccaccatccaaaggattcctgaagtcccgggctcactccctgccagccataagtatgatctgtctgacatgcaagcagttgccaggtttgtcaagtggcagtactttgagggtgatgtttccaagggtgctccctacccgccctgcgatggagtccatgtgcgctcagtgtgcattttcggagctggtgacttgaactggatgctgcgcaaacaccacttgtttgccaataagtttgacgtggatgttgacctctttgccatccagtgtttggatgagcatttgagacacaaagctttggagacattaaaacactgaccattacgggcaattttatgaacaagaagaaggatacacaaaacgtacccttatctgtttccccttccttgtcagcatcgggaagatggtatgaagtcctctttggggcagggactctagtagatcttcttgtcagagaagctgcatggtttctgcagagcacagttagctagaaaggtgatagcattaaatgttcatctagagttaatagtgggaggagtaaaggtagccttgaggccagagcaggtagcaaggcattgtggaaagaggggaccagggtggctggggaagaggccgatgcataaagtcagcctgttcaaagtgctcagggacttagcaaaatgagaagatgtgacctgtgccaaaactattttgagaattttaaatgtgaccatttttctggtatgaataaacttacagcaacaaataatcaaagatacaattaatctgatattatatttgttgaaatagaaatttgattgtactataaatgatttttgtaaataatttatattctgctctaatactgtactgtgtagtgtgtctccgtatgtcatctcagggagcttaaaatgggcttgatttaacattgtttttgtgttatttttgcttgaaacaacgcacacattttcaacaaccaaaaaatgacaatttctagtttagttaatttctacaaatcatcttatgttattagcaaggttaagacatcttttttaaaaaaattatagcttctaccaagagaaacactcaatttttctagagatttgcctctatcttcctttcctcagtcttcccagactgctatcaagctgtgtaaaaatttactttcactggaccctaaattattgtctctgctatctgactgccagtaattagtgcagaaaactaagacaggatgatacaggtttgaggggctggggagtgggaggggggagaaaaggaatgtatttaaacaatttccgatgcccatgatgagtttaaaaaccagcattgacaccatccccaaaattaaggctgtcgcttattgaatccacttgtgtccaacctcccaggattgttttatcctaatgtcacctgtatattcatttgaaaggacttggccctgttcttgggtcttcccgttacctgccccctgggtggtaagtttcctcctttctcaaccttccacgaggaggaaagaagtgtgcagtcattccacatggcctgttggaaggcctggggagggaactttgggtttgggacagatttttttttttgtttttggtatcattcacagcatacgatttttactctctccatcttcaccataagacagataatttggggttgctataatgctgtcacacatctcaaagtacattcaaatcttaaaaagaaattctcgtacttttgccatgttgatactgttcagcaaacaagctaccaggaactgtgaggctttgtcatttagcattagactttaaacaagaattaaaatcatgtgctgtatttttaaaatctagccaaattaaatagtacatgagaaattcagagtattagacagttttaaggcattcaactgagaaaactttatttgtcaaagtcagaaaacattttcatcttattgagagatatgtttttaaacttttatcatcatttgtaaatgtggaagttggtggattgctgtgtttttgcatgattagcatgggagtctgttggagcaagaggaacatgcttgttttgaaaactcgagatgatgagggtggtacatgcagtgtgttctctctttattggcttctaaaccagttttgtcctttaatgcatgtcaaatatttctcccatgcttctcttagcagaaaagtttttacctataagacagggcaccttttaactctaaaactagtgatactcagtgacatagactttgtcttataaacattttttcattttttattttgaaaaattgcaaatctacagcaaaagtaaaacagtagagtgaacaccatgtaaccctcacctggtgttaacattgtaccctatttgctttaagttgtatgtatttctgaacttggcaaaattggaaattaaaatttttaaaaattacaaatatacaaagttatttatcttagcacatttattatgtgtgactgcatctgatttatatttaaattggcaggttttgagggatttttttcttcatcataaatgtaaacataggattttagagtctatttccccaagcgccacattataactgtaaacttaccatcttctatgtagctgtgatatctcatctttctaaaatggaacttgttaaaaagtgttcaaacactatccctaatgcctgcggcagaatttatatacgatccattcattggggctcaaagtatcttttagacttttaaggacaatttacagcaaatgaaatttatgatgctgtgacaagaaatttaaagaatcaaaacgatggtttgaaaaggaaacctatgatacatgcaggagaagcaaaacccaagtgattggtgagaaatatagaaattatttaaattactttatagtaattattaaacactaatttttgtactgtcattgaaggtgttttatagagaaatctgagaaatcacattcacaaattagaagtcaaacatggccaggcacagtggctcacacctgtaatcttcaggatttcaagaccagcctagccaacatgacgaaaccccatctctactgaaaatagaaaaaaaaaattagccaggcttgcacctgtaatcccagttacctgggaggctgaggcaggagaatctcttgagcccaggaggcggaggttgcagtgagctgagatgccaccaccacaccagcctgggtgacagagtgaaactcgtatctccaaacaaacaaacaaaaagtccttaaacatatgtgaacaaaaattttgtgatggaaggattctagttaatgagtattgcatcaagatttacatctttcttactaaggaaaagagttaataaaaattgttctttattttacaggcagttactgaggctcttcccagatctcagtaaacagccactcagccttgaaaatggagtgttgttgtttctaaacatatatttatgtcatttattaagtacagttcacttaaataacataagtagattttctcttgtagtgatttgggtaggaagaggccatgtttcagttcgttttctctgtagggtcgattgaattggaccttttcagttgttcagaaaaataaaaataatttctcatattaaatacagacgctcctcaacttatgatgtgggtaggtcccagtaaacccattataatttgaaaatatcacattgaaaatgcatttaatatctcttacctgaaatcataacttagccaagcctaccttaaatgttctcagaacatttagcctgcagttgggcaaaaccatttaacacaaagcctattttataatgaagtgttgaatagctcatgttatttactgaatactgttgtgaaagtgaaaaacaatgattgtatgggtactcaaagtataatttctactgaatgcatatcacttgtgcactgttgtaaagctgaaaaaccgttaagcctctacgatttttaagtaagttggggaccatcagtttaaaataaatgcaatactatttcatgataaacatggtcactgtaagttttactcttttgaatgagggtgcgacagaatgcagttagaatcagttcatatcaccattaaaatcatccattcagaaaccaaaaaaaaaaaa

SEQ ID NO: 4161 - DNA, 2120 bp, Homo sapiens; identical to SEQ ID NO: 588

SEQ ID NO: 4162 - DNA, 2237 bp, Homo sapiens; identical to SEQ ID NO: 1646

SEQ ID NO: 4163 - DNA, 1634 bp, Homo sapiens
ctccggacaccatggacaagttttggtggcacgcagcctggggactctgcctcgtgccgctgagcctggcgcagatcgatttgaatataacctgccgctttgcaggtgtattccacgtggagaaaaatggtcgctacagcatctctcggacggaggccgctgacctctgcaaggctttcaatagcaccttgcccacaatggcccagatggagaaagctctgagcatcggatttgagacctgcaggtatgggttcatagaagggcacgtggtgattccccggatccaccccaactccatctgtgcagcaaacaacacaggggtgtacatcctcacatccaacacctcccagtatgacacatattgcttcaatgcttcagctccacctgaagaagattgtacatcagtcacagacctgcccaatgcctttgatggaccaattaccataactattgttaaccgtgatggcacccgctatgtccagaaaggagaatacagaacgaatcctgaagacatctaccccagcaaccctactgatgatgacgtgagcagcggctcctccagtgaaaggagcagcacttcaggaggttacatcttttacaccttttctactgtacaccccatcccagacgaagacagtccctggatcaccgacagcacagacagaatccctgctaccaataggaatgatgtcacaggtggaagaagagacccaaatcattctgaaggctcaactactttactggaaggttatacctctcattacccacacacgaaggaaagcaggaccttcatcccagtgacctcagctaagactgggtcctttggagttactgcagttactgttggagattccaactctaatgtcaatcgttccttatcaggagaccaagacacattccaccccagtggggggtcccataccactcatggatctgaatcagatggacactcacatgggagtcaagaaggtggagcaaacacaacctctggtcctataaggacaccccaaattccagaatggctgatcatcttggcatccctcttggccttggctttgattcttgcagtttgcattgcagtcaacagtcgaagaaggtgtgggcagaagaaaaagctagtgatcaacagtggcaatggagctgtggaggacagaaagccaagtggactcaacggagaggccagcaagtctcaggaaatggtgcatttggtgaacaaggagtcgtcagaaactccagaccagtttatgacagctgatgagacaaggaacctgcagaatgtggacatgaagattggggtgtaacacctacaccattatcttggaaagaaacaaccgttggaaacataaccattacagggagctgggacacttaacagatgcaatgtgctactgattgtttcattgcgaatcttttttagcataaaattttctactctttttgttttttgtgttttgttctttaaagtcaggtccaatttgtaaaaacagcattgctttctgaaattagggcccaattaataatcagcaagaatttgatcgttccagttcccacttggaggcctttcatccctcgggtgtgctatggatggcttctaacaaaaactacacatatgtattcctgatcgccaacctttc

SEQ ID NO: 4164 - DNA, 3196 bp, Homo sapiens; identical to SEQ ID NO: 719

SEQ ID NO: 4165 - DNA, 6595 bp, Homo sapiens; identical to SEQ ID NO: 1963

SEQ ID NO: 4166 - DNA, 6549 bp, Homo sapiens; identical to SEQ ID NO: 1894

SEQ ID NO: 4167 - DNA, 6721 bp, Homo sapiens; identical to SEQ ID NO: 2407

SEQ ID NO: 4168 - DNA, 11579 bp, Homo sapiens; identical to SEQ ID NO: 2510

SEQ ID NO: 4169 - DNA, 3670 bp, Homo sapiens
ccgaattgcagaagatccacagggcagctgtcaaaggcgacgccgcggaggtggagcgctgcctggcgcgcaggagcggagacctggacgcccgggacaagcagcacagaactgctctacacttggcctgtgccagtggccatgtgcaagtggtcactctcctggttaacagaaaatgccagattgatatctgtgacaaagaaaacagaacgcctttgatacaggctgtccattgccaggaagaggcttgtgccgttattctgctgaaacatggcgccaatccaaaccttaaggatatctacggcaacactgctctccattatgctgtgtatagtgagagcacctcactggcagaaaaactgctttcccatggtgcacacattgaagcactggacaaggacagtaataccccacttttattcgctataatttgcaagaaagagaaaatggtggaatttttattgaaaaagaaagcaagtacacatgccgttgataggctgagacggtcagctctcatgcttgctgtatactatgactcaccaggtattgtcagtatccttcttaagcaaaatattgatgtcttcgctcaagacatgtgtggacgagatgcagaagattacgctatttctcatcatttgacaaaaattcaacaacaaattttggaacataaacagaagatacttaaaaaggagaaatcaggtaagacttctgatttgtgtccccgagaaagtgtcagagcctttacctggaccttcgcatgaaaaaggaaacagaatagtcaatggacaaggagaagggcctcctgcaaaacatccttccttgaagcctaccactggagtggaagatcctgctgtgaaaggagcagtacaaagaaagaatgtacagacattgagagcagaacaagccttaccagtggcttcagaggaagagcaagaaaggcatgaaagaagtgaaaagaagcaaccacaggtcaaaaaaggaaataatacaaacaaaagtgaaaaaatacaactttcagaaaatatatgtgatagtacatcttctgctgctgctggcagattaacccaacaaagaaagattgggaaaacgtatcctcagcaatttcccaagaagctgaaggaagagcatgataaatgcaccttaaaacaagaaaatgaagaaaaaacaaatgttaatatgctgtacaaaaaaaatagagaagaattagaaaggaaagagaaacaatataagaaagaagttgaagcaaaacaacttgaaccaactgttcagtcactagagatgaaatcaaagactgcaagaaatactccaaatcgggattttcataatcatgaagaaacgaaaggtctgatggatgaaaattgcattttgaaggcagatattgccatactcagacaggaaatatgtacaatgaaaaatgacaacttggaaaaagaaaataaatatcttaaggacattaaaattgttaaagaaacaaatgctgcccttgaaaagtatataaaactcaatgaggaaatgataacagaaacagcattccggtatcaacaagagcttaatgatctcaaggctgagaatacaaggctcaatgccgaactgttgaaggaaaaagaaagcaagaaaagactggaagctgacattgaatcttatcagtctagactggctgctgctataggtaaacacagtgaaagtgtgaaaacagaaagaaacgtaaaacttgctttagagagaacacaagatgtttctgtacaagtagaaatgagttctgctatttccaaagtaaaagatgagaatgagtttcttactgaacaactttctgaaacacaaattaaattcaatgccttaaaagataagttccgtaagacaagagatagtctcagaaaaaagtcattggctttagaaactgtacaaaatgacctaagaaaaacacagcagcaaacacaggaaatgaaagagatgtatcaaaatgcagaagctaaagtgaataattccactggaaagtggaactgtgtagaagagaggatatgtcacctccaacgtgaaaatgcgtggcttgtacagcaactagatgacgttcatcagaaagaggatcataaagagatagtaactaatatccaaagaggctttattgagagtggaaagaaagacctcgtactagaagagaaaagtaagaagctaatgaatgaatgtgatcatttaaaagaaagtctctttcagtatgagagagagaaagcagaaggagtagtggttgtgagacaacttcaacaagaagtggctgacagcgtaaaaaaattaacaacgttagagtctccactggaaggtatatcacattgtcacattaatttggatgagacacaggcctcaaagaagaaattatttcaagtggaaagtcaacctaaaaaagaaaatgaagaattaagaaaactttttgagttaatatcatcactgaagtataatgtgaatcgaataagaaagaaaaatgatgaattagaagaagaggcaactggatataagaaactcctggaaatgacaataaatatgttaaatgtatttggaaatgcagactttgattgccatggagacttaaaaacagatcaactgaaaatggatattctgattaagaagctaaaacagaagtttgatgatcttacggcagagaaggaagctttatcttcaaaatgtgtcaatttggctaaagacaatcaagttcttcaacaggagtttttatctatgaaaaaagtacaacaggaatgaaaaacttgaggaggataaaaagatgttgaaagaagaaatattaaatcttaagacacatatggaaaacaatatggtagaacttagtaaactacaagaatataaatcggagctagatgaaaaggcaatgcaggcagtagaaaaattagtagaaatccacttacaggaacgagcacaatatgaaaaacaattagagcagttaaacaaggataatatggcttcactaagtaagaaggaactcacacttaaagatgtggaatgtaaattctcagaaatgaaaactgcttatgaagaggttacaaccgaattagaagaatataataaggaagcctttgcagcagcattgaaagataacaattccatgtcaaaaaaattaatgaaatcgaataagaaaatagcaacgatcagcatggagctccttatggagaaagagcggatgaaatattttctcagcactcttcctacaaggcgagacccagagtcaccttgtgttgaaaatcttactagtataggactcaacagaaaatatattctccaaacacccataagaattcctatttcaagcccacagacttcaaataacttcaagaactccttgactgcgatggagccggactatgtagaacagataactagagaaacaaagagaactgttgctgtgttggacacttgctcccatctacttacttctctataatccactgccactgaggaagcacaggccagccctccccagcacatactcactggtccccaacagaagaaccgctgccgcctccatgagatgtttcagctgctgtacaagggagtcccatttcagagcaggacaaacaggccaggtggtatcaggagcccaggtctccagctggagggaatgtcaaccctgcagtgggagcccatcacgcatcctaggcacagatgctaa

SEQ ID NO: 4170 - DNA, 7303 bp, Homo sapiens; identical to SEQ ID NO: 1391

SEQ ID NO: 4171 - DNA, 5010 bp, Homo sapiens; identical to SEQ ID NO: 644

SEQ ID NO: 4172 - DNA, 3965 bp, Homo sapiens
gtgcaaatgaatgccttccactgaaccgaggtagacggggtcgagtttcttgcgcgatggcactgttatagaagaatggaagaagatacagattatagaatcaggtttagttctttgtgtttctttaatgatcacgttggatttcatggcactataaaaagctcaccaagtgactttattgttattgaaattgatgaacagggacagttagttaataagaccatcgatgagcctattttcaagattagtgaaatacaacttgagccaaataattttcccaaaaaaccaaaactagatcttcaaaatctgtccttagaagatggaagaaaccaagaagttcatactttgattaagtacactgatggtgaccaaaatcatcagtctggttcagaaaaggaagatactatcgttgatggaacttccaaatgtgaagaaaaagctgatgttttaagctcctttttggatgaaaaaactcatgagttactgaataattttgcctgtgatgtaagagagaagtggctttctaaaacagagctaattggactacctcctgaattctcaataggcagaatccttgacaaaaaccagagggctagtttacacagtgccattaggcagaaatttccatttttagtaactgtaggaaaaaacagtgaaattgttgtaaaaccaaatcttgaatataaagaactttgtcatttggtatctgaagaggaagcatttgacttttttaaatatttggatgcaaagaaagaaaattccaaatttacctttaaacctgatacaaacaaagaccacagaaaagctgtccaccattttgtcaacaaaaagtttggaaaccttgtggaaaccaaatctttttctaaaatgaattgcagtgctggtaatccgaatgtggtggtaacagtaagatttcgggaaaaagcacacaaacgtgggaaaaggcctctttctgaatgccaagaaggaaaagttatatatacagcttttaccctacgaaaggaaaacctggaaatgtttgaagcgattggttttttagctatcaaacttggtgttattccttcggattttagttatgcaggccttaaagacaagaaagccatcacctatcaagcaatggttgttagaaaagtgactccagagaggttgaaaaatattgaaaaagaaattgaaaagaaaagaatgaatgtctttaatattcggtctgtagatgattccctgagacttggtcagctcaaaggaaatcactttgatattgtcattagaaatttaaaaaaacaaataaatgattctgcaaacctgagggagagaattatggaagcaatagaaaatgttaagaaaaaaggctttgtgaattactatggaccacagagatttgggaagggaaggaaagttcacacagaccaaattggactagctttgctgaagaatgaaatgatgaaagccataaaattgtttcttacaccagaagacttggatgatcctgtaaatagagcaaagaagtattttcttcaaactgaggatgctaaaggcacactttcattgatgcctgaattcaaagtgcgtgagagagcattgttggaggcattgcaccgctttggcatgaccgaggaaggttgtatccaggcatggttctctttaccccattccatgcgcatattctatgttcacgcatataccagcaaaatttggaatgaggcagtatcttacagacttgaaacctatggagcaagagtagtgcagggtgatttggtctgtttggatgaagacattgatgacgagaatttcccaaatagtaaaattcacctggtaactgaagaggagggatcagctaatatgtatgcaatacatcaggtggttcttccagtacttggatacaatattcagtacccgaagaacaaagtagggcagtggtaccatgacatacttagcagagatggactacagacatgtaggtttaaagtacctactctgaaactgaatataccaggttgctatagacagattttgaaacatccctgtaatctctcataccaactaatggaagatcatgacattgatgtcaaaacgaaaggttcccacattgatgaaacagctttgtctcttttgatctcttttgatcttgatgcttcatgctatgctaccgtttgtctgaaggaaataatgaagcatgacgtttaaaactgatacccttggtataaccatatatatgtcactctttgaaggaaagggggctaaaatgtcttaagcaccttccatgtgttaggaacttcataattgttatctcttttaattttcacagcatcctgagaagttaggatttgatactgtaattttatagaggatatgtaagtgtcagggtccaaatttaaggtccatgtgaccccaaagcctgtgttttttttctattatatgtttcagtgacctttattctgtgtcataaagttacaatcttttaaaaccattaggaatatatataatactgcaagataacatttaagaaaaaaagttgtgaatattcatatcctccagctccttgcttagaacactagtaaaattaggtcgcagtgaagcaaatgttggagagaaagatagatgaagcattttgctaattattattgtccccctttcctgtttttgaaattattgatcagaacaatatacaagggaaatgccatacctctgtttgtgatagataccccagagtagttattacctctttgtgagataagtaatctttgatgaagattgaaatacaatttctcatccaatttttatatcttggcatacgctgaccctcttgaccatttgtaattttttcatattatctaaaacaggtgttagagtcagacagattcattcttagattctagctctgacacttactagtgattttgagtatgttgttgatttttttgtgtgtggttactgatagaatcaagacaattacaacttcataaatgacaaataataggattatctccacattttctgttgctggaggaacaaaacattgtgcccatttgaaaattttaatttttgttggtttaactatcccacattataaatcatccttcaccattttatatcagttaaatatgggtgtgttggggaggaatgactggcatgtagacatgtattgatttaggaagatctgagcatttctttcattgttggtaagatataatgatgaaatttaaaaagcagtatggagcattatatatcagtaatgtgatatatatacttaagccagtttaaccattttgggaaatgttagcattaggaaataaaatccaaaagaaggaagagaagctatatgcaatgcaaaatttgcttattgcaatattttcatatacagacactaaaaacagttttcaaagtccagcattacgtaactaaagtaagtaaaatgatgtgtatcaacttgatggtaaaatatgtagttatttaaaaaagcaatgaacaatttagtttcatgagaaaatgttgccccctaaaagtagaacacatatgttacaactgcaataatactctgaattcatctttcacaaataagagacatgttagcatagtgattaaaagcacagatattggagacaaactaacccagtttgaaccctggcactgccacgtatagcactgcagccttgggaaagttatttaaactcatgggcttcagtttcaacatctgtaaaatgggcatgttaacattgcctacctcataggattactgtgagaattttctaagttaatatatgtaaagcaactttaaaaagtgcctggcacttagttattgttaagtaagtgtctgcagatgcaagtttggaagagaaaagcaaataaatgaaaatcccttcctgttaagatgatggggtatttggattttttttaatactaaaaagttttttttgttatatgttttggcaataaataattctcaatacacaaaaaaaaaaaaaaaaaaa

SEQ ID NO: 4173 - DNA, 3970 bp, Homo sapiens; identical to SEQ ID NO: 1504

SEQ ID NO: 4174 - DNA, 4379 bp, Homo sapiens
tgcaaatgaatgccttccactgaaccgaggtagacggggtcgagtttcttgcgcgatggtgggcttgtatgtgtgtgtgtgtgtgtgtgtgtggggggggggggtgacgaggttggcattgaggatccataccctttgcgcccaaagaaaggtgacgtggactagtgtcgtgcctttggacaggcagagtaagaggagggagaagaaacaggtagagctgctggccttgtcggggacacctttggacgtgctggagggcaacgacgccctagttttctgtgaagttaagtagcttctgcaggactgggttcagtatttctagtaccttctcaggatccctcctccgccaacgaattcctcaaccacgggccaagcaaactactcccccgcccactgtcagcagcagtctctgttgaatgggaatactgcaccttcaggcttaacgccacgtgggctcctttgctgtcctccaggcactgttatagaagaatggaagaagatacagattatagaatcaggtttagttctttgtgtttctttaatgatcacgttggatttcatggcactataaaaagctcaccaagtgactttattgttattgaaattgatgaacagggacagttagttaataagaccatcgatgagcctattttcaagattagtgaaatacaacttgagccaaataattttcccaaaaaaccaaaactagatcttcaaaatctgtccttagaagatggaagaaaccaagaagttcatactttgattaagtacactgatggtgaccaaaatcatcagtctggttcagaaaaggaagatactatcgttgatggaacttccaaatgtgaagaaaaagctgatgttttaagctcctttttggatgaaaaaactcatgagttactgaataattttgcctgtgatgtaagagagaagtggctttctaaaacagagctaattggactacctcctgaattctcaataggcagaatccttgacaaaaaccagagggctagtttacacagtgccattaggcagaaatttccatttttagtaactgtaggaaaaaacagtgaaattgttgtaaaaccaaatcttgaatataaagaactttgtcatttggtatctgaagaggaagcatttgacttttttaaatatttggatgcaaagaaagaaaattccaaatttacctttaaacctgatacaaacaaagaccacagaaaagctgtccaccattttgtcaacaaaaagtttggaaaccttgtggaaaccaaatctttttctaaaatgaattgcagtgctggtaatccgaatgtggtggtaacagtaagatttcgggaaaaagcacacaaacgtgggaaaaggcctctttctgaatgccaagaaggaaaagttatatatacagcttttaccctacgaaaggaaaacctggaaatgtttgaagcgattggttttttagctatcaaacttggtgttattccttcggattttagttatgcaggccttaaagacaagaaagccatcacctatcaagcaatggttgttagaaaagtgactccagagaggttgaaaaatattgaaaaagaaattgaaaagaaaagaatgaatgtctttaatattcggtctgtagatgattccctgagacttggtcagctcaaaggaaatcactttgatattgtcattagaaatttaaaaaaacaaataaatgattctgcaaacctgagggagagaattatggaagcaatagaaaatgttaagaaaaaaggctttgtgaattactatggaccacagagatttgggaagggaaggaaagttcacacagaccaaattggactagctttgctgaagaatgaaatgatgaaagccataaaattgtttcttacaccagaagacttggatgatcctgtaaatagagcaaagaagtattttcttcaaactgaggatgctaaaggcacactttcattgatgcctgaattcaaagtgcgtgagagagcattgttggaggcattgcaccgctttggcatgaccgaggaaggttgtatccaggcatggttctctttaccccattccatgcgcatattctatgttcacgcatataccagcaaaatttggaatgaggcagtatcttacagacttgaaacctatggagcaagagtagtgcagggtgatttggtctgtttggatgaagacattgatgacgagaatttcccaaatagtaaaattcacctggtaactgaagaggagggatcagctaatatgtatgcaatacatcaggtggttcttccagtacttggatacaatattcagtacccgaagaacaaagtagggcagtggtaccatgacatacttagcagagatggactacagacatgtaggtttaaagtacctactctgaaactgaatataccaggttgctatagacagattttgaaacatccctgtaatctctcataccaactaatggaagatcatgacattgatgtcaaaacgaaaggttcccacattgatgaaacagctttgtctcttttgatctcttttgatcttgatgcttcatgctatgctaccgtttgtctgaaggaaataatgaagcatgacgtttaaaactgatacccttggtataaccatatatatgtcactctttgaaggaaagggggctaaaatgtcttaagcaccttccatgtgttaggaacttcataattgttatctcttttaattttcacagcatcctgagaagttaggatttgatactgtaattttatagaggatatgtaagtgtcagggtccaaatttaaggtccatgtgaccccaaagcctgtgttttttttctattatatgtttcagtgacctttattctgtgtcataaagttacaatcttttaaaaccattaggaatatatataatactgcaagataacatttaagaaaaaaagttgtgaatattcatatcctccagctccttgcttagaacactagtaaaattaggtcgcagtgaagcaaatgttggagagaaagatagatgaagcattttgctaattattattgtccccctttcctgtttttgaaattattgatcagaacaatatacaagggaaatgccatacctctgtttgtgatagataccccagagtagttattacctctttgtgagataagtaatctttgatgaagattgaaatacaatttctcatccaatttttatatcttggcatacgctgaccctcttgaccatttgtaattttttcatattatctaaaacaggtgttagagtcagacagattcattcttagattctagctctgacacttactagtgattttgagtatgttgttgatttttttgtgtgtggttactgatagaatcaagacaattacaacttcataaatgacaaataataggattatctccacattttctgttgctggaggaacaaaacattgtgcccatttgaaaattttaatttttgttggtttaactatcccacattataaatcatccttcaccattttatatcagttaaatatgggtgtgttggggaggaatgactggcatgtagacatgtattgatttaggaagatctgagcatttctttcattgttggtaagatataatgatgaaatttaaaaagcagtatggagcattatatatcagtaatgtgatatatatacttaagccagtttaaccattttgggaaatgttagcattaggaaataaaatccaaaagaaggaagagaagctatatgcaatgcaaaatttgcttattgcaatattttcatatacagacactaaaaacagttttcaaagtccagcattacgtaactaaagtaagtaaaatgatgtgtatcaacttgatggtaaaatatgtagttatttaaaaaagcaatgaacaatttagtttcatgagaaaatgttgccccctaaaagtagaacacatatgttacaactgcaataatactctgaattcatctttcacaaataagagacatgttagcatagtgattaaaagcacagatattggagacaaactaacccagtttgaaccctggcactgccacgtatagcactgcagccttgggaaagttatttaaactcatgggcttcagtttcaacatctgtaaaatgggcatgttaacattgcctacctcataggattactgtgagaattttctaagttaatatatgtaaagcaactttaaaaagtgcctggcacttagttattgttaagtaagtgtctgcagatgcaagtttggaagagaaaagcaaataaatgaaaatcccttcctgttaagatgatggggtatttggattttttttaatactaaaaagttttttttgttatatgttttggcaataaataattctcaatacacaaaaaaaaaaaaaaaaaaa

SEQ ID NO: 4175 - DNA, 3619 bp, Homo sapiens; identical to SEQ ID NO: 166

SEQ ID NO: 4176 - DNA, 9309 bp, Homo sapiens; identical to SEQ ID NO: 1755

SEQ ID NO: 4177 - DNA, 3516 bp, Homo sapiens; identical to SEQ ID NO: 807

SEQ ID NO: 4178 - DNA, 3405 bp, Homo sapiens; identical to SEQ ID NO: 1911

SEQ ID NO: 4179 - DNA, 4663 bp, Homo sapiens
cggcagtcagctctatgttcgcggtcttaacctctcctctggccgagtccttgcaagaagtgaattacccgaccctgcaaaacacttactattttggagtttaaagtatgtcatcatggcaaagtttcggagaaggacttgcatcattttggcactttttattctatttattttctctctgatgatgggtttaaaaatgctgagaccaaatacagctacttttggagctccttttggacttgaccttcttccagaacttcatcaacgaactattcatttggggaaaaattttgatttccaaaagagtgacagaatcaacagtgaaacaaataccaagaatttaaaaagtgttgaaatcactatgaaaccttccaaagcctctgaacttaacttggatgaactaccacctctgaacaattatctacatgtattttattacagttggtatggaaatccacaatttgatggtaaatatatacattggaatcatccagtgttagagcattgggaccctagaatagccaagaattatccacaagggagacacaaccctccagatgacattggctccagcttttatcctgaattgggaagttacagttctcgggatccttctgtcatagaaactcacatgagacaaatgcgctcagcttcaattggtgtactagccctctcttggtacccacctgatgtaaatgatgaaaatggagaacctactgataacttggtacccactattttggataaagctcataaatataacctaaaggttacttttcacatagaaccatatagcaatcgagatgatcaaaacatgtacaaaaatgtcaagtatattatagacaaatatggaaatcatccggccttttacaggtacaagacgaagactggcaatgctcttcctatgttttatgtctatgattcctatattaccaagcctgaaaaatgggccaatctgttaaccacctcagggtctcggagtattcgcaattctccttatgatggactgtttattgcccttctggtagaagaaaaacataagtatgatattcttcaaagtggttttgatggaatttacacatattttgccacaaatggctttacttatggctcatcacatcagaattgggctagcctaaaattattttgtgataaatacaacttaatatttatcccaagtgtgggcccaggatacatagataccagcatccgtccatggaacacgcaaaacactcggaaccgaatcaatgggaagtattatgaaattggtctgagtgccgcacttcagacacgccccagcttaatttctatcacctcttttaatgagtggcatgaaggaactcagattgaaaaagctgttcccaaaagaaccagtaatacagtgtacctagattaccgtcctcataaaccaggtctttacctagaactgactcgcaagtggtctgaaaaatacagtaaggaaagagcaacttatgcattagatcgccagctgcctgtttcttaatgcattgattaaagtttaatagttatcaaaatcacctaatttttaaaaatagctttcgttttgagttctggaaagaaaactgtcaaaatcagtatatactattagttatatttaaaaatattttttttaattctttacagataatattatacttgttacccttcacaataccacatgagaaaatatctgagacaaaatgtatacaaatatattccttatggcataatttattgcatttctgactgaaatcaaaattctgatttgatggcaattgaattttcattttacaatagataaatgcttgtgttacctaaagcacttagcacacagttaaattatatttacatcctagacccaaataaataggattgtgtgtatatttgggatatctattgaagaaaaaaagaaaaccccttaaagataatgtacatgcttcatgtcatgtctttaaaataatttaatcaactttattgtcttagtatttagactctggataactctacaataatgaggaaattcttaagaataacaaaatcactgtaccttcctctcaattttgctgtgaacctgaaatggctttaaattaatactcttattttttatttaatttaattacataaattaaaccttaccatgaccaaattgtgttaggaaggcctgctatctacagcacagtgtgtcatttgcagatttgtggttacctataccacgctaggtgttttgacatgtttagtgtttctgctttacagtgctgaattccatattttagaagctatgaaagtccttttatgaaaaagttactgattgcttctcagttattaggaaaacagttgtttcacaattattatgtagatatgatgcccaaatatcatttttagtatatcttgtcgatctttaagttgttactattgtgttattcatgtctttaaatcagataccaaatattttttaggaaagaaaaatgttattactgtcattaggttgtcttttaatactttaagttattttgacgaaaagtaatagagaaaatttacttagcattttagattctagagacatggaaatgaaaattattttatgtctagagtaggtcctgaagtttggctttacattaagtttagcactgtatcagaatgaagaaactaatattttacataaaaactaatactttcaattttttatatagtaatatccccattttgtaaatgttagacttttatcatacctgtaagttaaaatacttgttatcaataacttgtcatattgtgacaaattgatcacttgtgtacgaaaaataaatctccttaaaaactaaataaaatgcactgtattcttacagttaatgtttataactatagtaaaaaattaatatatatcctattacataaatgttatttcttaggtgttccattaagaagagcaatagaataatgctaaaaaataatgcctataaatcttcagagtataaagacatccattcagaaacaaaaattagcactaaattttttataaaatagaccagatgacaaaatttattttatttttaaacagtggttttgacacaaattatgttattgaaaagcattattaatgtttaatttatttaaaattttggaatttgccatttctcagacaatgatcaggccttaggaaattaatacagtagtagtaatcattttctaggggaaaataaaagaataaatcactatactgatattttgatataagcaagcacttacatggtaatcactatatagatccaacctgtggattttcttcttatgtccatttaactagaatatattattttaggtataatttacaaatgtcacacctaataatcttttataatataccatatttcattaaagttttgttagagaagtatctaccacagaggagtttttgtcattgtgtacgttgtgtatttgaacccaccatgacagaaagtaaattttaggaaatagttatgagattaagggaaaatctataaaaacaaggttagcatattctcaacacagataccaccactttctttttcccattatagacatggtgaatccacacagcatacttcatctctgagctttgttgtgattcctcaacacattaccctaaccagccagcagtaacagatttcagagtaagataaagcagattctgtcttcattgcaaaaagttattctcaatggaagaatggcatctgatctcataattactagtttatattaatatagtttttttctccctttttaataaaataattacagtcatccctcagtgtctgtgggggattggttccagttacccctatagataccaaaatctgcagatgctcaagtccctgatataaactggcatagtagttgcatataatctatgcacatcctcctgtatacattaagtcatctctagattatttataacacttaatacaatgtaaatgctatgtagttgttataccatactggttagtgaataattacatgaaaaaaaagagtctgtacatcttcagagtttcagtcggcaatttcttggccatggatgtagaacctacagataaggtgagccaactgcattaggaaataactctaataattctgttaattcttaggaaaactttcaaaatcttcctcaggtatttattacaactgcctttaccattttagttgtaacacagtttaaattgttatgataacaagtaaataagagcaaagaatttatttcttaattcaaaactatacgtttgaattcaatatggtataacttaaagtggtataatacatacaatgcatgaatcataatggattcttttataagttattaatttttatggtttaatcagtctaattgttttgactgttatagaaaccaaatattttactgtttcttttaaggactaatattgtcaaaaactgctgttattaacttcacttgagttgtttaacttccttctgttttaagattgtaattaaaaattactattttgttatatggaatggttaatttttacctaataaaaacatagatgaaatacattgtaaaaaaaaaaaaaaaaaaaaaaaaaaaaaaaaaaaaaaaaaaaaaaaaaaaaaaaaaaaaaaaaaaaaaaaaaaaaaaaaaaaaaaaaaaaaaaaaaaaaaaaaaaaaaaaaaaaaa

SEQ ID NO: 4180 - DNA, 5306 bp, Homo sapiens
gcgcgcctgtcgcggtggtgggtgcaggactggacccacgggcccattgtgcgcccgcccgcggcagccaggaccatgtgggtgaacccggaggaggtgttgctggccaacgcgctgtggatcaccgagagggccaacccatacttcatcctgcagcggaggaagggccacgccggcgatggaggcggcggcggcggactggcgggcctgctggtgggtacccttgatgttgtgttggactccagcgcccgggtcgctccttaccgaatcttgtaccagactccagactccctggtctactggaccatcgcctgtggtggttccaggaaagaaatcactgaacactgggaatggcttgagcaaaatctcttgcagacactctccatctttgaaaatgagaatgatatcaccacatttgtgagaggaaaaatacagggcatcattgcagaatacaacaaaatcaatgatgtaaaggaagatgatgacacggagaagtttaaagaagccattgtgaaatttcataggctgtttgggatgccagaggaagagaaactcgtcaactattactcttgcagctattggaaggggaaggtcccccgtcagggttggatgtacctcagcattaaccacctttgcttttattcttttcttatgggaagggaagcgaaactggtcatccggtgggtagacatcactcagcttgagaagaatgccaccctgcttctgcctgatgtgatcaaagtgagcacacggtccagtgagcatttcttctctgtattcctcaacatcaacgagaccttcaagttaatggagcagcttgccaacatagccatgaggcaactcttagacaatgagggatttgaacaagatcgatccctgcccaaactcaaaaggaaatctcctaaaaaagtgtctgctctaaaacgtgatcttgatgccagggcaaagagtgagagataccgtgcacttttccggctgcccaaagatgaaaaattagatggccacacagactgcactctctggactccatttaacaaaatgcacattttggggcagatgtttgtgtccacaaattacatctgttttaccagcaaggaggagaacttatgtagcctcattatcccgctccgtgaggtgacaattgtggaaaaggcagacagctccagtgtgctccccagtcccttatccatcagcacccgaaacaggatgaccttcctatttgccaacttgaaagatagagactttctagtgcagaggatctcagatttcctgcaacagactacttccaaaatatattctgacaaggagtttgcaggaagttacaacagttcagatgatgaggtgtactctcgacccagcagcctcgtctcctccagcccccagagaagcacgagctctgatgctgatggagagcgccagtttaacctaaatggcaacagcgtccccacagccacacagaccctgatgaccatgtatcggcggcggtctcccgaggagttcaacccgaaattggccaaagagtttctgaaagagcaagcctggaagattcactttgctgagtatgggcaagggatctgcatgtaccgcacagagaaaacgcgggagctggtgttgaagggcatcccggagagcatgcgtggggagctctggctgctgctgtcaggtgccatcaatgagaaggccacacatcctgggtactatgaagacctagtggagaagtccatggggaagtataatctcgccacggaggagattgagagggatttacaccgctcccttccagaacacccagcttttcagaatgaaatgggcattgctgcactaaggagagtcttaacagcttatgcttttcgaaatcccaacatagggtattgccaggccatgaatattgtcacttcagtgctgctgctttatgccaaagaggaggaagctttctggctgcttgtggctttgtgtgagcgcatgctcccagattactacaacaccagagttgtgggtgcactggtggaccaaggtgtctttgaggagctagcacgagactacgtcccacagctgtacgactgcatgcaagacctgggcgtgatttccaccatctccctgtcttggttcctcacactatttctcagtgtgatgccttttgagagtgcagttgtggttgttgactgtttcttctatgaaggaattaaagtgatattccagttggccctagctgtgctggatgcaaatgtggacaaactgttgaactgcaaggatgatggggaggccatgaccgttttgggaaggtatttagacagtgtgaccaataaagacagcacactgcctcccattcctcacctccactccttgctcagcgatgatgtggaaccttaccctgaggtagacatctttagactcatcagaacttcctacgagaaattcggaactatccgggcagatttgattgaacagatgagattcaaacagagactgaaagtgatccagacgctggaggatactacgaaacgcaacgtggtacgaaccattgtgacagaaacttcctttaccattgatgagctggaagaactttatgctcttttcaaggcagaacatctcaccagctgctactggggcgggagcagcaacgcgctggaccggcatgaccccagcctgccctacctggaacagtatcgcattgacttcgagcagttcaagggaatgtttgctcttctctttccttgggcatgtggaactcactctgacgttctggcctcccgcttgttccagttattagatgaaaatggagactctttgattaacttccgggagtttgtctctgggctaagtgctgcatgccatggggacctcacagagaagctcaaactcctgtacaaaatgcacgtcttgcctgagccatcctctgatcaagatgaaccagattctgcttttgaagcaactcagtacttctttgaagatattaccccagaatgtacacatgttgttggattggatagcagaagcaaacagggtgcagatgatggctttgttacggtgagcctaaagccagacaaagggaagagagcaaattcccaagaaaatcgtaattatttgagactgtggactccagaaaataaatctaagtcaaagaatgcaaaggatttacccaaattaaatcaggggcagttcattgaactgtgtaagacaatgtataacatgttcagcgaagaccccaatgagcaggagctgtaccatgccacggcagcagtgaccagcctcctgctggagattggggaggtcggcaagttgttcgtggcccagcctgcaaaggagggcgggagcggaggcagtgggccgtcctgccaccagggcatcccaggcgtgctcttccccaagaaagggccaggccagccttacgtggtggagtctgttgagcccctgccggccagcctggcccccgacagcgaggaacactcccttggaggacaaatggaggacatcaagctggaggactcctcgccccgggacaacggggcctgctcctccatgctgatctctgacgacgacaccaaggacgacagctccatgtcctcatactcggtgctgagtgccggctcccacgaggaggacaagctgcactgcgaggacatcggagaggacacggtcctggtgcggagcggccagggcacggcggcactgccccggagcaccagcctggaccgggactgggccatcaccttcgagcagttcctggcctccctcttaactgagcctgccctggtcaagtactttgacaagcccgtgtgcatgatggccaggattaccagtgcaaaaaacatccggatgatgggcaagcccctcacctcggccagtgactatgaaatctcggccatgtccggctgacacgggcgccttcccgggggagtgggaggagagggaggggagggattttttatgttcttctgtgttgagttttttctttctttcttttaaattaaatatttattagtacctggcttgaagcctagtgttttcataatgtaattcaatgaaaactgttggagaaatatttaaacacctcaatgtaggtacattacactcttgttgcggggaggggatttaccagaatacagtttatttcgtgaattctaaaaaacaaaaagatgaatctgtcagtgatatgtgtgtattataacttattaatcttgctgttgagctgtatacatggtttaaaaaatagtactgtttaatgctaagtaaggcagcagtcatttgtgtattcaggctttttaaataaaattagagctgtaaggaaaatgaaaagccacaaatgcaagactgttcttaaatggaaggcatagtcagcgagggtaaatcctataccactttaggaagtattaaaaatatttttaagatttgaaatatatttcatagaagtcctctattcaaaatcatattccacagatgttccccttcaaagggaaaacatttggggttctaaacagttatgaaagtaagtgatttttacatgattccagaataacacttgtattgaccaatttagacagataccagaccaattttgcatttaagaaattgttctgattatttacgtcaactcattagaattcagtgaaaagtaacagtcttttgtcacagagaatctgaaagtagcagcaaagacagagggctcatgacaggtttttgcttttgctttgcttttgtttttgaaagagtaaaagtactgatgcttctgatactggatgtttagcttcttactgcaaaaacataagtaaaacagtcaactttaccatttccgtattctccatagattgaagaaatttataccacatatcgcatatgaccatctttccatcaaatcaatgtagagataatgtaaactgaaaaaaaatctgcaagataatgtaactgaatgttttaaaaacagaacttgtcactttatataaaagaatagtatgctctatttcctgaatggatgtggaaatgaaagctagcgcacctgcactttgaattcttgcttcttttttattactgttatgattttgctttttacagatgttggacgattttttcttctgattgttgaattcataatcatggtctcatttcctttgcttctttggaatatttctttcaacacattcctttattttattatacattgtgtcctttttttagctattgctgctgttgttttttattctatttacaggatgatttttaaactgtcaaatgaagtagtgttaacctcaaataggctaaatgtgaacaaataaaatacagcaaatactcaaaaaaaaaaaaaaaaaaaa

SEQ ID NO: 4181 - DNA, 5617 bp, Homo sapiens
gtcaaaatgagtctgctgatgtttacacaactactgctctgtggatttttatatgttcgggttgatggatcgcgtcttcgccaggaggactttcccccgcggattgtggagcatccttccgatgtcatcgtctctaagggcgagcccacgactctgaactgcaaggcggagggccggccaacgcccaccattgagtggtacaaagatggggagcgagtggagactgacaaggacgatccccggtcccacaggatgcttctgcccagcggatccttattcttcttgcgcatcgtgcacgggcgcaggagtaaacctgatgaaggaagctacgtttgtgttgcgaggaactatcttggtgaagcagtgagtcgaaatgcgtctctggaagtggcattgttacgagatgacttccgacaaaaccccacagatgttgtagtggcagctggagagcctgcaatcctggagtgccagcctccccggggacacccagaacccaccatctactggaaaaaagacaaagttcgaattgatgacaaggaagaaagaataagtatccgtggtggaaaactgatgatctccaataccaggaaaagtgatgcagggatgtatacttgtgttggtaccaatatggtgggagaaagggacagtgacccagcagagctgactgtctttgaacgacccacatttctcaggaggccaattaaccaggtggtactggaggaagaagctgtagaatttcgttgtcaagtccaaggagatcctcaaccaactgtgaggtggaaaaaggatgatgcagacttgccaagaggaaggtatgacatcaaagacgattacacactaagaattaaaaagaccatgagtacagatgaaggcacctatatgtgtattgctgagaatcgggttggaaaaatggaagcctctgctacactcaccgtccgagctcccccacagtttgtggttcggccaagagatcagattgttgctcaaggtcgaacagtgacatttccctgtgaaactaaaggaaacccacagccagctgttttttggcagaaagaaggcagccagaacctacttttcccaaaccaaccccagcagcccaacagtagatgctcagtgtcaccaactggagacctcacaatcaccaacattcaacgttccgacgcgggttactacatctgccaggctttaactgtggcaggaagcattttagcaaaagctcaactggaggttactgatgttttgacagatagacctccacctataattctacaaggcccagccaaccaaacgctggcagtggatggtacagcgttactgaaatgtaaagccactggtgatcctcttcctgtaattagctggttaaaggagggatttacttttccgggtagagatccaagagcaacaattcaagagcaaggcacactgcagattaagaatttacggatttctgatactggcacttatacttgtgtggctacaagttcaagtggagagacttcctggagtgcagtgctggatgtgacagagtctggagcaacaatcagtaaaaactatgatttaagtgacctgccagggccaccatccaaaccgcaggtcactgatgttactaagaacagtgtcaccttgtcctggcagccaggtacccctggaacccttccagcaagtgcatatatcattgaggctttcagccaatcagtgagcaacagctggcagaccgtggcaaaccatgtaaagaccaccctctatactgtaagaggactgcggcccaatacaatctacttattcatggtcagagcgatcaacccccaaggtctcagtgacccaagtcccatgtcagatcctgtgcgcacacaagatatcagcccaccagcacaaggagtggaccacaggcaagtgcagaaagagctaggagatgtccttgtccgtcttcataatccagttgtgctgactcccaccacggttcaggtcacatggacggttgatcgccaaccccagtttatccaaggctaccgagtgatgtatcgtcagacttcaggtctgcaggcgacatcttcgtggcagaatttagatgccaaagtcccgactgaacgaagtgctgtcttagtcaacctgaaaaagggggtgacttatgaaattaaagtacggccatattttaatgagttccaaggaatggatagtgaatctaaaacggttcgtactactgaagaagccccaagtgccccaccacagtctgtcactgtactgacagttggaagctacaatagcacaagtattagtgtttcctgggatcctcctcctccagatcaccagaatggaattatccaagaatacaagatctggtgtctaggaaatgaaacgcgattccatatcaacaaaactgtggatgcagccattcggtccgtaataattggtggattattcccaggtattcaataccgggtagaggttgcagctagtaccagtgcaggggttggagtaaagagtgagccacagccaataataatcgggagacgcaatgaagttgtcattactgaaaacaataacagcataactgagcaaatcactgatgtggtgaagcaaccagcctttatagctggtattggtggtgcctgctgggtaattctgatgggttttagcatatggttgtattggcgaagaaagaagaggaagggactcagtaattatgctgttacgtttcaaagaggagatggaggactaatgagcaatggaagccgtccaggtcttctcaatgctggtgatcccagctatccatggcttgctgattcttggccagccacgagcttgccagtaaataatagcaacagtggcccaaatgagattggaaattttggccgtggagatgtgctgccaccagttccaggccaaggggataaaacagcaacgatgctctcagatggagccatttatagtagcattgacttcactaccaaaaccagttacaacagttccagccaaataacacaggctaccccatatgccacgacacagatcttgcattccaacagcatacatgaattggctgtcgatctgcctgatccacaatggaaaagctcaattcagcaaaaaacagatctgatgggatttggttattctctacctgatcagaacaaaggtaacaatggtgggaaaggtggaaaaaagaagaaaaataaaaactcttctaaaccacagaaaaacaatggatccacttgggccaatgtccctctacctccccccccagtccagccccttcctggcacggagctggaacactatgcagtggaacaacaagaaaatggctatgacagtgatagctggtgcccaccattgccagtacaaacttacttacaccaaggtctggaagatgaactggaagaagatgatgatagggtcccaacacctcctgttcgaggcgtggcttcttctcctgctatctcctttggacagcagtccactgcaactcttactccatccccacgggaagagatgcaacccatgctgcaggctcacctggatgagttgacaagagcctatcagtttgatatagcaaaacaaacatggcacattcaaagcaataatcaacctccacagcctccagttccaccgttaggttatgtgtctggagccttgatttctgatttggaaacggatgttgcagatgatgatgccgacgacgaagaggaagctttagaaatccccaggcccctgagagcactggaccagactcctggatccagcatggacaatctagacagctctgtgacaggaaaagcctttacctcctctcaaagacctcgacctaccagcccattttctactgacagtaacaccagtgcagccctgagtcaaagtcagaggcctcggcccactaaaaaacacaagggagggcggatggaccaacaaccagcattgcctcatcgaagggaaggaatgacagatgaggaggccttggtgccctatagcaagcccagtttcccatctccaggtggccacagctcatcaggaacagcttcttctaagggatccactggacctaggaaaaccgaggtgttgagagcaggccaccagcgcaatgccagcgaccttcttgacataggatatatgggctccaacagtcaaggacagtttacaggtgaattatagtaaatgagaggagacatacaaagctgctctgaaggaccatcaggtccggactcatggaagtgatgactctaaacagtgcaatgaacaatttatttatgtactattaaaagaactgtaaatgcaatgtaaagacacacagccacacatatcccacagatattttcattgtgttcttctcttaagtacaccacccaccttaactctttcttgtcaggagtatataaaaaagaaagaaaacaaaactcgccctacaggaagaaaaggattctcctctgtatataatttcttttgtgcattgctatgcaagctcactctttttagctctgctcatattattgtctgttcttattggtctgttgtactatatgtgaattaataggctgtggtgccatatattaacttttaattgtgtaacttttatgtttaaattttgcactgcaattttatttggtgataagcacaaatctctactcctcatgacatgaagaaaaagactgaatgtgaagggagtttctgtactgtaagctagattggataatgatggctgtaacaaatcatgttagatggttttcagttggggtgtagaaataggaagatgcaaaggaacaatggtgttggcaaagtcttctttgaatatcagggactgagtcaataaaaaaaatagtagaaaggtggcttttactattgacaaaagccggggtcaaaaaaagtagtttaagtcttaagactgaatatgcattaaagtatgcaggtagcaaagatgtaataaatttgcttaaaaaaagaaattaaagttttatttagaatcaattttacctgtcattgtaattgacccatctgagaattacaataagcaagaggaaattaaggtgttttgcaagagctgtatttatattacagttttttaaaaacattttctgaattatcgtaattaagctctccaactcgttaagtcagaatataatatgaagttccccaaggaaacgaacaaaatgaactctagaatatctagcaaatagttaaagaagcaatttattattagggcatactcgggctgtttccaaatataaactctattgcaatatcttatttcatctttctaatacatgtacagtgcacactagaggatagagctgcatcacttaaattcatgacttaaaaaataatacagtttatatacaacttgttttttatttgattaagaagtgaagtttatgccacccaatgtatagccaaattgtacgtgcttaaaaaacagtgccgagagtatgttcagttcgcagtaagtagatttattggaataaatattctatggtacattctcagaaattggcttccaactaaaatacgtttgacccattttgaataaggaaattgaaaagaaaaatttaaaaggagaaaaaaatgcatgtttataaactttttaaataaaaccagaccttgtaagtggacattaaaaaaaaaaaaaaaaaaa

SEQ ID NO: 4182 - DNA, 3322 bp, Homo sapiens; identical to SEQ ID NO: 4149

SEQ ID NO: 4183 - DNA, 3388 bp, Homo sapiens
tagcttcacaccttcggcagcaggagggcggcagcttctcgcaggcggcagggcgggcggccaggatcatgtccaccaccacatgccaagtggtggcgttcctcctgtccatcctggggctggccggctgcatcgcggccaccgggatggacatgtggagcacccaggacctgtacgacaaccccgtcacctccgtgttccagtacgaagggctctggaggagctgcgtgaggcagagttcaggcttcaccgaatgcaggccctatttcaccatcctgggacttccagccatgctgcaggcagtgcgagccctgatgatcgtaggcatcgtcctgggtgccattggcctcctggtatccatctttgccctgaaatgcatccgcattggcagcatggaggactctgccaaagccaacatgacactgacctccgggatcatgttcattgtctcaggtctttgtgcaattgctggagtgtctgtgtttgccaacatgctggtgactaacttctggatgtccacagctaacatgtacaccggcatgggtgggatggtgcagactgttcagaccaggtacacatttggtgcggctctgttcgtgggctgggtcgctggaggcctcacactaattgggggtgtgatgatgtgcatcgcctgccggggcctggcaccagaagaaaccaactacaaagccgtttcttatcatgcctcaggccacagtgttgcctacaagcctggaggcttcaaggccagcactggctttgggtccaacaccaaaaacaagaagatatacgatggaggtgcccgcacagaggacgaggtacaatcttatccttccaagcacgactatgtgtaatgctctaagacctctcagcacgggcggaagaaactcccggagagctcacccaaaaaacaaggagatcccatctagatttcttcttgcttttgactcacagctggaagttagaaaagcctcgatttcatctttggagaggccaaatggtcttagcctcagtctctgtctctaaatattccaccataaaacagctgagttatttatgaattagaggctatagctcacattttcaatcctctatttctttttttaaatataactttctactctgatgagagaatgtggttttaatctctctctcacattttgatgatttagacagactccccctcttcctcctagtcaataaacccattgatgatctatttcccagcttatccccaagaaaacttttgaaaggaaagagtagacccaaagatgttattttctgctgtttgaattttgtctccccacccccaacttggctagtaataaacacttactgaagaagaagcaataagagaaagatatttgtaatctctccagcccatgatctcggttttcttacactgtgatcttaaaagttaccaaaccaaagtcattttcagtttgaggcaaccaaacctttctactgctgttgacatcttcttattacagcaacaccattctaggagtttcctgagctctccactggagtcctctttctgtcgcgggtcagaaattgtccctagatgaatgagaaaattattttttttaatttaagtcctaaatatagttaaaataaataatgttttagtaaaatgatacactatctctgtgaaatagcctcacccctacatgtggatagaaggaaatgaaaaaataattgctttgacattgtctatatggtactttgtaaagtcatgcttaagtacaaattccatgaaaagctcactgatcctaattctttccctttgaggtctctatggctctgattgtacatgatagtaagtgtaagccatgtaaaaagtaaataatgtctgggcacagtggctcacgcctgtaatcctagcactttgggaggctgaggaggaaggatcacttgagcccagaagttcgagactagcctgggcaacatggagaagccctgtctctacaaaatacagagagaaaaaatcagccagtcatggtggcatacacctgtagtcccagcattccggggggctgaggtgggaggatcacttgagcccagggaggttggggctgcagtgagccatgatcacaccactgcactccagccaggtgacatagcgagatcctgtctaaaaaaataaaaaataaataatggaacacagcaagtcctaggaagtaggttaaaactaattctttaaaaaaaaaaaaaaaaagttgagcctgaattaaatgtaatgtttccaagtgacaggtatccacatttgcatggttacaagccactgccagttagcagtagcactttcctggcactgtggtcggttttgttttgttttgctttgtttagagacggggtctcactttccaggctggcctcgaactcctgcactcaagcaattcttctaccctggcctcccaagtagctggaattacaggtgtgcgccatcacaactagctggtggtcagttttgttactctgagagctgttcacttctctgaattcacctagagtggttggaccatcagatgtttgggcaaaactgaaagctctttgcaaccacacaccttccctgagcttacatcactgcccttttgagcagaaagtctaaattccttccaagacagtagaattccatcccagtaccaaagccagataggccccctaggaaactgaggtaagagcagtctctaaaaactacccacagcagcattggtgcaggggaacttggccattaggttattatttgagaggaaagtcctcacatcaatagtacatatgaaagtgacctccaaggggattggtgaatactcataaggatcttcaggctgaacagactatgtctggggaaagaacggattatgccccattaaataacaagttgtgttcaagagtcagagcagtgagctcagaggcccttctcactgagacagcaacatttaaaccaaaccagaggaagtatttgtggaactcactgcctcagtttgggtaaaggatgagcagacaagtcaactaaagaaaaaagaaaagcaaggaggagggttgagcaatctagagcatggagtttgttaagtgctctctggatttgagttgaagagcatccatttgagttgaaggccacagggcacaatgagctctcccttctaccaccagaaagtccctggtcaggtctcaggtagtgcggtgtggctcagctgggtttttaattagcgcattctctatccaacatttaattgtttgaaagcctccatatagttagattgtgctttgtaattttgttgttgttgctctatcttattgtatatgcattgagtattaacctgaatgttttgttacttaaatattaaaaacactgttatcctacaaaaaaaaaaaaaaaaaaaaaaaa

SEQ ID NO: 4184 - DNA, 5810 bp, Homo sapiens
atcctgcactgcagggccggtctctcgctccagcagagcctgcgcctttctgactcggtccggaacactgaaaccagtcatcactgcatctttttggcaaaccaggagctcagctgcaggaggcaggatggtctggaggctggtcctgctggctctgtgggtgtggcccagcacgcaagctggtcaccaggacaaagacacgaccttcgaccttttcagtatcagcaacatcaaccgcaagaccattggcgccaagcagttccgcgggcccgaccccggcgtgccggcttaccgcttcgtgcgctttgactacatcccaccggtgaacgcagatgacctcagcaagatcaccaagatcatgcggcagaaggagggcttcttcctcacggcccagctcaagcaggacggcaagtccaggggcacgctgttggctctggagggccccggtctctcccagaggcagttcgagatcgtctccaacggccccgcggacacgctggatctcacctactggattgacggcacccggcatgtggtctccctggaggacgtcggcctggctgactcgcagtggaagaacgtcaccgtgcaggtggctggcgagacctacagcttgcacgtgggctgcgacctcatagacagcttcgctctggacgagcccttctacgagcacctgcaggcggaaaagagccggatgtacgtggccaaaggctctgccagagagagtcacttcaggggtttgcttcagaacgtccacctagtgtttgaaaactctgtggaagatattctaagcaagaagggttgccagcaaggccagggagctgagatcaacgccatcagtgagaacacagagacgctgcgcctgggtccgcatgtcaccaccgagtacgtgggccccagctcggagaggaggcccgaggtgtgcgaacgctcgtgcgaggagctgggaaacatggtccaggagctctcggggctccacgtcctcgtgaaccagctcagcgagaacctcaagagagtgtcgaatgataaccagtttctctgggagctcattggtggccctcctaagacaaggaacatgtcagcttgctggcaggatggccggttctttgcggaaaatgaaacgtgggtggtggacagctgcaccacgtgtacctgcaagaaatttaaaaccatttgccaccaaatcacctgcccgcctgcaacctgcgccagtccatcctttgtggaaggcgaatgctgcccttcctgcctccactcggtggacggtgaggagggctggtctccgtgggcagagtggacccagtgctccgtgacgtgtggctctgggacccagcagagaggccggtcctgtgacgtcaccagcaacacctgcttggggccctccatccagacacgggcttgcagtctgagcaagtgtgacacccgcatccggcaggacggcggctggagccactggtcaccttggtcttcatgctctgtgacctgtggagttggcaatatcacacgcatccgtctctgcaactccccagtgccccagatggggggcaagaattgcaaagggagtggccgggagaccaaagcctgccagggcgccccatgcccaatcgatggccgctggagcccctggtccccgtggtcggcctgcactgtcacctgtgccggtgggatccgggagcgcacccgggtctgcaacagccctgagcctcagtacggagggaaggcctgcgtgggggatgtgcaggagcgtcagatgtgcaacaagaggagctgccccgtggatggctgtttatccaacccctgcttcccgggagcccagtgcagcagcttccccgatgggtcctggtcatgcggctcctgccctgtgggcttcttgggcaatggcacccactgtgaggacctggacgagtgtgccctggtccccgacatctgcttctccaccagcaaggtgcctcgctgtgtcaacactcagcctggcttccactgcctgccctgcccgccccgatacagagggaaccagcccgtcggggtcggcctggaagcagccaagacggaaaagcaagtgtgtgagcccgaaaacccatgcaaggacaagacacacaactgccacaagcacgcggagtgcatctacctgggccacttcagcgaccccatgtacaagtgcgagtgccagacaggctacgcgggcgacgggctcatctgcggggaggactcggacctggacggctggcccaacctcaatctggtctgcgccaccaacgccacctaccactgcatcaaggataactgcccccatctgccaaattctgggcaggaagactttgacaaggacgggattggcgatgcctgtgatgatgacgatgacaatgacggtgtgaccgatgagaaggacaactgccagctcctcttcaatccccgccaggctgactatgacaaggatgaggttggggaccgctgtgacaactgcccttacgtgcacaaccctgcccagatcgacacagacaacaatggagagggtgacgcctgctccgtggacattgatggggacgatgtcttcaatgaacgagacaattgtccctacgtctacaacactgaccagagggacacggatggtgacggtgtgggggatcactgtgacaactgccccctggtgcacaaccctgaccagaccgacgtggacaatgaccttgttggggaccagtgtgacaacaacgaggacatagatgacgacggccaccagaacaaccaggacaactgcccctacatctccaacgccaaccaggctgaccatgacagagacggccagggcgacgcctgtgaccctgatgatgacaacgatggcgtccccgatgacagggacaactgccggcttgtgttcaacccagaccaggaggacttggacggtgatggacggggtgatatttgtaaagatgattttgacaatgacaacatcccagatattgatgatgtgtgtcctgaaaacaatgccatcagtgagacagacttcaggaacttccagatggtccccttggatcccaaagggaccacccaaattgatcccaactgggtcattcgccatcaaggcaaggagctggttcagacagccaactcggaccccggcatcgctgtaggttttgacgagtttgggtctgtggacttcagtggcacattctacgtaaacactgaccgggacgacgactatgccggcttcgtctttggttaccagtcaagcagccgcttctatgtggtgatgtggaagcaggtgacgcagacctactgggaggaccagcccacgcgggcctatggctactccggcgtgtccctcaaggtggtgaactccaccacggggacgggcgagcacctgaggaacgcgctgtggcacacggggaacacgccggggcaggtgcgaaccttatggcacgaccccaggaacattggctggaaggactacacggcctatgggtggcacctgactcacaggcccaagactggctacatcagagtcttagtgcatgaaggaaaacaggtcatggcagactcaggacctatctatgaccaaacctacgctggcgggcggctgggtctatttgtcttctctcaagaaatggtctatttctcagacctcaagtacgaatgcagagatatttaaacaagatttgctgcatttccggcaatgccctgtgcatgccatggtccctagacacctcagttcattgtggtccttgtggcttctctctctagcagcacctcctgtcccttgaccttaactctgatggttcttcacctcctgccagcaaccccaaacccaagtgccttcagaggataaatatcaatggaactcagagatgaacatctaacccactagaggaaaccagtttggtgatatatgagactttatgtggagtgaaaattgggcatgccattacattgctttttcttgtttgtttaaaaagaatgacgtttacatataaaatgtaattacttattgtatttatgtgtatatggagttgaagggaatactgtgcataagccattatgataaattaagcatgaaaaatattgctgaactacttttggtgcttaaagttgtcactattcttgaattagagttgctctacaatgacacacaaatcccattaaataaattataaacaagggtcaattcaaatttgaagtaatgttttagtaaggagagattagaagacaacaggcatagcaaatgacataagctaccgattaactaatcggaacatgtaaaacagttacaaaaataaacgaactctcctcttgtcctacaatgaaagccctcatgtgcagtagagatgcagtttcatcaaagaacaaacatccttgcaaatgggtgtgacgcggttccagatgtggatttggcaaaacctcatttaagtaaaaggttagcagagcaaagtgcggtgctttagctgctgcttgtgccgctgtggcgtcggggaggctcctgcctgagcttccttccccagctttgctgcctgagaggaaccagagcagacgcacaggccggaaaaggcgcatctaacgcgtatctaggctttggtaactgcggacaagttgcttttacctgatttgatgatacatttcattaaggttccagttataaatattttgttaatatttattaagtgactatagaatgcaactccatttaccagtaacttattttaaatatgcctagtaacacatatgtagtataatttctagaaacaaacatctaataagtatataatcctgtgaaaatatgaggcttgataatattaggttgtcacgatgaagcatgctagaagctgtaacagaatacatagagaataatgaggagtttatgatggaaccttaaatatataatgttgccagcgattttagttcaatatttgttactgttatctatctgctgtatatggaattcttttaattcaaacgctgaaaagaatcagcatttagtcttgccaggcacacccaataatcagtcatgtgtaatatgcacaagtttgtttttgtttttgttttttttgttggttggtttgtttttttgctttaagttgcatgatctttctgcaggaaatagtcactcatcccactccacataaggggtttagtaagagaagtctgtctgtctgatgatggatagggggcaaatctttttcccctttctgttaatagtcatcacatttctatgccaaacaggaacaatccataactttagtcttaatgtacacattgcattttgataaaattaattttgttgtttcctttgaggttgatcgttgtgttgttgttttgctgcactttttacttttttgcgtgtggagctgtattcccgagaccaacgaagcgttgggatacttcattaaatgtagcgactgtcaacagcgtgcaggttttctgtttctgtgttgtggggtcaaccgtacaatggtgtgggagtgacgatgatgtgaatatttagaatgtaccatattttttgtaaattatttatgtttttctaaacaaatttatcgtataggttgatgaaacgtcatgtgttttgccaaagactgtaaatatttatttatgtgttcacatggtcaaaatttcaccactgaaaccctgcacttagctagaacctcatttttaaagattaacaacaggaaataaattgtaaaaaaggttttctataaaaaaaaaaaaaaaaaaaaaaaaaaaaaaaaaaaaaaaaaaaaaaaaaaaaaaaaaaaaaaaaaaaaaaaaaaaaaaaaaaaaaaaaaaaaaaaaaaaaaaaaaaaaaaaaaaaaaaaaaaaaaaaa

SEQ ID NO: 4185 - DNA, 1837 bp, Homo sapiens; identical to SEQ ID NO: 806

SEQ ID NO: 4186 - DNA, 2244 bp, Homo sapiens; identical to SEQ ID NO: 1457

SEQ ID NO: 4187 - DNA, 2284 bp, Homo sapiens
acatgcgtggagaggcactgccttgcgtgtgtgcacacgtgtgaggatgtcagcgcctgtgtggccgcgggactcaaggctggcctggctcaagtgaacagcacgtccaggaggcgacctcgtccgcgggtttgcattctggggtggacgagctgggggttcggtccgagcccggtgggaggctcccggagcgcagcctgggcccagcccaccccgcgccggcggccatggcaggcaccctggacctggacaagggctgcacggtggaggagctgctccgcgggtgcatcgaagccttcgatgactccgggaaggtgcgggacccgcagctggtgcgcatgttcctcatgatgcacccctggtacatcccctcctctcagctggcggccaagctgctccacatctaccaacaatcccggaaggacaactccaattccctgcaggtgaaaacgtgccacctggtcaggtactggatctccgccttcccagcggagtttgacttgaacccggagttggctgagcagatcaaggagctgaaggctctgctagaccaagaagggaaccgacggcacagcagcctaatcgacatagacagcgtccctacctacaagtggaagcggcaggtgactcagcggaaccctgtgggacagaaaaagcgcaagatgtccctgttgtttgaccacctggagcccatggagctggcggagcatctcacctacttggagtatcgctccttctgcaagatcctgtttcaggactatcacagtttcgtgactcatggctgcactgtggacaaccccgtcctggagcggttcatctccctcttcaacagcgtctcacagtgggtgcagctcatgatcctcagcaaacccacagccccgcagcgggccctggtcatcacacactttgtccacgtggcggagaagctgctacagctgcagaacttcaacacgctgatggcagtggtcgggggcctgagccacagctccatctcccgcctcaaggagacccacagccacgttagccctgagaccatcaagctctgggagggtctcacggaactagtgacggcgacaggcaactatggcaactaccggcgtcggctggcagcctgtgtgggcttccgcttcccgatcctgggtgtgcacctcaaggacctggtggccctgcagctggcactgcctgactggctggacccagcccggacccggctcaacggggccaagatgaagcagctctttagcatcctggaggagctggccatggtgaccagcctgcggccaccagtacaggccaaccccgacctgctgagcctgctcacggtgtctctggatcagtatcagacggaggatgagctgtaccagctgtccctgcagcgggagccgcgctccaagtcctcgccaaccagccccacgagttgcaccccaccaccccggcccccggtactggaggagtggacctcggctgccaaacccaagctggatcaggccctcgtggtggagcacatcgagaagatggtggagtctgtgttccggaactttgacgtcgatggggatggccacatctcacaggaagaattccagatcatccgtgggaacttcccttacctcagcgcctttggggacctcgaccagaaccaggatggctgcatcagcagggaggagatggtttcctatttcctgcgctccagctctgtgttgggggggcgcatgggcttcgtacacaacttccaggagagcaactccttgcgccccgtcgcctgccgccactgcaaagccctgatcctgggcatctacaagcagggcctcaaatgccgagcctgtggagtgaactgccacaagcagtgcaaggatcgcctgtcagttgagtgtcggcgcagggcccagagtgtgagcctggaggggtctgcaccctcaccctcacccatgcacagccaccatcaccgcgccttcagcttctctctgccccgccctggcaggcgaggctccaggcctccagagatccgtgaggaggaggtacagacggtggaggatggggtgtttgacatccacttgtaatagatgctgtggttggatcaaggactcattcctgccttggagaaaatacttcaaccagagcagggagcctgggggtgtcggggcaggaggctggggatgggggtgggatatgagggtggcatgcagctgagggcagggccagggctggtgtccctaaggttgtacagactcttgtgaatatttgtattttccagatggaataaaaaggcccgtgtaattaaccttca

SEQ ID NO: 4188 - DNA, 1318 bp, Homo sapiens
ggggcgtgctcgcggctataaggggcggaggctgggcggcgttgctctgcgctctgcggctgacggcgcttttgtctccgggtccagaggcctttcagaaggagaaggcagctctgtttctctgcagaggagtagggtcctttcagccatgaagcatgtgttgaacctctacctgttaggtgtggtactgaccctactctccatcttcgttagagtgatggagtccctagagggcttactagagagcccatcgcctgggacctcctggaccaccagaagccaactagccaacacagagcccaccaagggccttccagaccatccatccagaagcatgtgataagacctccttccatactggccatattttggaacactgacctagacatgtccagatgggagtcccattcctagcagacaagctgagcaccgttgtaaccagagaactattactaggccttgaagaacctgtctaactggatgctcattgcctgggcaaggcctgtttaggccggttgcggtggctcatgcctgtaatcctagcactttgggaggctgaggtgggtggatcacctgaggtcaggagttcgagaccagcctcgccaacatggcgaaaccccatctctactaaaaatacaaaagttagctgggtgtggtggcagaggcctgtaatcccagctccttgggaggctgaggcgggagaattgcttgaacccggggacggaggttgcagtgagccgagatcgcactgctgtacccagcctgggccacagtgcaagactccatctcaaaaaaaaaagaaaagaaaaagcctgtttaatgcacaggtgtgagtggattgcttatggctatgagataggttgatctcgcccttaccccggggtctggtgtatgctgtgctttcctcagcagtatggctctgacatctcttagatgtcccaacttcagctgttgggagatggtgatattttcaaccctacttcctaaacatctgtctggggttcctttagtcttgaatgtcttatgctcaattatttggtgttgagcctctcttccacaagagctcctccatgtttggatagcagttgaagaggttgtgtgggtgggctgttgggagtgaggatggagtgttcagtgcccatttctcattttacattttaaagtcgttcctccaacatagtgtgtattggtctgaagggggtggtgggatgccaaagcctgctcaagttatggacattgtggccaccatgtggcttaaatgattttttctaactaataaagtggaatatatatttctaaaaaaaaaaaaaaaaaaaaa

SEQ ID NO: 4189 - DNA, 1432 bp, Homo sapiens; identical to SEQ ID NO: 2320

SEQ ID NO: 4190 - DNA, 3015 bp, Homo sapiens; identical to SEQ ID NO: 604

SEQ ID NO: 4191 - DNA, 1164 bp, Homo sapiens; identical to SEQ ID NO: 670

SEQ ID NO: 4192 - DNA, 5955 bp, Homo sapiens
accaggactaggaggcagcggggagcgtgcctgcgtcgctcggagcggtgacagcaaggagcgcagcgcggaggccgggcggcaaggggagtttccagtcctcgataagtggagtccctgctctgcgctgcgccagcgccttccgcctgggcccgcggtgctagacacctgccgagtccgaagcgggagtcaggctgagccttcggcccccaagatctccaacctgagcatatgccagttgacatgggaacactgaggccagcaatttaaggatttcacatttgcttgcagtgaatgcgtaatcctggatctcttgttcgcaaatcgacagcctgaagccctctggaagcccaagactgctggaggtttttgaccagacaagccaacctttttcaaggtagctcagtggcatttctgagcaggggccaccctgacttcaccttggcccaccatgagggtcttcctgctttgtgcctacatactgctgctgatggtttcccagttgagggcagtcagctttcctgaagatgatgaaccccttaatactgtcgactatcactattcaaggcaatatccggtttttagaggacgcccttcaggcaatgaatcgcagcacaggctggactttcagctgatgttgaaaattcgagacacactttatattgctggcagggatcaagtttatacagtaaacttaaatgaaatgcccaaaacagaagtaatacccaacaagaaactgacatggcgatcaagacaacaggatcgagaaaactgtgctatgaaaggcaagcataaagatgaatgccacaactttatcaaagtatttgttccaagaaacgatgagatggtttttgtttgtggtaccaatgcattcaatcccatgtgtagatactacaggttgagtaccttagaatatgatggggaagaaattagtggcctggcaagatgcccatttgatgccagacaaaccaatgttgccctctttgctgatgggaagctgtattctgccacagtggctgacttcttggccagcgatgccgttatttatcgaagcatgggtgatggatctgcccttcgcacaataaaatatgattccaaatggataaaagagccacactttcttcatgccatagaatatggaaactatgtctatttcttctttcgagaaatcgctgtcgaacataataatttaggcaaggctgtgtattcccgcgtggcccgcatatgtaaaaacgacatgggtggttcccagcgggtcctggagaaacactggacttcatttctaaaggctcggctgaactgttctgtccctggagattcgtttttctactttgatgttctgcagtctattacagacataatacaaatcaatggcatccccactgtggtcggggtgtttaccacgcagctcaatagcatccctggttctgctgtctgtgcatttagcatggatgacattgaaaaagtattcaaaggacggtttaaggaacagaaaactccagattctgtttggacagcagttcccgaagacaaagtgccaaagccaaggcctggctgttgtgcaaaacacggccttgccgaagcttataaaacctccatcgatttcccggatgaaactctgtcattcatcaaatctcatcccctgatggactctgccgttccacccattgccgatgagccctggttcacaaagactcgggtcaggtacagactgacggccatctcagtggaccattcagccggaccctaccagaactacacagtcatctttgttggctctgaagctggcatggtacttaaagttctggcaaagaccagtcctttctctttgaacgacagcgtattactggaagagattgaagcctacaaccatgcaaagtgcagtgctgagaatgaggaagacaaaaaggtcatctcattacagttggataaagatcaccacgctttatatgtggcgttctctagctgcattatccgcatccccctcagtcgctgtgagcgttatggatcatgtaaaaagtcttgtattgcatctcgtgacccgtattgtggctggttaagccagggatcctgtggtagagtgaccccagggatgctgctgttaaccgaagacttctttgctttccataaccacagtgctgaaggatatgaacaagacacagaattcggcaacacagctcatctaggggactgccatggtgtacgatgggaagtccagtctggagagtccaaccagatggtccacatgaatgtcctcatcacctgtgtctttgctgcttttgttttgggggcattcattgcaggtgtggcagtatactgctatcgagacatgtttgttcggaaaaacagaaagatccataaagatgcagagtccgcccagtcatgcacagactccagtggaagttttgccaaactgaatggtctctttgacagccctgtcaaggaataccaacagaatattgattctcctaaactgtatagtaacctgctaaccagtcggaaagagctaccacccaatggagatactaaatccatggtaatggaccatcgagggcaacctccagagttggctgctcttcctactcctgagtctacacccgtgcttcaccagaagaccctgcaggccatgaagagccactcagaaaaggcccatggccatggagcttcaaggaaagaaacccctcagttttttccgtctagtccgccacctcattccccattaagtcatgggcatatccccagtgccattgttcttccaaatgctacccatgactacaacacgtctttctcaaactccaatgctcacaaagctgaaaagaagcttcaaaacattgatcaccctctcacaaagtcatccagtaagagagatcaccggcgttctgttgattccagaaataccctcaatgatctcctgaagcatctgaatgacccaaatagtaaccccaaagccatcatgggagacatccagatggcacaccagaacttaatgctggatcccatgggatcgatgtctgaggtcccacctaaagtccctaaccgggaggcatcgctatactcccctccttcaactctccccagaaatagcccaaccaagcgagtggatgtccccaccactcctggagtcccaatgacttctctggaaagacaaagaggttatcacaaaaattcctcccagaggcactctatatctgctatgcctaaaaacttaaactcaccaaatggtgttttgttatccagacagcctagtatgaaccgtggaggatatatgcccacccccactggggcgaaggtggactatattcagggaacaccagtgagtgttcatctgcagccttccctctccagacagagcagctacaccagtaatggcactcttcctaggacgggactaaagaggacgccgtccttaaaacctgacgtgccaccaaagccttcctttgttcctcaaaccccatctgtcagaccactgaacaaatacacatactaggcctcaagtgtgctattcccatgtggctttatcctgtccgtgttgttgagaggatgatgttgtaagggtaccttaaaacaagagactcgcttgtattttaagagaaccaagtggccaaagaaactctttctaactttggcaacatcagaacttgccacatgtagctactgcagcaaggcttctgtgtacttgcctgaaaacaaaggaaggtgctggtcattccatttcttttgtttgaagctaaagagatgtgtagctcacaggggctaccttaccagtataaagagctgataacagtactcagaagaatctgtgaacaaatacttgaaaatgggttcaatgtagactgccattatgtgtggtcttcccattaaatgtgaacattttaatatgtatgcattcaccttgcctcttgcacaaatgtcaaaaaaaagatggtaatatctcaaagaaatgaacttgtagattaccaagcagtttgctaaaaattcaatctttgacccaagctgtagcatttttttttcatgtgtggcatctttttcatgccaccaacaaacttgttgtgtgtgtgcgtgtgtgtgtgtgtgtgtgtgtgtgtgtgtgtgtgttctgtacccactaggatttgtttaggtgcccattgcatctttttgtgctatggagttgtttacattaagcatgaccgaacgagagacaatactatttcccacaggagtccattgggttcagctttgaaagaggaatagaatcgaggctcctttgaccatcaaaatgatgaactttacttatgtggtacccaatgccagaatgtaagagttgcaagtgattttgtgctgctattcattaaaacttgtattccagtcttgccagcttaaggagatcaagatattaagaggtatccttgatttattttccagtattcagtagtaaaattttcctgtccactgtgaatcaaagcctgagtcactctatttaaccttggacacactaataaggttttattttgattgtgttcgtttccccccccccaatagtaaaatttctcctcctttaactcctcctaccccccaaggtaagaaacaaaaaacaaacaaacaaacaaaaatagaagacaaaagaaagacatatgaaaggaattgtaattggcttaacagaaacagtctgtaaaaacctaacagtggtgcaatcatgttgtctgtgttgtgttatgtgagaattttctcctaagtcatgcaggtaatgacaatatactgtaaataccacatgtgagtttacctgaatctgtgcattttgtgccttattcatgagaatgatagaagtactaaaatctgtcaagtgttttcagtatagcacattatttactgagtgccagttgtaaatgtttttcaaccagcacctaaaaagactcttttcaaaaaatcacagaaacaacctaggacaattatttgttacataatccgacctcatagcagcattacattctttgccgtgataaacattccactcctgctttcctaaggatgaaacagtgataatgtgaactcaaatgaggtttcctgggtaatgtgacacctgcagaaactatagagcgtcatttatacgtagtttggcagaaaccacttacggctgatgatgcgcaaccctgctgactgtttcagttaatatgctgcacaccacacacttgtttagtgaaccaaatctagaaagtaccaaggcagaggtatgctcctgctgtaatcaggcaaatgagttcaactggatttcttttgacaatactgttggtacctattacttgggggaggacatgttgcagaagaccagatcatttttatacagaatgtgaaatactgatacagttattcttttttttaaagaacattgttttataaagaacgtgatttccagtgatctctggaagcgctaaagctaaaatttctgttcttgaaacacttcagctttgcaactaaaatattacagattaataataaattaaaccaaccaatgataaacactactcagtccaccaacaacaaacgtgtttgaattcaccttaccaatattaatcccagcgtgtgtaaaacagaacagtaactctatgtgaccccagataacattttgtaacattgtgcttccttgtagtttgtaatgtgagttcaatcagtatttatgttgaaatttctaacattaaatctagtctctatcctgttaatttaatttttaaatgctttatccatttgtgcaaaggtaaacgcagattgtatcttttttaatggtacggcataaaaagtaaccctcaagtgaagtgtctctatactgttttatagagtactttaacatgaatagataccttgtaaacttgtattgtggatgtgtaaataatatgtactttgggtttttaacaccgcatgtaaagtcaaaataaaatatacaaatcattaaaaaaaaaaaaaaaaaaaaaaaaaaaaaaa

SEQ ID NO: 4193 - DNA, 5758 bp, Homo sapiens
cgcccttagccgatcggggcgctcagcccacacgcaccgctgctcggggcttggagatccgcgcaggctgggctcccggacgcggcggaccgacgcgcggaggatcgggatccggcgctgtggggctggggtgggcgggggaggctgggcccggggcctctggcgcgacacccgcatgaggacgcgagtgaaatagaccaaggtggaatttccaagggaaaagcttcggggtggttttggtccatttctccagcgaagaagtagacatggcgagcgactccccggctcgaagcctggatgaaatagatctctcggctctgagggaccctgcagggatctttgaattggtggaacttgttggaaatggaacatacgggcaagtttataagggtcgtcatgtcaaaacgggccagcttgcagccatcaaggttatggatgtcacaggggatgaagaggaagaaatcaaacaagaaattaacatgttgaagaaatattctcatcaccggaatattgctacatactatggtgcttttatcaaaaagaacccaccaggcatggatgaccaactttggttggtgatggagttttgtggtgctggctctgtcaccgacctgatcaagaacacaaaaggtaacacgttgaaagaggagtggattgcatacatctgcagggaaatcttacgggggctgagtcacctgcaccagcataaagtgattcatcgagatattaaagggcaaaatgtcttgctgactgaaaatgcagaagttaaactagtggactttggagtcagtgctcagcttgatcgaacagtgggcaggaggaatactttcattggaactccctactggatggcaccagaagttattgcctgtgatgaaaacccagatgccacatatgatttcaagagtgacttgtggtctttgggtatcaccgccattgaaatggcagaaggtgctccccctctctgtgacatgcaccccatgagagctctcttcctcatcccccggaatccagcgcctcggctgaagtctaagaagtggtcaaaaaaattccagtcatttattgagagctgcttggtaaagaatcacagccagcgaccagcaacagaacaattgatgaagcatccatttatacgagaccaacctaatgagcgacaggtccgcattcaactcaaggaccatattgatagaacaaagaagaagcgaggagaaaaagatgagacagagtatgagtacagtggaagtgaggaagaagaggaggagaatgactcaggagagcccagctccatcctgaatctgccaggggagtcgacgctgcggagggactttctgaggctgcagctggccaacaaggagcgttctgaggccctacggaggcagcagctggagcagcagcagcgggagaatgaggagcacaagcggcagctgctggccgagcgtcagaagcgcatcgaggagcagaaagagcagaggcggcggctggaggagcaacaaaggcgagagaaggagctgcggaagcagcaggagagggagcagcgccggcactatgaggagcagatgcgccgggaggaggagaggaggcgtgcggagcatgaacaggaatacatcaggcgacagttagaggaggagcagagacagttagagatcttgcagcagcagctactgcatgaacaagctctacttctggaatataagcgcaaacaattggaagaacagagacaagcagaaagactgcagaggcagctaaagcaagaaagagactacttagtttcccttcagcatcagcggcaggagcagaggcctgtggagaagaagccactgtaccattacaaagaaggaatgagtcctagtgagaagccagcatgggccaaggaggtagaagaacggtcaaggctcaaccggcaaagttcccctgccatgcctcacaaggttgccaacaggatatctgaccccaacctgcccccaaggtcggagtccttcagcattagtggagttcagcctgctcgaacaccccccatgctcagaccagtcgatccccagatcccacatctggtagctgtaaaatcccagggacctgccttgaccgcctcccagtcagtgcacgagcagcccacaaagggcctctctgggtttcaggaggctctgaacgtgacctcccaccgcgtggagatgccacgccagaactcagatcccacctcggaaaatcctcctctccccactcgcattgaaaagtttgaccgaagctcttggttacgacaggaagaagacattccaccaaaggtgcctcaaagaacaacttctatatccccagcattagccagaaagaattctcctgggaatggtagtgctctgggacccagactaggatctcaacccatcagagcaagcaaccctgatctccggagaactgagcccatcttggagagccccttgcagaggaccagcagtggcagttcctccagctccagcacccctagctcccagcccagctcccaaggaggctcccagcctggatcacaagcaggatccagtgaacgcaccagagttcgagccaacagtaagtcagaaggatcacctgtgcttccccatgagcctgccaaggtgaaaccagaagaatccagggacattacccggcccagtcgaccagctagctacaaaaaagctatagatgaggatctgacggcattagccaaagaactaagagaactccggattgaagaaacaaaccgcccaatgaagaaggtgactgattactcctcctccagtgaggagtcagaaagtagcgaggaagaggaggaagatggagagagcgagacccatgatgggacagtggctgtcagcgacatacccagactgataccaacaggagctccaggcagcaacgagcagtacaatgtgggaatggtggggacgcatgggctggagacctctcatgcggacagtttcagcggcagtatttcaagagaaggaaccttgatgattagagagacgtctggagagaagaagcgatctggccacagtgacagcaatggctttgctggccacatcaacctccctgacctggtgcagcagagccattctccagctggaaccccgactgagggactggggcgcgtctcaacccattcccaggagatggactctgggactgaatatggcatggggagcagcaccaaagcctccttcaccccctttgtggaccccagagtataccagacgtctcccactgatgaagatgaagaggatgaggaatcatcagccgcagctctgtttactagcgaacttcttaggcaagaacaggccaaactcaatgaagcaagaaagatttcggtggtaaatgtaaacccaaccaacattcggcctcatagcgacacaccagaaatcagaaaatacaagaaacgattcaactcagaaatactttgtgcagctctgtggggtgtaaaccttctggtggggactgaaaatggcctgatgcttttggaccgaagtgggcaaggcaaagtctataatctgatcaaccggaggcgatttcagcagatggatgtgctagagggactgaatgtccttgtgacaatttcaggaaagaagaataagctacgagtttactatctttcatggttaagaaacagaatactacataatgacccagaagtagaaaagaaacaaggctggatcactgttggggacttggaaggctgtatacattataaagttgttaaatatgaaaggatcaaatttttggtgattgccttaaagaatgctgtggaaatatatgcttgggctcctaaaccgtatcataaattcatggcatttaagtcttttgcagatctccagcacaagcctctgctagttgatctcacggtagaagaaggtcaaagattaaaggttatttttggttcacacactggtttccatgtaattgatgttgattcaggaaactcttatgatatctacataccatctcatattcagggcaatatcactcctcatgctattgtcatcttgcctaaaacagatggaatggaaatgcttgtttgctatgaggatgagggggtgtatgtaaacacctatggccggataactaaggatgtggtgctccaatggggagaaatgcccacgtctgtggcctacattcattccaatcagataatgggctggggcgagaaagctattgagatccggtcagtggaaacaggacatttggatggagtatttatgcataagcgagctcaaaggttaaagtttctatgtgaaagaaatgataaggtattttttgcatccgtgcgatctggaggaagtagccaagtgtttttcatgaccctcaacagaaattccatgatgaactggtaacagaagagcacttggcacttatcttcatggcgttatttctaatttaaaagaacataactcatgtggacttatgccagtctagaggcagaatcagaaggcttggttgaacatatcgctttccctttttcctctccctccgcccctcccagtacagtccatctttcaatgttgcagcctggttgagaaggagagaaaaaggtggcaggaatttccaggagatccccaagaatgctgccttgtctgtggacaaagatggaccatgtgcccttcggaattagggatagaaacaaatattgtgtgctcttaacgattaagctgtgttatggtgggttttcaggtttttaccttttttctttacccctttactctgcaagaatggggaaagaatgcatactgcgaaaatgagtcttttaaattctgtctgcctactagttttaagtatatggtatgttgtaaaatttccaatgatgagagacagcacaataaatgtaccttatctccttaggctgaaggccataactacatagtggagtaatttaagaactctcttgccttcaccaacccaaaaggttgctttttgatagcaactggctaatgaatttttaaaaagagaagaaaaatactagttttcccctcttttgggaaatagattttaaatggctaaactactagccttaaaactactagtctaataaaatcaactaccacttttgtgaatctgacaggccacatttttatatggccctttacagaatggagtgtgttgaacaggatactaacgccattgagttgagctggcctagcgatggagggacactctaacacaactttccctcagctattatgcaacagatcagggaaaaagatgggatgacagatggggtcagacagaaagagcttctgggaaacaagcttacatagtcttttttaaaatgcacaaagcctcccagctaagaggtcacttggtttgggcttcattaggactgagactttgttgagttctttctgggacttggagagtggatgatattcaggctctgaacattcccagcgctctcccgagggtgccactttctcaagatgaaaactgtgactgaaaaaattaataataaatgtttctgagctgcctgtgttctccctgtgtgggtgagagaagggactagactcctaagcctgcctcagatacaagaggcatcattggctccaattttagagaacttgaaagcaaggctttggacaaaattttgagaccctaatcactttaccttcctccaaattacccaacatacggtaaacaacatttgtgcagaagtatgtatgtatttagttcaggttgacttgtgtccttataaactcttactcaaatgatttgaactttaaaaaaaaaaaaaaaaaaaaaaaaaaaaaaa

SEQ ID NO: 4194 - DNA, 5091 bp, Homo sapiens
ctgtccctctgaccctgcactgtcccagcaccatgggacccacctcaggtcccagcctgctgctcctgctactaacccacctccccctggctctggggagtcccatgtactctatcatcacccccaacatcttgcggctggagagcgaggagaccatggtgctggaggcccacgacgcgcaaggggatgttccagtcactgttactgtccacgacttcccaggcaaaaaactagtgctgtccagtgagaagactgtgctgacccctgccaccaaccacatgggcaacgtcaccttcacgatcccagccaacagggagttcaagtcagaaaaggggcgcaacaagttcgtgaccgtgcaggccaccttcgggacccaagtggtggagaaggtggtgctggtcagcctgcagagcgggtacctcttcatccagacagacaagaccatctacacccctggctccacagttctctatcggatcttcaccgtcaaccacaagctgctacccgtgggccggacggtcatggtcaacattgagaacccggaaggcatcccggtcaagcaggactccttgtcttctcagaaccagcttggcgtcttgcccttgtcttgggacattccggaactcgtcaacatgggccagtggaagatccgagcctactatgaaaactcaccacagcaggtcttctccactgagtttgaggtgaaggagtacgtgctgcccagtttcgaggtcatagtggagcctacagagaaattctactacatctataacgagaagggcctggaggtcaccatcaccgccaggttcctctacgggaagaaagtggagggaactgcctttgtcatcttcgggatccaggatggcgaacagaggatttccctgcctgaatccctcaagcgcattccgattgaggatggctcgggggaggttgtgctgagccgaaaggtactgctggacggggtgcagaacccccgagcagaagacctggtggggaagtctttgtacgtgtctgccaccgtcatcttgcactcaggcagtgacatggtgcaggcagagcgcagcgggatccccatcgtgacctctccctaccagatccacttcaccaagacacccaagtacttcaaaccaggaatgccctttgacctcatggtgttcgtgacgaaccctgatggctctccagcctaccgagtccccgtggcagtccagggcgaggacactgtgcagtctctaacccagggagatggcgtggccaaactcagcatcaacacacaccccagccagaagcccttgagcatcacggtgcgcacgaagaagcaggagctctcggaggcagagcaggctaccaggaccatgcaggctctgccctacagcaccgtgggcaactccaacaattacctgcatctctcagtgctacgtacagagctcagacccggggagaccctcaacgtcaacttcctcctgcgaatggaccgcgcccacgaggccaagatccgctactacacctacctgatcatgaacaagggcaggctgttgaaggcgggacgccaggtgcgagagcccggccaggacctggtggtgctgcccctgtccatcaccaccgacttcatcccttccttccgcctggtggcgtactacacgctgatcggtgccagcggccagagggaggtggtggccgactccgtgtgggtggacgtcaaggactcctgcgtgggctcgctggtggtaaaaagcggccagtcagaagaccggcagcctgtacctgggcagcagatgaccctgaagatagagggtgaccacggggcccgggtggtactggtggccgtggacaagggcgtgttcgtgctgaataagaagaacaaactgacacagagtaagatctgggacgtggtggagaaggcagacatcggctgcaccccgggcagtgggaaggattacgccggtgtcttctccgacgcagggctgaccttcacgagcagcagtggccagcagaccgcccagagggcagaacttcagtgcccgcagccagccgcccgccgacgccgttccgtgcagctcacggagaagcgaatggacaaagtcggcaagtaccccaaggagctgcgcaagtgctgcgaggacggcatgcgggagaaccccatgaggttctcgtgccagcgccggacccgtttcatctccctgggcgaggcgtgcaagaaggtcttcctggactgctgcaactacatcacagagctgcggcggcagcacgcgcgggccagccacctgggcctggccaggagtaacctggatgaggacatcattgcagaagagaacatcgtttcccgaagtgagttcccagagagctggctgtggaacgttgaggacttgaaagagccaccgaaaaatggaatctctacgaagctcatgaatatatttttgaaagactccatcaccacgtgggagattctggctgtcagcatgtcggacaagaaagggatctgtgtggcagaccccttcgaggtcacagtaatgcaggacttcttcatcgacctgcggctaccctactctgttgttcgaaacgagcaggtggaaatccgagccgttctctacaattaccggcagaaccaagagctcaaggtgagggtggaactactccacaatccagccttctgcagcctggccaccaccaagaggcgtcaccagcagaccgtaaccatcccccccaagtcctcgttgtccgttccatatgtcatcgtgccgctaaagaccggcctgcaggaagtggaagtcaaggctgccgtctaccatcatttcatcagtgacggtgtcaggaagtccctgaaggtcgtgccggaaggaatcagaatgaacaaaactgtggctgttcgcaccctggatccagaacgcctgggccgtgaaggagtgcagaaagaggacatcccacctgcagacctcagtgaccaagtcccggacaccgagtctgagaccagaattctcctgcaagggaccccagtggcccagatgacagaggatgccgtcgacgcggaacggctgaagcacctcattgtgaccccctcgggctgcggggaacagaacatgatcggcatgacgcccacggtcatcgctgtgcattacctggatgaaacggagcagtgggagaagttcggcctagagaagcggcagggggccttggagctcatcaagaaggggtacacccagcagctggccttcagacaacccagctctgcctttgcggccttcgtgaaacgggcacccagcacctggctgaccgcctacgtggtcaaggtcttctctctggctgtcaacctcatcgccatcgactcccaagtcctctgcggggctgttaaatggctgatcctggagaagcagaagcccgacggggtcttccaggaggatgcgcccgtgatacaccaagaaatgattggtggattacggaacaacaacgagaaagacatggccctcacggcctttgttctcatctcgctgcaggaggctaaagatatttgcgaggagcaggtcaacagcctgccaggcagcatcactaaagcaggagacttccttgaagccaactacatgaacctacagagatcctacactgtggccattgctggctatgctctggcccagatgggcaggctgaaggggcctcttcttaacaaatttctgaccacagccaaagataagaaccgctgggaggaccctggtaagcagctctacaacgtggaggccacatcctatgccctcttggccctactgcagctaaaagactttgactttgtgcctcccgtcgtgcgttggctcaatgaacagagatactacggtggtggctatggctctacccaggccaccttcatggtgttccaagccttggctcaataccaaaaggacgcccctgaccaccaggaactgaaccttgatgtgtccctccaactgcccagccgcagctccaagatcacccaccgtatccactgggaatctgccagcctcctgcgatcagaagagaccaaggaaaatgagggtttcacagtcacagctgaaggaaaaggccaaggcaccttgtcggtggtgacaatgtaccatgctaaggccaaagatcaactcacctgtaataaattcgacctcaaggtcaccataaaaccagcaccggaaacagaaaagaggcctcaggatgccaagaacactatgatccttgagatctgtaccaggtaccggggagaccaggatgccactatgtctatattggacatatccatgatgactggctttgctccagacacagatgacctgaagcagctggccaatggtgttgacagatacatctccaagtatgagctggacaaagccttctccgataggaacaccctcatcatctacctggacaaggtctcacactctgaggatgactgtctagctttcaaagttcaccaatactttaatgtagagcttatccagcctggagcagtcaaggtctacgcctattacaacctggaggaaagctgtacccggttctaccatccggaaaaggaggatggaaagctgaacaagctctgccgtgatgaactgtgccgctgtgctgaggagaattgcttcatacaaaagtcggatgacaaggtcaccctggaagaacggctggacaaggcctgtgagccaggagtggactatgtgtacaagacccgactggtcaaggttcagctgtccaatgactttgacgagtacatcatggccattgagcagaccatcaagtcaggctcggatgaggtgcaggttggacagcagcgcacgttcatcagccccatcaagtgcagagaagccctgaagctggaggagaagaaacactacctcatgtggggtctctcctccgatttctggggagagaagcccaacctcagctacatcatcgggaaggacacttgggtggagcactggcccgaggaggacgaatgccaagacgaagagaaccagaaacaatgccaggacctcggcgccttcaccgagagcatggttgtctttgggtgccccaactgaccacacccccattcccccactccagataaagcttcagttataaaaaaaaaaaaaaaaaaaaaaaaaa

SEQ ID NO: 4195 - DNA, 6517 bp, Homo sapiens
ccgccgcacccgggacggtgcgtagcgctggaagtccggccttccgagagctagctgtccgccgcggcccccgcacgccgggcagccgtccctcgccgcctcgggcgcgccaccatggggccccggctcagcgtctggctgctgctgctgcccgccgcccttctgctccacgaggagcacagccgggccgctgcgaagggtggctgtgctggctctggctgtggcaaatgtgactgccatggagtgaagggacaaaagggtgaaagaggcctcccggggttacaaggtgtcattgggtttcctggaatgcaaggacctgaggggccacagggaccaccaggacaaaagggtgatactggagaaccaggactacctggaacaaaagggacaagaggacctccgggagcatctggctaccctggaaacccaggacttcccggaattcctggccaagacggcccgccaggccccccaggtattccaggatgcaatggcacaaagggggagagagggccgctcgggcctcctggcttgcctggtttcgctggaaatcccggaccaccaggcttaccagggatgaagggtgatccaggtgagatacttggccatgtgcccgggatgctgttgaaaggtgaaagaggatttcccggaatcccagggactccaggcccaccaggactgccagggcttcaaggtcctgttgggcctccaggatttaccggaccaccaggtcccccaggccctcccggccctccaggtgaaaagggacaaatgggcttaagttttcaaggaccaaaaggtgacaagggtgaccaaggggtcagtgggcctccaggagtaccaggacaagctcaagttcaagaaaaaggagacttcgccaccaagggagaaaagggccaaaaaggtgaacctggatttcaggggatgccaggggtcggagagaaaggtgaacccggaaaaccaggacccagaggcaaacccggaaaagatggtgacaaaggggaaaaagggagtcccggttttcctggtgaacccgggtacccaggactcataggccgccagggcccgcagggagaaaagggtgaagcaggtcctcctggcccacctggaattgttataggcacaggacctttgggagaaaaaggagagaggggctaccctggaactccggggccaagaggagagccaggcccaaaaggtttcccaggactaccaggccaacccggacctccaggcctccctgtacctgggcaggctggtgcccctggcttccctggtgaaagaggagaaaaaggtgaccgaggatttcctggtacatctctgccaggaccaagtggaagagatgggctcccgggtcctcctggttcccctgggccccctgggcagcctggctacacaaatggaattgtggaatgtcagcccggacctccaggtgaccagggtcctcctggaattccagggcagccaggatttataggcgaaattggagagaaaggtcaaaaaggagagagttgcctcatctgtgatatagacggatatcgggggcctcccgggccacagggacccccgggagaaataggtttcccagggcagccaggggccaagggcgacagaggtttgcctggcagagatggtgttgcaggagtgccaggccctcaaggtacaccagggctgataggccagccaggagccaagggggagcctggtgagttttatttcgacttgcggctcaaaggtgacaaaggagacccaggctttccaggacagcccggcatgccagggagagcgggttctcctggaagagatggccatccgggtcttcctggccccaagggctcgccgggttctgtaggattgaaaggagagcgtggcccccctggaggagttggattcccaggcagtcgtggtgacaccggcccccctgggcccccaggatatggtcctgctggtcccattggtgacaaaggacaagcaggctttcctggaggccctggatccccaggcctgccaggtccaaagggtgaaccaggaaaaattgttcctttaccaggcccccctggagcagaaggactgccggggtccccaggcttcccaggtccccaaggagaccgaggctttcccggaaccccaggaaggccaggcctgccaggagagaagggcgctgtgggccagccaggcattggatttccagggccccccggccccaaaggtgttgacggcttacctggagacatggggccaccagggactccaggtcgcccgggatttaatggcttacctgggaacccaggtgtgcagggccagaagggagagcctggagttggtctaccgggactcaaaggtttgccaggtcttcccggcattcctggcacacccggggagaaggggagcattggggtaccaggcgttcctggagaacatggagcgatcggaccccctgggcttcaggggatcagaggtgaaccgggacctcctggattgccaggctccgtggggtctccaggagttccaggaataggcccccctggagctaggggtccccctggaggacagggaccaccggggttgtcaggccctcctggaataaaaggagagaagggtttccccggattccctggactggacatgccgggccctaaaggagataaaggggctcaaggactccctggcataacgggacagtcggggctccctggccttcctggacagcagggggctcctgggattcctgggtttccaggttccaagggagaaatgggcgtcatggggacccccgggcagccgggctcaccaggaccagtgggtgctcctggattaccgggtgaaaaaggggaccatggctttccgggctcctcaggacccaggggagaccctggcttgaaaggtgataagggggatgtcggtctccctggcaagcctggctccatggataaggtggacatgggcagcatgaagggccagaaaggagaccaaggagagaaaggacaaattggaccaattggtgagaagggatcccgaggagaccctgggaccccaggagtgcctggaaaggacgggcaggcaggacagcctgggcagccaggacctaaaggtgatccaggtataagtggaaccccaggtgctccaggacttccgggaccaaaaggatctgttggtggaatgggcttgccaggaacacctggagagaaaggtgtgcctggcatccctggcccacaaggttcacctggcttacctggagacaaaggtgcaaaaggagagaaagggcaggcaggcccacctggcataggcatcccaggactgcgtggtgaaaagggagatcaagggatagcgggtttcccaggaagccctggagagaagggagaaaaaggaagcattgggatcccaggaatgccagggtccccaggccttaaagggtctcccgggagtgttggctatccaggaagtcctgggctacctggagaaaaaggtgacaaaggcctcccaggattggatggcatccctggtgtcaaaggagaagcaggtcttcctgggactcctggccccacaggcccagctggccagaaaggggagccaggcagtgatggaatcccggggtcagcaggagagaagggtgaaccaggtctaccaggaagaggattcccagggtttccaggggccaaaggagacaaaggttcaaagggtgaggtgggtttcccaggattagccgggagcccaggaattcctggatccaaaggagagcaaggattcatgggtcctccggggccccagggacagccggggttaccgggatccccaggccatgccacggaggggcccaaaggagaccgcggacctcagggccagcctggcctgccaggacttccgggacccatggggcctccagggcttcctgggattgatggagttaaaggtgacaaaggaaatccaggctggccaggagcacccggtgtcccagggcccaagggagaccctggattccagggcatgcctggtattggtggctctccaggaatcacaggctctaagggtgatatggggcctccaggagttccaggatttcaaggtccaaaaggtcttcctggcctccagggaattaaaggtgatcaaggcgatcacggcgtcccgggagctaaaggtctcccgggtcctcctggccccccaggtccttacgacatcatcaaaggggagcccgggctccctggtcctgagggccccccagggctgaaagggcttcagggactgccaggcccgaaaggccagcaaggtgttacaggattggtgggtatacctggacctccaggtattcctgggtttgacggtgcccctggccagaaaggagagatgggacctgccgggcctactggtccaagaggatttccaggtccaccaggccccgatgggttgccaggatccatggggcccccaggcaccccatctgttgatcacggcttccttgtgaccaggcatagtcaaacaatagatgacccacagtgtccttctgggaccaaaattctttaccacgggtactctttgctctacgtgcaaggcaatgaacgggcccatggccaggacttgggcacggctggcagctgcctgcgcaagttcagcacaatgcccttcctgttctgcaatattaacaacgtgtgcaactttgcatcacgaaatgactactcgtactggctgtccacccctgagcccatgcccatgtcaatggcacccatcacgggggaaaacataagaccatttattagtaggtgtgctgtgtgtgaggcgcctgccatggtgatggccgtgcacagccagaccattcagatcccaccgtgccccagcgggtggtcctcgctgtggatcggctactcttttgtgatgcacaccagcgctggtgcagaaggctctggccaagccctggcgtcccccggctcctgcctggaggagtttagaagtgcgccattcatcgagtgtcacggccgtgggacctgcaattactacgcaaacgcttacagcttttggctcgccaccatagagaggagcgagatgttcaagaagcctacgccgtccaccttgaaggcaggggagctgcgcacgcacgtcagccgctgccaagtctgtatgagaagaacataatgaagcctgactcagctaatgtcacaacatggtgctacttcttcttctttttgttaacagcaacgaaccctagaaatatatcctgtgtacctcactgtccaatatgaaaaccgtaaagtgccttataggaatttgcgtaactaacacaccctgcttcattgacctctacttgctgaaggagaaaaagacagcgataagctttcaatagtggcataccaaatggcacttttgatgaaataaaatatcaatattttctgcaatccaatgcactgatgtgtgaagtgagaactccatcagaaaaccaaagggtgctaggaggtgtgggtgccttccatactgtttgcccattttcattcttgtattataattaattttctacccccagagataaatgtttgtttatatcactgtctagctgtttcaaaatttaggtcccttggtctgtacaaataatagcaatgtaaaaatggttttttgaacctccaaatggaattacagactcagtagccatatcttccaaccccccagtataaatttctgtctttctgctatgtgtggtactttgcagctgcttttgcagaaatcacaattttcctgtggaataaagatggtccaaaaatagtcaaaaattaaatatatatatatattagtaatttatatagatgtcagcaattaggcagatcaaggtttagtttaacttccactgttaaaataaagcttacatagttttcttcctttgaaagactgtgctgtcctttaacataggtttttaaagactaggatattgaatgtgaaacatccgttttcattgttcacttctaaaccaaaaattatgtgttgccaaaaccaaacccaggttcatgaatatggtgtctattatagtgaaacatgtactttgagcttattgtttttattctgtattaaatattttcagggttttaaacactaatcacaaactgaatgacttgacttcaaaagcaacaaccttaaaggccgtcatttcattagtattcctcattctgcatcctggcttgaaaaacagctctgttgaatcacagtatcagtattttcacacgtaagcacattcgggccatttccgtggtttctcatgagctgtgttcacagacctcagcagggcatcgcatggaccgcaggagggcagattcggaccactaggcctgaaatgacatttcactaaaagtctccaaaacatttctaagactactaaggccttttatgtaatttctttaaatgtgtatttcttaagaattcaaatttgtaataaaactatttgtataaaaaaaaaaaaaaaaaaaaaaaaaaaaaaaaaaaaaaaaaaaaaaaaaaaaaaaaaaaaaaaaaaaaaaaaaaaaaaaaaaaaaaaaaaaaaaaa

SEQ ID NO: 4196 - DNA, 3280 bp, Homo sapiens; identical to SEQ ID NO: 746

SEQ ID NO: 4197 - DNA, 6774 bp, Homo sapiens
cggccccagaaaacccgagcgagtagggggcggcgcgcaggagggaggagaactgggggcgcgggaggctggtgggtgtggggggtggagatgtagaagatgtgacgccgcggcccggcgggtgccagattagcggacgcggtgcccgcggttgcaacgggatcccgggcgctgcagcttgggaggcggctctccccaggcggcgtccgcggagacacccatccgtgaaccccaggtcccgggccgccggctcgccgcgcaccaggggccggcggacagaagagcggccgagcggctcgaggctgggggaccgcgggcgcggccgcgcgctgccgggcgggaggctggggggccggggccggggccgtgccccggagcgggtcggaggccggggccggggccgggggacggcggctccccgcgcggctccagcggctcggggatcccggccgggccccgcagggaccatggcagccgggagcatcaccacgctgcccgccttgcccgaggatggcggcagcggcgccttcccgcccggccacttcaaggaccccaagcggctgtactgcaaaaacgggggcttcttcctgcgcatccaccccgacggccgagttgacggggtccgggagaagagcgaccctcacatcaagctacaacttcaagcagaagagagaggagttgtgtctatcaaaggagtgtgtgctaaccgttacctggctatgaaggaagatggaagattactggcttctaaatgtgttacggatgagtgtttcttttttgaacgattggaatctaataactacaatacttaccggtcaaggaaatacaccagttggtatgtggcactgaaacgaactgggcagtataaacttggatccaaaacaggacctgggcagaaagctatactttttcttccaatgtctgctaagagctgattttaatggccacatctaatctcatttcacatgaaagaagaagtatattttagaaatttgttaatgagagtaaaagaaaataaatgtgtatagctcagtttggataattggtcaaacaattttttatccagtagtaaaatatgtaaccattgtcccagtaaagaaaaataacaaaagttgtaaaatgtatattctcccttttatattgcatctgctgttacccagtgaagcttacctagagcaatgatctttttcacgcatttgctttattcgaaaagaggcttttaaaatgtgcatgtttagaaacaaaatttcttcatggaaatcatatacattagaaaatcacagtcagatgtttaatcaatccaaaatgtccactatttcttatgtcattcgttagtctacatgtttctaaacatataaatgtgaatttaatcaattcctttcatagttttataattctctggcagttccttatgatagagtttataaaacagtcctgtgtaaactgctggaagttcttccacagtcaggtcaattttgtcaaacccttctctgtacccatacagcagcagcctagcaactctgctggtgatgggagttgtattttcagtcttcgccaggtcattgagatccatccactcacatcttaagcattcttcctggcaaaaatttatggtgaatgaatatggctttaggcggcagatgatatacatatctgacttcccaaaagctccaggatttgtgtgctgttgccgaatactcaggacggacctgaattctgattttataccagtctcttcaaaaacttctcgaaccgctgtgtctcctacgtaaaaaaagagatgtacaaatcaataataattacacttttagaaactgtatcatcaaagattttcagttaaagtagcattatgtaaaggctcaaaacattaccctaacaaagtaaagttttcaatacaaattctttgccttgtggatatcaagaaatcccaaaatattttcttaccactgtaaattcaagaagcttttgaaatgctgaatatttctttggctgctacttggaggcttatctacctgtacatttttggggtcagctctttttaacttcttgctgctctttttcccaaaaggtaaaaatatagattgaaaagttaaaacattttgcatggctgcagttcctttgtttcttgagataagattccaaagaacttagattcatttcttcaacaccgaaatgctggaggtgtttgatcagttttcaagaaacttggaatataaataattttataattcaacaaaggttttcacattttataaggttgatttttcaattaaatgcaaatttgtgtggcaggatttttattgccattaacatatttttgtggctgctttttctacacatccagatggtccctctaactgggctttctctaattttgtgatgttctgtcattgtctcccaaagtatttaggagaagccctttaaaaagctgccttcctctaccactttgctggaaagcttcacaattgtcacagacaaagatttttgttccaatactcgttttgcctctatttttcttgtttgtcaaatagtaaatgatatttgcccttgcagtaattctactggtgaaaaacatgcaaagaagaggaagtcacagaaacatgtctcaattcccatgtgctgtgactgtagactgtcttaccatagactgtcttacccatcccctggatatgctcttgttttttccctctaatagctatggaaagatgcatagaaagagtataatgttttaaaacataaggcattcgtctgccatttttcaattacatgctgacttcccttacaattgagatttgcccataggttaaacatggttagaaacaactgaaagcataaaagaaaaatctaggccgggtgcagtggctcatgcctatattccctgcactttgggaggccaaagcaggaggatcgcttgagcccaggagttcaagaccaacctggtgaaaccccgtctctacaaaaaaacacaaaaaatagccaggcatggtggcgtgtacatgtggtctcagatacttgggaggctgaggtgggagggttgatcacttgaggctgagaggtcaaggttgcagtgagccataatcgtgccactgcagtccagcctaggcaacagagtgagactttgtctcaaaaaaagagaaattttccttaataagaaaagtaatttttactctgatgtgcaatacatttgttattaaatttattatttaagatggtagcactagtcttaaattgtataaaatatcccctaacatgtttaaatgtccatttttattcattatgctttgaaaaataattatggggaaatacatgtttgttattaaatttattattaaagatagtagcactagtcttaaatttgatataacatctcctaacttgtttaaatgtccatttttattctttatgtttgaaaataaattatggggatcctatttagctcttagtaccactaatcaaaagttcggcatgtagctcatgatctatgctgtttctatgtcgtggaagcaccggatgggggtagtgagcaaatctgccctgctcagcagtcaccatagcagctgactgaaaatcagcactgcctgagtagttttgatcagtttaacttgaatcactaactgactgaaaattgaatgggcaaataagtgcttttgtctccagagtatgcgggagacccttccacctcaagatggatatttcttccccaaggatttcaagatgaattgaaatttttaatcaagatagtgtgctttattctgttgtattttttattattttaatatactgtaagccaaactgaaataacatttgctgttttataggtttgaagaacataggaaaaactaagaggttttgtttttatttttgctgatgaagagatatgtttaaatatgttgtattgttttgtttagttacaggacaataatgaaatggagtttatatttgttatttctattttgttatatttaataatagaattagattgaaataaaatataatgggaaataatctgcagaatgtgggttttcctggtgtttccctctgactctagtgcactgatgatctctgataaggctcagctgctttatagttctctggctaatgcagcagatactcttcctgccagtggtaatacgattttttaagaaggcagtttgtcaattttaatcttgtggatacctttatactcttagggtattattttatacaaaagccttgaggattgcattctattttctatatgaccctcttgatatttaaaaaacactatggataacaattcttcatttacctagtattatgaaagaatgaaggagttcaaacaaatgtgtttcccagttaactagggtttactgtttgagccaatataaatgtttaactgtttgtgatggcagtattcctaaagtacattgcatgttttcctaaatacagagtttaaataatttcagtaattcttagatgattcagcttcatcattaagaatatcttttgttttatgttgagttagaaatgccttcatatagacatagtctttcagacctctactgtcagttttcatttctagctgctttcagggttttatgaattttcaggcaaagctttaatttatactaagcttaggaagtatggctaatgccaacggcagtttttttcttcttaattccacatgactgaggcatatatgatctctgggtaggtgagttgttgtgacaaccacaagcactttttttttttttaaagaaaaaaaggtagtgaatttttaatcatctggactttaagaaggattctggagtatacttaggcctgaaattatatatatttggcttggaaatgtgtttttcttcaattacatctacaagtaagtacagctgaaattcagaggacccataagagttcacatgaaaaaaatcaatttatttgaaaaggcaagatgcaggagagaggaagccttgcaaacctgcagactgctttttgcccaatatagattgggtaaggctgcaaaacataagcttaattagctcacatgctctgctctcacgtggcaccagtggatagtgtgagagaattaggctgtagaacaaatggccttctctttcagcattcacaccactacaaaatcatcttttatatcaacagaagaataagcataaactaagcaaaaggtcaataagtacctgaaaccaagattggctagagatatatcttaatgcaatccattttctgatggattgttacgagttggctatataatgtatgtatggtattttgatttgtgtaaaagttttaaaaatcaagctttaagtacatggacatttttaaataaaatatttaaagacaatttagaaaattgccttaatatcattgttggctaaatagaataggggacatgcatattaaggaaaaggtcatggagaaataatattggtatcaaacaaatacattgatttgtcatgatacacattgaatttgatccaatagtttaaggaataggtaggaaaatttggtttctatttttcgatttcctgtaaatcagtgacataaataattcttagcttattttatatttccttgtcttaaatactgagctcagtaagttgtgttaggggattatttctcagttgagactttcttatatgacattttactatgttttgacttcctgactattaaaaataaatagtagatacaattttcataaagtgaagaattatataatcactgctttataactgactttattatatttatttcaaagttcatttaaaggctactattcatcctctgtgatggaatggtcaggaatttgttttctcatagtttaattccaacaacaatattagtcgtatccaaaataacctttaatgctaaactttactgatgtatatccaaagcttctcattttcagacagattaatccagaagcagtcataaacagaagaataggtggtatgttcctaatgatattatttctactaatggaataaactgtaatattagaaattatgctgctaattatatcagctctgaggtaatttctgaaatgttcagactcagtcggaacaaattggaaaatttaaatttttattcttagctataaagcaagaaagtaaacacattaatttcctcaacatttttaagccaattaaaaatataaaagatacacaccaatatcttcttcaggctctgacaggcctcctggaaacttccacatatttttcaactgcagtataaagtcagaaaataaagttaacataactttcactaacacacacatatgtagatttcacaaaatccacctataattggtcaaagtggttgagaatatattttttagtaattgcatgcaaaatttttctagcttccatcctttctccctcgtttcttctttttttgggggagctggtaactgatgaaatcttttcccaccttttctcttcaggaaatataagtggttttgtttggttaacgtgatacattctgtatgaatgaaacattggagggaaacatctactgaatttctgtaatttaaaatattttgctgctagttaactatgaacagatagaagaatcttacagatgctgctataaataagtagaaaatataaatttcatcactaaaatatgctattttaaaatctatttcctatattgtatttctaatcagatgtattactcttattatttctattgtatgtgttaatgattttatgtaaaaatgtaattgcttttcatgagtagtatgaataaaattgattagtttgtgttttcttgtctccc

SEQ ID NO: 4198 - DNA, 7416 bp, Homo sapiens
ggcggtgtccaggcttccgggcgggtagtccttcggctccggagccgcgactgcgctcgcctaggtggtgggcggggagggaaggaagggagcgggcgcaaggcggcggcggcggctgcgggtgaggaacttgttgcgcccgcggctgcgcggtgcccctccctccgctccagttcgtcggggcgggcgcggcggcggcggcgaaggaggagcgcggccggggcgatgcggcgctacctgcgcgtcgtggtgctgtgtgtggcctgcggcttctgctcgctcctttacgctttcagccagctcgccgtgtccctggaagaaggaacgggcggcggtggcgggaagccgcaggccgcggtggcttcctggctcgcgggcggcggacgcggcgccgtgagaggcgccggcgtcgcgggccccgcagcgcatcccggcgtgtcggacaggtacagtctgaaaatacagcctgttgagaaaatgcatctagctgtagttgcctgtggtgaaagactggaagaaactatgaccatgttgaagtcagctatcattttcagcatcaaacctcttcaattccatatttttgctgaagatcagctacatcatagctttaaaggcagacttgacaactggtcatttctacaaacatttaattatacgttataccccataacctttccaagtgagaatgcagcagagtggaaaaaactctttaaaccatgtgcttcgcagagattgttcttgccgttaatcctgaaagaagttgactcactattgtatgtcgacactgatatcctttttttacgaccagttgatgatatttggtctttactaaagaaatttaattccacacaaattgctgcaatggcaccagaacatgaggaacctcgaataggatggtataatcgctttgctaggcatccatattatggaaaaactggagtaaactctggagttatgttgatgaacatgactcgaatgagaaggaagtatttcaagaatgatatgacaactgtacgactacaatggggagatatacttatgccattgcttaaaaaatacaaactaaacatcacatggggtgatcaagatctattgaatatcgtgttttttcataatccagaaagcctttttgtttttccgtgtcaatggaattatcgaccagatcattgtatatatggaagcaattgccaagaagcagaagaaggaggaatctttattcttcatgggaacagaggtgtttaccatgacgataagcaaccagcatttagagctgtttatgaagcactgagaaattgttcttttgaagatgacaacatccgttccttattaaaacctttagaactggaactacaaaaaacagtgcatacatactgtggaaaaatttacaaaatatttatcaaacaactagcaaaaagtgtaagagatcgttatgccagatcaccaaaggaaaagtgattcttggtgactgcttaatcaaatggatgaaaacaaagaatcagaagataagtgtgaaggaatcgtcttggatgaagtattcaggaaggaattactcatctccagaataattttttttttcctaaagaagttaagtaagcagtattttcaggtaatgaagaataagttaaaatcttgggcctcaacattgaacattttttatctctgatgttttgtaatgttacttgctatcattccagtattgatgaaaatactattgaatgggtttaacctgcagacttctgttgactcatactctcaagagtggtaggggtgtgtagatggagaaaatgtacctcaaacagtgccaacactcaagactgtgagtagagcaataattttatgtcagcactaacctcactttaaaagtgtgagaaaaaagtttgtttacaggagcagaaacaggtctgttgtttctgaagaaatgtgatgtaactgatgtaaccattgacaatctatgtgtgcctttatacatttcatctctgttttaaaatatttttatgacaatcatgtttaaaattatttttagattacaagtaagctgcatgttaaaaattgagctgtgtaaggtagaggaaaaatagtgaaaactttgggattttaatctgtgtgtgcgtgtttgtgtgtgagagagagtgagaaatgtagtgtttcattttgtatgcattaaactgtcttgccaaaactcagatctaagattgttaaatagatatttggggaatttttttttaatcactttaaatgaaaaacgtcagctttactgggcattctggaagcaaaatatattatgctgatggtaaagtgagaaccttaagagtatactcatgatggtggaaagtgtgatggaccaaaatgcataagctatatacttcctgtgagtagtaattttagttacaatggagtagaaaaatatggtccatttaaacttgtcttctacctcataacggccttgcaagatacttttgaagaagcaaatgtctagagccttactttaagtaagttaaacaacttaagtggatgatttggaataagattgttacatccagctgtagaaaatgtggttttaattgggttgatgtgcatttttgaatatcacctaagacagttaatttttttaaatcttgagaaattacttctttggcattcttgacctgttagctaatataactatagattctgaatacttagcatatactatgctggggcacatatcttattttaccaacaatatgattatctatatggttatcttctttttctccctgatattttaatgctcaagtagaaaatggaaaatcatgaaggaaaaatacaacctgtgaaaattgtggcagttagctttgtgaagacacagtgacctctgtggagacatggaatatgcagaaagagatggttagtacagttgttctgtcgtctgcagttcagtcagggacaaattgagagaggaaagtttaagcagggtgcattagaagttgataaccagtccagcattcttagaacagatgggtttagagaacacgagttgtagttccttggcagaatgccatggtgaatataagaaactgtgaaattgagcttactgagtagaaaatgagaatactaaaaatgtgaagtttggagggtatgtattagatcatttctaatggtcctcaaataatgatcattgcctgcctgactatgtaagattcttgttgggagcttaagaatagattcctgagctaggcctttggagactctggcatgctgtgtctaggagggagtctgtaaaacaatttttaatgaagaaatttaaaaattacacaaaactagaatagtgcattggtactcaacatccagatctgacacttatcactatcttaccatgtttgcttcatttgtcatttttttgtttgcttaagtatcttaaaatcccatacattgtgttatttcactgctgtgaacactttgggtagataccacgatatcacacctaacagaggcagcagcagtccttcggcttcatctcatagccagtccttaagcaaatttccctgattatctcaaaaatcatcttctagttggtttgttagaatcaacagaatataagtcacatgatgatttcgtttttaacaatcacctcagatgactttgatgttagctactttgagaaccactggaaattattttgccaacttgaaagttcaagttaggataccacaattcttggcacgtttggtggattataaatgtgattttgaaatattagaggaagcatttggggttaatgacaggatatgaatttatattagtaagtttgataagataaaatttcctcagtgaacggagaatctcagccccatgggctctaattgattgggacttgtgtagagcgtggtcacagtttaatccaactggactgtatgctgtggtctcactcatgttgtggcttatttacactgtcacacacactacattgtggatcagttggaaggttcttcatctggtttatttagacctgacctaattgatcattttaccataaattgaattatagtgaaaactgtcttttgggtactgtttctacctaaaattaaaggtatcacaaaatatgtataataatttttaaatgaattttctgaatttatctttagacaaggtaattcttttgaattctaaagaaatgcagttcttggagttgatgagaggttaaattatagatggacaacttagagaacgtattccatcttcatataaatggtctttcataaaacatagtgtatctatgcagtttatataaactacatgatttattatttgagtctatgtattctgacctcagaactatctctgggctacagtattaccaaagtgggatgcctttaaaatgcagtcaaacttcatttgtatgaagtagaaaagaacttgggaaacctttaaaaatatatattgtgatttatgctttaagaaaatgcatacttttttctaatgaagagtagttcataatatataagggttttaaggccctgaaataacattagtgcttactcattgctctctcatcttgcctccagtcagatgttattggtatagtgaaaagaagaccagattttgaactagatctggattctctttttagtaactcaggcatgttatttacccttctctgtgccttaggtttttaagtacaatcagtgtacccttcaaacctcacaagatgaaactcagaagagataatggatttggaagcattttgcgtggcttatattatgccacgccagtgttactgttgaagttctgttttgttcgttgttttctgtacagagcgttcagtttactcaggctgaatgttttctgacatatatctccagtatgaatttgtttatgtaaggaagagtttttcaggaagagaaagtagagaagaaaagaatgatgtaactaaatcaaaaaagaaggaaaagagaggaagtgagaaaaggggtgaggaaagagaaaggagtaagaatggggatggcaaagggcagagtaagagaaaagatggaatgagtgtatggaaaattgagaagtagagatggagagaaatggtgtggaaacatttactttttgagttgtagccctcacactacatcagtttgcttgcctgggctctctggggtcaggaaaggtgctgacttccatggaatggggcagcagggcctgctgtatttggtttgttagtactagagttgtttcccaatcaccctactcactgatcatttagtgccaattcaacattttatgtcttttttttttagtggatcccagtttgtgagctaggacctgtggaaatacaagtatcttcctttttaactttattgttttagccatcccaagtgttagactgcaagactaactacatattccccagtggaggttggaagtggaggggactgcttcattaggtctgaagggggccaaggaatgtgttgcagcagttttcgcagatgatactgacgagaggccaggtttgggaatcactgccctgccttggatggcaaattaagcaataaattacacctatttattcctcagttgggatactttcagttgaaccattctgagtagatttaagagaacaaaagacagcagaaataccttaaaagatattattggctgtcttatttttcagatatttgtatttaataaataccttagtagtagtcagaacctctttgagatgtttttagaaagaccactgatttgttttttaaaataatttttttggttccttagagtagagaagaaaagtaggggtgcaatatgtcaggtgtggggccagttatccatttattaaatgcaatttcaagtgtcttaaaaacaataattgccttattgcattttaatatttaataaagtagattaaataaagatttgtattataacagttattcttttatccattgccaaagcaacccttttttgcctattaaaatctggctaaactgttctgatgttgtttcttaattcattaaacatgaaactaggttttacaaactaaattatataaagacagaagtctaaaaatggtaccagaaaatttttttttaaaaaattaatgtgttattcaaatatccagcaattaaagactcatgagaaaaacagaatagcatattagatgtaacagtttaaaatggattgcaaatcaatgtcagacttaaatagaaaatatttattatcacctcatttctaccaataatttcagatgtttaatgggactttgaaaagataggaaaaaatagaaatgaaaatttatctcacctttaatactgtgaatactatttggagggtccctggtcagacatttaaatatcaaacttaagaactgacatggagcctttgattagtttatatacaggatctgaatatttacacacatagcacactatagcaacctcttgtaaaaaatcatgaagatagaattcaacagtgtatattctattaaaaagtaaattggctgggtgtggtggctcatgcatgtaatcccagcactttgggaggccgaggcaggaggatcgcttgagcccaagagtttgagaccagcctaggtgacaaagtgagaccccatctctacaaaaaaattaaaaaattatccagatgtggtggtgtttgcctgcggtcctagctacacaggaagttgaggcaggaggattgcttgagtgcaagagtttgaggctgcagagagccaagattgcaccattgcactccagcctgggtgacagagcgagaccctgtctcaaaaaataaaggaaattggctttgactatgaaaaacagccattttcaacctttttataaaacctcttcagggaatattggaatattatttttgtcaggcaaaaataatccagggcttgagcattgctgtagaatatgttatctgttcaaaacttagcagagcacgcatgcatcacatgcattgtcatcagtatttgagagctgaaccaatggtttttgatggttgccgtaacagaagatctgtgaagaggatggtggtttgcacctgttcctgaagtcaaactggaaaaggttgcaggtatttcaattttctcaatcattttgcataaatgtattaatattttgagtagtaatagttctaaacctgcaggaaggcatcattgtatactgtggtatgtagagaatactactcttacactgctctttatcttaaaatgttttggtatactgtgaatattttcctctaagtatttggtgtattttgacagttattaaaggagaatataaaattaaagattctggtctaaactaagaataatggaaagttgcttcgtcctgccttagaggagttttcagttcatcctcttcttgagaaactatgtgttgctgttactaaataaacatttactcaataaacgttttatttcctcaaaaaaaaaaaaaaaaaaaaaaa

SEQ ID NO: 4199 - DNA, 7509 bp, Homo sapiens; identical to SEQ ID NO: 1954

SEQ ID NO: 4200 - DNA, 3744 bp, Homo sapiens; identical to SEQ ID NO: 2516

SEQ ID NO: 4201 - DNA, 6741 bp, Homo sapiens; identical to SEQ ID NO: 1442

SEQ ID NO: 4202 - DNA, 3555 bp, Homo sapiens
tttcagccaaccagactggagcagctgcgagtgctacatcttggctgtctgaagcgattggctcctctctggggagtggagggtgttcagttattaatgaccgctgagcaggcagcaccatgtcagtgtgacaactgatcgggtgaacgatgcaccactaaccaccatggaaacaaggaaaaataaagccagctcacaggatctctcttcactggattgagagcctcagcctgccgactgagaaaaagagttccaggaaaaagaaggaatcccggctgcagcctcctgccttcctttatattttaaaatagagagataagattgcgtgcatgtgtgcatatctatagtatatattttgtacactttgttacacagacacacaaatgcacctatttataccgggcaagaacacaaccatgtgattatctcaaccaaggaactgaggaatccagcacgcaaggacatcggaggtgggctagcactgaaactgcttttcaagcatcatgctgctattcctgcaaatactgaagaagcatgggatttaaatattttacttctaaataaatgaattactcaatctcctatgaccatctatacatactccaccttcaaaaagtacatcaatattatatcattaaggaaatagtaaccttctcttctccaatatgcatgacatttttggacaatgcaattgtggcactggcacttatttcagtgaagaaaaactttgtggttctatggcattcatcatttgacaaatgcaagcatcttccttatcaatcagctcctattgaacttactagcactgactgtggaatccttaagggcccattacatttctgaagaagaaagctaagatgaaggacatgccactccgaattcatgtgctacttggcctagctatcactacactagtacaagctgtagataaaaaagtggattgtccacggttatgtacgtgtgaaatcaggccttggtttacacccagatccatttatatggaagcatctacagtggattgtaatgatttaggtcttttaactttcccagccagattgccagctaacacacagattcttctcctacagactaacaatattgcaaaaattgaatactccacagactttccagtaaaccttactggcctggatttatctcaaaacaatttatcttcagtcaccaatattaatgtaaaaaagatgcctcagctcctttctgtgtacctagaggaaaacaaacttactgaactgcctgaaaaatgtctgtccgaactgagcaacttacaagaactctatattaatcacaacttgctttctacaatttcacctggagcctttattggcctacataatcttcttcgacttcatctcaattcaaatagattgcagatgatcaacagtaagtggtttgatgctcttccaaatctagagattctgatgattggggaaaatccaattatcagaatcaaagacatgaactttaagcctcttatcaatcttcgcagcctggttatagctggtataaacctcacagaaataccagataacgccttggttggactggaaaacttagaaagcatctctttttacgataacaggcttattaaagtaccccatgttgctcttcaaaaagttgtaaatctcaaatttttggatctaaataaaaatcctattaatagaatacgaaggggtgattttagcaatatgctacacttaaaagagttggggataaataatatgcctgagctgatttccatcgatagtcttgctgtggataacctgccagatttaagaaaaatagaagctactaacaaccctagattgtcttacattcaccccaatgcatttttcagactccccaagctggaatcactcatgctgaacagcaatgctctcagtgccctgtaccatggtaccattgagtctctgccaaacctcaaggaaatcagcatacacagtaaccccatcaggtgtgactgtgtcatccgttggatgaacatgaacaaaaccaacattcgattcatggagccagattcactgttttgcgtggacccacctgaattccaaggtcagaatgttcggcaagtgcatttcagggacatgatggaaatttgtctccctcttatagctcctgagagctttccttctaatctaaatgtagaagctgggagctatgtttcctttcactgtagagctactgcagaaccacagcctgaaatctactggataacaccttctggtcaaaaactcttgcctaataccctgacagacaagttctatgtccattctgagggaacactagatataaatggcgtaactcccaaagaagggggtttatatacttgtatagcaactaacctagttggcgctgacttgaagtctgttatgatcaaagtggatggatcttttccacaagataacaatggctctttgaatattaaaataagagatattcaggccaattcagttttggtgtcctggaaagcaagttctaaaattctcaaatctagtgttaaatggacagcctttgtcaagactgaaaattctcatgctgcgcaaagtgctcgaataccatctgatgtcaaggtatataatcttactcatctgaatccatcaactgagtataaaatttgtattgatattcccaccatctatcagaaaaacagaaaaaaatgtgtaaatgtcaccaccaaaggtttgcaccctgatcaaaaagagtatgaaaagaataataccacaacacttatggcctgtcttggaggccttctggggattattggtgtgatatgtcttatcagctgcctctctccagaaatgaactgtgatggtggacacagctatgtgaggaattacttacagaaaccaacctttgcattaggtgagctttatcctcctctgataaatctctgggaagcaggaaaagaaaaaagtacatcactgaaagtaaaagcaactgttataggtttaccaacaaatatgtcctaaaaaccaccaaggaaacctactccaaaaatgaacaaaaaaaaaaaaagcgaaagactgcagttgtgctaaaaacaaaacaaaacaaacaaacaaacaaaaaagtaaaaaaagattactttcgagagagaagtttaagcttcaccaatgctgctcctgaccaatggaaatatgtacaacttcagcattttaagtaactggcttcaaggggtactgtggcaaccaaataaaataactccattttctaaaactttcatgtaacttttatgtctggactacagttcaagtggacaaaaacatttctgtattttttttaagtaaataagagtagttgaactgagcaatacctcctcctgtgttgtattacacatattagccacgagtttttgcagtgaccagataaacttgaattgacacgtggtgtaataaaatggacaaattctgtagagtagacacagtgagtatgtggacctcttttataaggaaaaatacattttggattaaaatcaattgcttctgtcttgttttgtttctaaataaagaataatttctgggaaaaaaaaaaaaaaaaaaa

SEQ ID NO: 4203 - DNA, 3612 bp, Homo sapiens; identical to SEQ ID NO: 3477

SEQ ID NO: 4204 - DNA, 3498 bp, Homo sapiens
gacaacctcagaatagaattgaataaatcaagtttatcattaaaacgcaaagaaaaaaaaactctccaaacgttgctgatcttctgttttaaactactgttagactggtgagctggagagccgggggaatccaccaaagatttttggatgaaaattaatcatcccttgtccaccgtagtcgcaccccaatgcccctcagatccagtccttcgaaggagtgtccaagaggtataaagcaaaaccggaaaaacagttcccaaattctggagtttgttttctctcattaaaaatataaatatcaggctaacacctattgacacacaataacagggacacagaatccctcccggaagacccatgggcccacggaccccgcggatgccacagtggttgacgaggttaagtaactgggttcagggtgtctgggcatacctgtgcgtgagactctgtctccgctgctcccctcatctccactgctcccctcgtctccccacgatcctcccttttccttgggccgctgatggctctccgactcacgaagagtctccctggcccctgcagctctctccttcccatacctttacttcttgatcctcactccatagtgagatgtggcctaaggtaggggaaagtccagcacgagaatccgtctgatggcctttggattactcaggggtgtgcccggagactagatgaaagtagcaaaggctttatttagttcccagtactccaaactgcagcaaaccaccggaaacacccccactttcaaagacaggctttgagcagaggaaatgtaatttcaagattagatccagcacagagaatattccagaggtggcaggtttagcttccagccaccacgactcaaggcccctaaatgctgtacagcctgtgtagtacaataactttgttggctagaaatgtaatagcccttcaagcatgaacttggagcatgaagggtaagaaggcctgctttggccgggagttgaacccaggtctcccgcgtaggtggggagaatgccaccgctgaactaccaatgctccactgagtgcggtttcactagatctaattttgaagagtctctggaaggactttgaagcagtgtttctaaaatagatttgtataggactcttgagtagacacaccgagcaaacagaaaggacacccagagcaaagccttgcataggagacgtatgtcaggcaacattatcaagttatttataatggcatttaaatcaacataccagatttgaaagagcctaattgtgaaacaggctctatacaactagataacagacctctatggaaatacacaggaaattcatccaggcctttgtctctggtcccagatctggcaaaaacctctggaaatttcatttcctcactgatgatgtaatctttttgccaacccatgccttggtgtttcccaaactctttcctctcaaccttgagacaatcacaaattctttccctaaacaggctttcaaagacccaggagctggagatttagggatgtgtccaggttaccctggaagatctgtgggatgatggagcttctcttcctctacacctcttttgagtcatgtgaaaaagccaagtatcttgcttctaaattcatatgtttttgagaaacctacaaagagatctgcacaagagagaaagtgaaaatttcactccaagatttcttcccttggcaaacaacagaaggtttaggacaagccttttctctaagtgcctgttgctttgttagctctgttttccaaagacatctgtgttgtggatctggtcagaaagagtgggaattcagtgactttactagttctggatggggattcctatgagaaagcagtgaaaacacgggtggacttgaaagagttgggtcaaagtcagaaggagcaaggtttgagtgataatatactttcccctgtgatgaatggaggtgtgcaaacttggacccagccccggctctgctatctcgtgaaggagggaggcagccatggcttctctctgaaaactgtccaaggtaaaaagggggtatacatgactgatattacacctcaaggtgtggctatgagagctggagttctggctgatgatcacttgattgaagtgaatggagagaatgtagaggatgccagccatgaggaagtggttgaaaaggtgaagaagtcaggaagccgtgtcatgttcctgctggtggacaaagaaactgacaagcgtcatgttgagcagaagatacaattcaaaagagaaacagccagtttgaaactgttaccccaccagccccgaattgtggagatgaagaaaggaagcaatggctatggtttctatctgagggcaggctcagaacagaaaggtcaaatcatcaaggacatagattctggaagtccagcagaggaggctggcttgaagaacaatgatctggtagttgctgtcaacggcgagtctgtggaaaccctggatcatgacagtgtggtagaaatgattagaaagggtggagatcagacttcactgttggtggtagacaaagagacggacaacatgtacagactggctcatttttctccatttctctactatcaaagtcaagaactgcccaatggctctgtcaaggaggctccagctcctactcccacttctctggaagtctcaagtccaccagatactacagaggaagaagatcataagcctaaactctgcaggctggctaaaggtacagaagggcggtcctgctgacttggctgggctagaggatgaggatgtcatcattgaagtgaatggggtgaatgtgctagatgaaccctatgagaaggtggtggatagaatccagagcagtgggaagaatgtcacacttctagtctgtggaaagaaggcctatgattatttccaagctaagaaaatccctattgtttcctccctggctgatccacttgacacccctccagattctaaagaaggaatagtggtggagtcaaagcatgactcgcacatggcaaaagaacgggcccacagtacagcctcacattcttcttccaattctgaagatacagagatgtgatgaaaacaagtaatagctttggctgtttatttgatagctgtttctgggtatttaataggaatcctttctcaaagaatgagttgcgacctgtttactgtctctttagaagaaaaactccactggaaaccattcaccatgtgtgattgtcttctgttatcatttgtcttacaggcggctattgcagacggctaatttatgcttaacttaggaagagataaggcaagagctagatttttttcatgtgatcttttccaagcttcaacttaactacatttctctgtatgatgatgtctcttacttctacaggttccttgagcaccaaagatgattcataactctgtataggtgacagctgcttataaaagcatcttagcagataagcctattaaaattgtgcttttgtaacaatgttgtggttgctagaataaataccattaac

SEQ ID NO: 4205 - DNA, 3637 bp, Homo sapiens
tttcagccaaccagactggagcagctgcgagtgctacatcttggctgtctgaagcgattggctcctctctggggagtggagggtgttcagttattaatgaccgctgagcaggcagcaccatgtcagtgtgacaactgatcgggtgaacgatgcaccactaaccaccatggaaacaaggaaaaataaagccagctcacaggatctctcttcactggattgagagcctcagcctgccgactgagaaaaagagttccaggaaaaagaaggaatcccggctgcagcctcctgccttcctttatattttaaaatagagagataagattgcgtgcatgtgtgcatatctatagtatatattttgtacactttgttacacagacacacaaatgcacctatttataccgggcaagaacacaaccatgtgattatctcaaccaaggaactgaggaatccagcacgcaaggacatcggaggtgggctagcactgaaactgcttttcaagacgaggaagaggaggagaaagagaaagaagaggaagatgttgggcaacatttatttaacatgctccacagcccggaccctggcatcatgctgctattcctgcaaatactgaagaagcatgggatttaaatattttacttctaaataaatgaattactcaatctcctatgaccatctatacatactccaccttcaaaaagtacatcaatattatatcattaaggaaatagtaaccttctcttctccaatatgcatgacatttttggacaatgcaattgtggcactggcacttatttcagtgaagaaaaactttgtggttctatggcattcatcatttgacaaatgcaagcatcttccttatcaatcagctcctattgaacttactagcactgactgtggaatccttaagggcccattacatttctgaagaagaaagctaagatgaaggacatgccactccgaattcatgtgctacttggcctagctatcactacactagtacaagctgtagataaaaaagtggattgtccacggttatgtacgtgtgaaatcaggccttggtttacacccagatccatttatatggaagcatctacagtggattgtaatgatttaggtcttttaactttcccagccagattgccagctaacacacagattcttctcctacagactaacaatattgcaaaaattgaatactccacagactttccagtaaaccttactggcctggatttatctcaaaacaatttatcttcagtcaccaatattaatgtaaaaaagatgcctcagctcctttctgtgtacctagaggaaaacaaacttactgaactgcctgaaaaatgtctgtccgaactgagcaacttacaagaactctatattaatcacaacttgctttctacaatttcacctggagcctttattggcctacataatcttcttcgacttcatctcaattcaaatagattgcagatgatcaacagtaagtggtttgatgctcttccaaatctagagattctgatgattggggaaaatccaattatcagaatcaaagacatgaactttaagcctcttatcaatcttcgcagcctggttatagctggtataaacctcacagaaataccagataacgccttggttggactggaaaacttagaaagcatctctttttacgataacaggcttattaaagtaccccatgttgctcttcaaaaagttgtaaatctcaaatttttggatctaaataaaaatcctattaatagaatacgaaggggtgattttagcaatatgctacacttaaaagagttggggataaataatatgcctgagctgatttccatcgatagtcttgctgtggataacctgccagatttaagaaaaatagaagctactaacaaccctagattgtcttacattcaccccaatgcatttttcagactccccaagctggaatcactcatgctgaacagcaatgctctcagtgccctgtaccatggtaccattgagtctctgccaaacctcaaggaaatcagcatacacagtaaccccatcaggtgtgactgtgtcatccgttggatgaacatgaacaaaaccaacattcgattcatggagccagattcactgttttgcgtggacccacctgaattccaaggtcagaatgttcggcaagtgcatttcagggacatgatggaaatttgtctccctcttatagctcctgagagctttccttctaatctaaatgtagaagctgggagctatgtttcctttcactgtagagctactgcagaaccacagcctgaaatctactggataacaccttctggtcaaaaactcttgcctaataccctgacagacaagttctatgtccattctgagggaacactagatataaatggcgtaactcccaaagaagggggtttatatacttgtatagcaactaacctagttggcgctgacttgaagtctgttatgatcaaagtggatggatcttttccacaagataacaatggctctttgaatattaaaataagagatattcaggccaattcagttttggtgtcctggaaagcaagttctaaaattctcaaatctagtgttaaatggacagcctttgtcaagactgaaaattctcatgctgcgcaaagtgctcgaataccatctgatgtcaaggtatataatcttactcatctgaatccatcaactgagtataaaatttgtattgatattcccaccatctatcagaaaaacagaaaaaaatgtgtaaatgtcaccaccaaaggtttgcaccctgatcaaaaagagtatgaaaagaataataccacaacacttatggcctgtcttggaggccttctggggattattggtgtgatatgtcttatcagctgcctctctccagaaatgaactgtgatggtggacacagctatgtgaggaattacttacagaaaccaacctttgcattaggtgagctttatcctcctctgataaatctctgggaagcaggaaaagaaaaaagtacatcactgaaagtaaaagcaactgttataggtttaccaacaaatatgtcctaaaaaccaccaaggaaacctactccaaaaatgaacaaaaaaaaaaaaagcgaaagactgcagttgtgctaaaaacaaaacaaaacaaacaaacaaacaaaaaagtaaaaaaagattactttcgagagagaagtttaagcttcaccaatgctgctcctgaccaatggaaatatgtacaacttcagcattttaagtaactggcttcaaggggtactgtggcaaccaaataaaataactccattttctaaaactttcatgtaacttttatgtctggactacagttcaagtggacaaaaacatttctgtattttttttaagtaaataagagtagttgaactgagcaatacctcctcctgtgttgtattacacatattagccacgagtttttgcagtgaccagataaacttgaattgacacgtggtgtaataaaatggacaaattctgtagagtagacacagtgagtatgtggacctcttttataaggaaaaatacattttggattaaaatcaattgcttctgtcttgttttgtttctaaataaagaataatttctgggaaaaaaaaaaaaaaaaaaa

SEQ ID NO: 4206 - DNA, 2098 bp, Homo sapiens; identical to SEQ ID NO: 394

SEQ ID NO: 4207 - DNA, 5656 bp, Homo sapiens; identical to SEQ ID NO: 1719

SEQ ID NO: 4208 - DNA, 4057 bp, Homo sapiens; identical to SEQ ID NO: 534

SEQ ID NO: 4209 - DNA, 3519 bp, Homo sapiens
ttttcatttgtgcctgtgattggctcagctctgcgtgtgaagagggaaaaggcttccgtttatttagcataatgatggaccaaaacaaaagaagaaatcatttcactcatgcttaggtaatatatgctttaaacactaaaaatgatgagcatgaatctgcaattcaagccctcaaagatgctcatgaagaagaaattcaacaaattcttgctgaaacaagagaaaaaatattgcagtataaaagcaaagtaacagaggagctagaccttagaagaaagattcaagttttagaatcatcattagaagatcacataaaaatgaagcagcaggctttgacagaatttgaagcttataagcacagagttgaggacatgcaactttgtgcagaagcccagcatgtccaacgcatagtgaccatgtctagagaagtcgaagagattagaaggaaatttgaagaaaaattacggagctttggacaacttcaagtacagtttgaaaaagacaaacgattggcattggaagacttgcaagctgctcacagacgggagatacaagagctattgaagtcacagcaggatcacagtgcctcagtaaataaaggccaggaaaaggcagaggaactacacagaatggaggtggagtccctaaacaaaatgcttgaggagctaagacttgaacggaagaaactaattgaggattatgaaggcaagttgaataaagctcagtccttttatgaacgtgagcttgatactttgaaaaggtcacagctttttacagcagaaagcctacaggccagcaaagaaaaggaagctgatcttagaaaagaatttcagggacaagaagcaattttacgaaaaactataggaaaattaaagacagagttacagatggtacaggatgaagctggaagtcttcttgacaaatgccaaaagcttcagacggcacttgccatagcagagaacaatgttcaggttcttcaaaaacagcttgatgatgccaaggagggagaaatggccctattaagcaagcacaaagaagtggaaagtgagctagcagctgccagagaacgtttacaacagcaagcttcagatcttgtcctcaaagctagtcatattggaatgcttcaagcaactcaaatgacccaggaagttacaattaaagatttagaatcagaaaaatcgagagtcaatgagagattatctcaacttgaagaggaaagagcttttttgcgaagcaaaacccaaagtctggatgaagagcagaagcaacagattctagaactggagaagaaagtaaatgaagcaaagagaactcagcaagaatattatgaaagggaacttaaaaacctgcaaagtagattggaagaggaggtgactcaattaaacgaggcccattctaagactttggaagaattagcttggaagcaccatatggcaattgaagctgtccacagtaatgcaattagggataagaaaaaactgcaaatggatttggaagaacaacataacaaagataaactaaacctggaagaggataaaaatcagcttcaacaagagctagaaaacctaaaggaagtactggaagacaagttgaatacagccaatcaagagattggccacctccaagatatggtaaggaaaagtgaacaaggtcttggctctgcagaaggacttattgctagtcttcaggactcccaggaaaggcttcagaatgagcttgacttgactaaagacagcctaaaggagaccaaggatgctctattaaatgtggagggtgagctagaacaagaaaggcaacagcatgaagaaacaattgctgccatgaaagaagaagagaagctcaaagtggacaaaatggcccatgacttagaaattaagtggactgaaaatcttagacaagagtgttctaaacttcgtgaagagttaaggcttcaacatgaagaggataagaagtcagcaatgtctcaacttttgcagttgaaagatcgagagaaaaatgcagcaagagattcatggcagaagaaagtagaagatctcttaaaccagatttccttgctgaaacagaatctggagatacagctttcccagtctcagacttctttgcaacaactgcaagcccagtttacgcaagaacgacagcggcttacgcaagagcttgaagaattagaggagcaacatcagcaaagacacaaatcattaaaagaagcacatgtccttgcatttcaaactatggaagaggaaaaggaaaaggagcaaagagctcttgaaaatcatttacaacagaagcattctgcagagcttcaatcactaaaagatgcacacagagagtcaatggagggcttccggatagaaatggaacaggaacttcagactcttcggtttgaattagaagatgaaggaaaggctatgcttgcttccttgcgctcagaactcaaccatcaacatgcagctgcaattgatttgttacggcataatcatcatcaagaattggcagctgctaaaatggaattagagagaagcatagacatcagcagaagacagagtaaggagcacatatgtagaattacagatctacaagaggaattaagacacagagagcatcacatctctgaattggataaggaggttcagcaccttcatgagaatataagtgccctaaccaaagaactggaatttaaggggaaagaaattctcagaatacgaagtgaatctaaccaacagataagattagaagaaatggaagaaaaatatctaatgagagaatcaaaaccagaagatatacagatgattacagaattaaaagccatgcttacagaaagagaccagatcataaagaaactaattgaggataataagttttatcagctggaattagtcaatcgagaaactaacttcaacaaagtgtttaactcaagtcctactgttggtgttattaatccattggctaagcaaaagaagaagaatgataaatcaccaacaaacaggtttgtgagtgttcccaatctaagtgctctggaatctggtggagtgggcaatggacatcctaaccgcctggatcccattcctaattctccagtccacgatattgagttcaacagcagcaaaccacttccacagccagtgccacctaaagggcccaagacatttttgagtcctgctcagagtgaagcttctccagtggcttctccagatccccagcgccaggagtggtttgcccggtacttcacattctgaaagaattgtgttggcacagctctgtatagactgttactaagagcatgactttatacagattgttatgtaaataggctttcctatgtcaaacactgtgaatgagaaagtatttgtctctccaacttgaaaatgcactgtatttcctgtgatatttattggaatcattctataaggtactatattatgtgtgtaattataactgttatttttatttgagatggaagagtctttaacctttgtaattactgcataataaattttgttagaatcaaaaaaaaaaaaaaaa

SEQ ID NO: 4210 - DNA, 2344 bp, Homo sapiens; identical to SEQ ID NO: 815

SEQ ID NO: 4211 - DNA, 1466 bp, Homo sapiens
ggtgcgtccgcgggtggctgccccgcaggtgcgcgcggccggggctggcggcgactctctccaccgggccgcccgggaggctcatgcagcgcggctgggtcccgcggcgcccggatcggggaagtgaaagtgcctcggaggaggagggccggtccggcagtgcagccgcctcacaggtcggcggacgggccaggcgggcggcctcctgaaccgaaccgaatcggctcctcgggccgtcgtcctcccgcccctcctcgcccgccgccggagttttctttcggtttcttccaagattcctggccttccctcgacggagccgggcccagtgcgggggcgcagggcgcgggagctccacctcctcggctttccctgcgtccagaggctggcatggcgcgggccgagtactgagcgcacggtcggggcacagcagggccggggggtgcagctggctcgcgcctcctctccggccgccgtctcctccggtccccggcgaaagccattgagacaccagctggacgtcacgcgccggagcatgtctgggagtcagagcgaggtggctccatccccgcagagtccgcggagccccgagatgggacgggacttgcggcccgggtcccgcgtgctcctgctcctgcttctgctcctgctggtgtacctgactcagccaggcaatggcaacgagggcagcgtcactggaagttgttattgtggtaaaagaatttcttccgactccccgccatcggttcagttcatgaatcgtctccggaaacacctgagagcttaccatcggtgtctatactacacgaggttccagctcctttcctggagcgtgtgtgggggcaacaaggacccatgggttcaggaattgatgagctgtcttgatctcaaagaatgtggacatgcttactcggggattgtggcccaccagaagcatttacttcctaccagccccccaatttctcaggcctcagagggggcatcttcagatatccacacccctgcccagatgctcctgtccaccttgcagtccactcagcgccccaccctcccagtaggatcactgtcctcggacaaagagctcactcgtcccaatgaaaccaccattcacactgcgggccacagtctggcagctgggcctgaggctggggagaaccagaagcagccggaaaaaaatgctggtcccacagccaggacatcagccacagtgccagtcctgtgcctcctggccatcatcttcatcctcaccgcagccctttcctatgtgctgtgcaagaggaggagggggcagtcaccgcagtcctctccagatctgccggttcattatatacctgtggcacctgactctaatacctgagccaagaatggaagcttgtgagggtaaactgtggcttattcttacaaaaagtgtaataaaggagactgacccctgacaacatggtaggcactgtataaaaaaaaaaaaaaaa

SEQ ID NO: 4212 - DNA, 4988 bp, Homo sapiens; identical to SEQ ID NO: 1946

SEQ ID NO: 4213 - DNA, 1252 bp, Homo sapiens
cttagaattcgtgatttttccaagaaactaaagagtgtattcctagtaccagatctgagtgggatgctgcaagttcttaaagagctgacagatgtccagtactactgggaaaacttctgccacgcctaggatcccagactgtgagtctgtgttcataagcaaggttctctaagattcaactataaaaaaacttactaaggtatgtcttcattatatgacttctcatatggagaaattcagccataatcactaacttccttttaagctacccttttgcaacctcctcagaagtgcatacaaaatagaacatgaaagaaaactatccccaaatcctcaatataatttatttctggaaacctttacaagtccatgatatcaaaattttgaaaggctatgtaagacgttaatggacatctatatcaacttgaaatgatgtagctataaatttcatctcccataattcttcatttaaaaaatctagttattattagttaataaacctctgcatcaagtcaagtaacactgagataaatatgaagaaaacaagcacatccatttaatctatataatttctaaagagatgaagaaaggcttagaaaaatactacaattttatttctgtggtggttccaacctgtgataactgagaacaatacaaatagagatttgaaattcatgttgaatcatgaatcatatgtctgcatctctcaaaatctccaatagctccaaattccaggtctctgagttcatcctgctgggattcccgggcattcacagctggcaacactggctatctctgcccctggcactactgtatctctcagcacttgctgcaaacaccctcatcctcatcatcatctggcagaacccttctttacagcagcccatgtatattttccttggcatcctctgtatggtagacatgggtctggccactactatcatccctaagatcctggccatcttctggtttgatgccaaggttattagcctccctgagcgctttgctcagatttatgccattcacttctttgtgggcatggagtctggtatcctcctctgcatggcttttgatagatatgtggctattcgtcaccctcttcgctatccatcaattgtcaccagttccttaatcttaaaagctaccctgttcatggtgctgagaaatggcttatttgtcactccagtgcctgtgcttgcagcacagcgtgattattgctccaagaatgaaattgaacactgcctgtgctcta

SEQ ID NO: 4214 - DNA, 6063 bp, Homo sapiens; identical to SEQ ID NO: 1917

SEQ ID NO: 4215 - DNA, 3066 bp, Homo sapiens; identical to SEQ ID NO: 640

SEQ ID NO: 4216 - DNA, 2257 bp, Homo sapiens; identical to SEQ ID NO: 1461

SEQ ID NO: 4217 - DNA, 8005 bp, Homo sapiens
cgctgggcaacgtgggcaacgcggcgggcggcgggctcgcgcggcgggaggggcagcggcggcgcgcccgggctctacctcccgggctctgcctcccgggctctgcctctcgggcacttgcctggctcctgcgcgttcctgggcatcggctctgcagctgacacacagtagcggggacacccgacgccgctagcgacaggcgcgcggacggctggtcccagagggacgctgcgcttggggacgccggcgagactcgccaggagccaagaggaaacaggaatcattcaaactggattttaaaatcattgcaaatcagtgatggatcagaagttgcagagtgcaatcccgagtaaaagtcttcaaaaaattttgcttcaggtaacagaggaaggaaaattgatctaccaccttaaaaccctgatctagaaaaaatatatattcatgataggaagttataactaagaaaatttatttgcctcttaatgctcctgaatgaaaggaattatccctttgttctttgggaggacttgtgtatctgagattgttgtaataatcagtcattttattaaaaccttgacatgatcaccagggaggaaaaatagagcaatagtcaaaacctgtgtgttagtccaagatgacttctgaagaaatgacagcttctgttctcatacctgtgactcagagaaaagtggtttctgcccagtcggctgcagatgaaagtagtgaaaaggtctcagacatcaatatttcaaaagcacatactgtcagacgaagtggggagacttctcataccatctcacaactgaacaaacttaaagaagaaccttctggaagcaacttgccaaagattctctcaatagcgagggagaaaatagtgagtgatgagaacagtaatgaaaaatgttgggagaaaatcatgccagattctgcgaaaaaccttaacattaactgcaacaacatattgagaaaccatcagcatggccttcctcagagacaattttatgaaatgtacaactctgttgctgaggaagacttgtgtttagaaactggaattccttctccactggaaagaaaggtgttccctggaattcaactggaactagacagaccttccatgggcattagtcctttaggaaatcagtcagtgatcatagagacaggcagagcacaccctgacagcagaagggcagtatttcattttcattatgaagttgacagaagaatgtcagacactttctgtaccctatcagaaaacttaattttagacgattgtggaaattgtgtaccactacctgggggtgaggagaagcaaaagaaaaactatgtggcatatacctgtaaactgatggaattggccaaaaattgtgataataagaatgagcagctgcagtgtgatcattgtgacaccttgaatgataaatacttttgctttgaaggctcttgtgagaaggttgacatggtatattcaggtgatagcttttgtaggaaagactttactgacagtcaagctgccaagacctttttgagccattttgaggacttccctgataattgtgatgatgtagaagaagacgcttttaaaagcaaaaaggagcgatccactttgttagtcaggagattctgtaaaaatgacagagaagttaagaaatctgtgtatactggaacaagagcaattgtgagaactctgccttctggccacattgggctgactgcatggagttacatagatcagaagagaaatggtcccttactgccttgtgggagagtaatggaacccccgtcaacagtggagataaggcaagatgggagccaacgtctgtcagaagcccagtggtatcctatctacaatgcagtgagaagagaagaaacagaaaatacagttggatctctactccatttcctcaccaagctcccagcctccgagacagcccatggaaggataagcgttggtccatgcttaaagcaatgtgtccgagacactgtatgtgagtatcgcgccaccctccaaaggacttcaatatcgcagtacatcaccggttctctcctagaagcaaccacgtctttgggagcaagaagtggccttctcagtacttttggaggatccactggacgaatgatgctgaaagaacgccagccaggcccctctgtggccaattccaatgccctcccttcaagttcagctgggatcagcaaggagctgatcgatctgcagcctctcatccagttcccagaggaagtcgccagcatcctgatggagcaagagcagactatttaccgcagggtcttgccagtcgactacctttgcttcttaacacgggacttgggcactcctgaatgccagagctccttgccctgcctcaaagcatccatctcagcgtcgattcttaccactcagaatggagagcacaatgcccttgaagatctggtgatgaggtttaatgaggtgagctcctgggtgacatggctgatcctcacggcaggctccatggaggagaagcgagaagtcttttcatatttggtgcatgtggccaaatgctgctggaacatgggcaactacaacgctgtcatggagttcttggctggcctcaggtcaagaaaagttttaaaaatgtggcagttcatggaccagtctgatattgagaccatgaggagcctgaaggatgctatggcccagcatgagtcctcttgtgagtacagaaaggtggtgacacgtgccctgcacatccctggctgtaaggtggttccattctgtggggtgtttctgaaggagctctgtgaagtgcttgacggcgcctccggtctcatgaagctttgcccgcggtacaattcccaagaagaaactttagagtttgtagcagattacagtggacaagataatttcttacaacgagtgggacaaaatggcttaaagaattcggagaaggagtccactgtcaacagcatctttcaggtcatccggagctgcaatcgaagtctggagacagacgaggaggacagccccagtgaaggaaacagctccaggaaaagctccttgaaggataaaagccgatggcagtttataattggagatttgttggattcagacaatgacatctttgagcaatccaaagaatacgactctcatggttcagaggactcacagaaggccttcgaccatgggacggagctcatcccttggtacgtgctgtccatccaagccgatgtgcaccagttcctgctgcagggggccacggtcatccactacgaccaggacacacacctctctgcccgctgcttcctccagcttcagcccgacaatagcaccttgacctgggtaaagcccacaactgcctccccagccagcagtaaagcaaaacttggtgtacttaataacacagctgagcctggaaaattcccactactgggtaatgctggattaagtagcctgacggaaggggtcttggatctttttgcagtgaaggctgtatacatgggccaccctggcattgatatacacactgtgtgtgttcagaacaaactgggtagcatgttcctgtcagagactggtgtgacattgctctatgggcttcagaccacagacaacagattattgcacttcgtggcaccaaagcacacagctaaaatgctcttcagcggattattggaactcactagagctgtgagaaagatgaggaaattccctgaccaaagacagcagtggctgcggaaacagtacgtcagcctttatcaggaggatggacggtatgaaggcccaactttggctcacgctgtggagttgtttggtggcagacggtggagtgctcgaaaccccagccccggaacatcagcaaagaatgctgagaagcccaatatgcagagaaacaataccctgggcataagcactaccaagaaaaagaagaaaatcctcatgaggggtgagagtggagaggtaactgacgatgagatggcaacccgaaaggccaagatgcacaaagagtgtcgaagccggagtggttctgatcctcaagacattaatgaacaagaagaatcagaggtgaatgccatcgctaaccctccaaaccccctcccttccagaagagcccactctttgaccacagctgggtcccccaacttggctgccgggacgtcatctcccatcaggccagtgtcctcccctgtgctgtcttcttcaaacaagagcccatccagtgcttggagcagtagtagctggcacgggcggatcaaaggcggcatgaagggatttcagagcttcatggtttcagatagcaacatgagttttgttgaatttgttgagctgttcaaatcattcagtgtcaggagccgcaaggacctgaaggatctgtttgatgtctatgcagtgccctgcaaccgatctggctccgagtcagccccactctacaccaacctgacaattgatgaaaacaccagcgatcttcagcctgacctagatctgttgaccagaaatgtctcggatttggggttgttcattaagagtaaacagcagctatcggacaaccagaggcagatatctgatgccattgctgctgcaagcattgtgacaaatggcactgggattgagagcacatctctgggcatttttggggtgggcatacttcagctcaacgatttcctcgtgaattgccaaggagaacactgcacttatgatgaaatcctcagcatcatccagaagttcgagcctagcatcagtatgtgtcatcagggactaatgtcatttgaagggtttgccaggtttctgatggataaagaaaattttgcctcaaaaaatgatgagtcacaggagaacattaaagaactgcagctacccctctcatactattacatcgaatcttcgcacaatacctacctcacgggccatcagctcaaaggagaatcctcggtagaactctacagccaggtccttttgcaaggctgtcgaagtgtagaattggactgctgggacggagacgatgggatgcccatcatttatcatggacatacgctgacaaccaagatccccttcaaggaagtggttgaagccattgatcgcagtgccttcatcaactctgacctgccaatcatcatatcgattgagaaccactgttcattgcctcagcaacgaaaaatggcagaaattttcaagactgtgtttggagaaaagctggtgactaaattcttatttgagactgatttctcagatgatccaatgcttccttcacctgaccaactcagaaagaaagttcttcttaaaaacaagaagctaaaagcccatcagacgccagtggatatcttaaagcaaaaggctcatcagttagcatctatgcaagtgcaggcttataatggtgggaatgccaacccccgacctgccaataatgaggaagaggaagatgaggaggacgaatatgattatgactatgaatccctttctgatgacaacattctggaagacagacctgaaaataaatcatgtaatgacaagcttcagtttgaatataatgaagaaatcccaaagaggataaagaaagcagataactctgcttgcaacaaaggaaaggtttatgatatggaactgggagaagaattttatcttgatcagaataaaaaggaaagcagacagattgcaccagagctttctgaccttgtaatctattgtcaagcagtaaaatttccaggactgtcaactctaaatgcatctggctctagcagaggaaaagaaaggaaaagcaggaagtccatttttggcaacaatccgggcagaatgagcccaggggagacagcatcatttaacaaaacatctggaaaaagttcctgtgaaggcattcgacagacctgggaggaatcttcttcccctctcaacccaaccacgtccctcagtgctatcattagaactcccaaatgttatcatatctcgtcgctgaatgaaaatgccgccaaacgtctgtgtcgcaggtattctcagaaactgacccagcacaccgcctgtcagctgctgagaacttaccctgctgccacccgcatcgactcttccaacccgaaccccctcatgttctggctccatgggatacagcttgtggcactcaactaccagactgatgatctccctttacatttaaatgctgcaatgtttgaggcaaatggtggttgtggttatgtattgaaacctccagttctgtgggacaagaactgccccatgtatcagaagttttctccactagaaagagatctggacagcatggatcctgcagtctattctttaactattgtctctggtcagaatgtgtgccccagtaatagcatgggaagcccgtgcattgaagtcgacgtcctgggcatgcctctggacagctgccatttccgcacaaagcccatccatcgaaacaccctgaaccccatgtggaacgagcagtttctgttccgcgttcacttcgaagatcttgtatttcttcgttttgcagttgtggaaaacaatagttcagcggtaactgctcagagaatcattccactgaaagctttaaaacgaggatatcgacatcttcagctgcgaaaccttcacaatgaagtcttggagatttctagtttattcattaacagcagaaggatggaagaaaattcctctggcaataccatgtcagcctcttcgatgtttaatacagaagaaagaaaatgtttgcagactcacagagtcacggtgcatggggtcccagggccagagccctttaccgttttcactattaatggaggcaccaaggcaaagcagcttctgcagcaaattctgacaaatgaacaagacatcaaacctgttaccacagactattttttgatggaagaaaaatattttatatctaaagaaaagaatgaatgtaggaaacaaccattccagagagccattggtccagaagaggagatcatgcaaattttaagcagctggtttccagaagagggatacatgggcaggattgtcttaaaaacccagcaggaaaacctagaagagaaaaacattgttcaagatgacaaagaggtgatcttgagctcagaggaggagagtttctttgtccaagtgcatgatgtttctccagagcaacctcgaacagtcatcaaagcaccccgcgtcagcactgcacaggatgtcattcagcagaccttatgcaaagccaaatattcctacagcatcctgagcaaccccaatccaagcgactatgtgcttttggaagaggtggtgaaagacactaccaacaagaagactaccacaccaaagtcctctcagcgggtccttctggatcaggagtgtgtgtttcaagcccaaagcaagtggaaaggtgcaggaaaattcatccttaagctaaaggagcaggtgcaggcatctcgagaagataaaaagaaaggcatttctttcgcaagtgaactcaagaagctcaccaagtcaactaaacagccccgaggacttacatcaccttctcagctcttgacctcagaaagtatccaaaccaaggaggagaaacctgtgggtggcttgtcctccagtgacacaatggattaccgacagtgactaagggcagcatgtttaacccaggtgaagatctttaagcaagaagttaaagagtgaacatggtggaaaaaatataattattttcatcagacttaaactggaaattgatgatttctgaactgaagccttcacacatgtgagatccatgctgaggagaagcaaaatggcacagggctagttgccaccaaccaatttactgatgaatgaagcccaggggactgccattttataaatgtcagcagttggaaaaatcgtcacgaattgacttagagcaagggtcagcaagcttgtctgtaaagggccaaacagtaaatattttagggctgggggccataaaatatgttgcaaccacccaattctgccattgtagtgcaaaagcagccatagacaacacatacatgaacgaacgtggctgtattccaataaaactttatttatggacactgaaaaaaaaaaaaaaaa

SEQ ID NO: 4218 - DNA, 6519 bp, Homo sapiens
cccacgcgtccggtttggcaagtcagtgcaagaggctgacttctgagaggcttccaggagcccgaagagaggacctccacgggagaagggagtgcgtgtgctcggttttttttttttctctcttttttttttttttttctgaatgaacagctttgcccaagtgactgaaaaatacagcttcttcctgaatctaccggcgtagttgctgaagagcgctctagacaggacatggctctgaagactcactctttggaatgtcctcttgctcccggcttataaacaactgtcccgaggaaagaaaggttttacatagccaaatacagcctgacaaatggcacttcggaactgtgctttctgatgacaacgcgttcgatttctgacaaagcctctcgcacgctgcccctggagggaagtcctaagtaaaactcagaccctccttaaagtgaggagcgagggcttggacggtgaacacggcagcatggcatccgcggggcacattatcaccttgctcctgtggggttacttactggagctttggacaggaggtcatacagctgatactacccacccccggttacgcctgtcacataaagagctcttgaatctgaacagaacatcaatatttcatagcccttttggatttcttgatctccatacaatgctgctggatgaatatcaagagaggctcttcgtgggaggcagggaccttgtatattccctcagcttggagagaatcagtgacggctataaagagatacactggccgagtacagctctaaaaatggaagaatgcataatgaagggaaaagatgcgggtgaatgtgcaaattatgttcgggttttgcatcactataacaggacacaccttctgacctgtggtactggagcttttgatccagtttgtgccttcatcagagttggatatcatttggaggatcctctgtttcacctggaatcacccagatctgagagaggaaggggcagatgtccttttgaccccagctcctccttcatctccactttaattggtagtgaattgtttgctggactctacagtgactactggagcagagacgctgcgatcttccgcagcatggggcgactggcccatatccgcactgagcatgacgatgagcgtctgttgaaagaaccaaaatttgtaggttcatacatgattcctgacaatgaagacagagatgacaacaaagtatatttcttttttactgagaaggcactggaggcagaaaacaatgctcacgcaatttacaccagggtcgggcgactctgtgtgaatgatgtaggagggcagagaatactggtgaataagtggagcactttcctaaaagcgagactcgtttgctcagtaccaggaatgaatggaattgacacatattttgatgaattagaggacgtttttttgctacctaccagagatcataagaatccagtgatatttggactctttaacactaccagtaatatttttcgagggcatgctatatgtgtctatcacatgtctagcattcgggcagccttcaacggaccatatgcacataaggaaggacctgaataccactggtcagtctatgaaggaaaagtcccttatccaaggcctggttcttgtgccagcaaagtaaatggagggagatacggaaccaccaaggactatcctgatgatgccatccgatttgcaagaagtcatccactaatgtaccaggccataaaacctgcccataaaaaaccaatattggtaaaaacagatggaaaatataacctgaaacaaatagcagtagatcgagtggaagctgaggatggccaatatgacgtcttgtttattgggacagataatggaattgtgctgaaagtaatcacaatttacaaccaagaaatggaatcaatggaagaagtaattctagaagaacttcagatattcaaggatccagttcctattatttctatggagatttcttcaaaacggcaacagctgtatattggatctgcttctgctgtggctcaagtcagattccatcactgtgacatgtatggaagtgcttgtgctgactgctgcctggctcgagacccttactgtgcctgggatggcatatcctgctcccggtattacccaacaggcacacatgcaaaaaggcgtttccggagacaagatgttcgacatggaaatgcagctcagcagtgctttggacaacagtttgttggggatgctttggataagactgaagaacatctggcttatggcatagagaacaacagtactttgctggaatgtaccccacgatctttacaagcgaaagttatctggtttgtacagaaaggacgtgagacaagaaaagaggaggtgaagacagatgacagagtggttaagatggaccttggtttactcttcctaaggttacacaaatcagatgctgggacctatttttgccagacagtagagcatagctttgtccatacggtccgtaaaatcaccttggaggtagtggaagaggagaaagtcgaggatatgtttaacaaggacgatgaggaggacaggcatcacaggatgccttgtcctgctcagagtagcatctcgcagggagcaaaaccatggtacaaggaattcttgcagctgatcggttatagcaacttccagagagtggaagaatactgcgagaaagtatggtgcacagatagaaagaggaaaaagcttaaaatgtcaccctccaagtggaagtatgccaaccctcaggaaaagaagctccgttccaaacctgagcattaccgcctgcccaggcacacgctggactcctgatggggtgagactatctactgtcttttgaagaatttatatttggaaagtaaaaaagtaaaaaaataaatcatccaacttctttgcattacttaaaagagatttctgtaatacaggaatgactatgaaggtgttataataaattattctacatactcatttgactggataaactttacataaaattaactaattttttaaataaatgcattgcttaatggtttctcattatgtttatcaaaaaacaactgtagctgttattttcagtacttggctgcttttctgtgaaaattattattttacttttggaagacaagattattagaatattgaagaaaaattggagacttataatcatggtaaatataaaactaaatatgttttaatatttctgaatttttcttttccatcacaatgtaagatatgcagaatacaagatactttggcattctcatgtgaactttctgtactctttaaggattattttattagtgttgtttaagccatgagtgttaagtagcaggtgtgttgtgagtgctgtaacccatgaaaggaaaaatgtcattctgaggcttgtgcccttcgtaaaatattcattaaagtacattcacactatttttgctttataacacagtctttaattttcactcactgtggaaataaaaactaaggtaacttctcagaaagatatcaaatctcagaaagaatgtcaaatcagatgaagttatagttaggattctaactactgtaaaagatttttgcttccctcttgtggtaaaaaaaattatattctcacacatttcttttttctctacagacggatatctgtttaggaaagatttgaaagcagattatcagtaggtacatggatacatcaagttcatttgcagaaacaaataactgaaataaaaaacatgttaatccttgtatcatactttaatatgaaagtattgtttatagataatttatctcacaagtcaaaaatgaagattttgcagcactgaaaatctattaaagctccaaattttaagtttctaaataatcttcgctgaaatctaaaatatactataacaaccgtgttttatttgtgaaaaaaatattaaagtgatttgctctcaaatatcaaattttcttctctcttttatattaagagacagaaaattgtttcatgagttcacttaactactgagatattcagagcatttttacctctctcttaaatgttataaaaaacaattgtatttttaagaatgtttatttatcaaagtctttccttcttctattaaatatttagcaattacctttctaaaatatgaaattttgtaagatgttttcacctaaataaaaattgaaagcaagtggattacacaggagaaccattatgaacatttatttagatattaatcttaaacagtgtttatttcagttttcaaagttagcttataggttatacatttaagttaaagtgctcataatcacttgcaatttcattgtaaaatgaacaaatacataaatattttaagaaaaatttaagtttattcagataagtcaccatgcttcaaaagatctaagaaatgcaaatatactgaaaattgacatcctctgaaaattccacttgctatttacccaagaatccactggaggtcattactgccattaaataataactgaaaagactatgtagtgaaatgtatttttaaaaactatattcagtaaaagcctgctcaatttggagaaatagaaccacaaacacagatcacaggggccttacaaagtttatgtctgaacaaataagtcaattaagtacactttattgaaaattgccttccattaacacacaagaaagaaagcaggattttctcctgtatctgaattttaaaattaaaaaggcagataagacataaatagttatcattttaattgcaataacacagacaagtagttaatgatgataacaatggtgtaacttgtaaactaaatatttggtaactgaagcaataggcagaggaaaatagcttttctatgacacaagtcataagaagtccatatactgaagagcgtttgattaaaataaagtgactattaaccagaaaagaaacattttacataaaatgctaaaatttattataggaaaataaatcaaacccaaagaaagtttattcaatgctaatttgaaagaaaattgataagaaaactttgagggcccaagtccacaatttggtgagaccactaaattttacatataattatacacacacatatgtacatatatatgtatataatcttgcttcccgcctgtttatggcagtactgaagagaaatgggaaagaagagggagggagagagaaagacgaagggagagagaaagcagtttccaaggatatgtttcatgtcccaccattttctcagtttctccctctctctcccaacacacacacacacacacccctcacatactataaaataaatcttcactgccctatcaaaatacaaataaatcaatctatgctgttctgtccttcttgagaatctaaaacataccacaaaaatacatccccagtcttttgttctgtctgaggttagaattaattcaaattcagaatctgttgtgagaaatgcccaggctttaaaaattaaaaatggatggatcttctctgaactcagggagggcacatacttagatacctacaagacttggaggaattaagagttcacccttcatctcaccaaattttccccatttttctctttcttgtagaaggagagaaaccatgctctctagcaacattgagcaaaaatcataaccactcatctaatttctaagaggcacctccatcgagggccggtctcctgcttctttagacctcttctatctttgttacaggagaggacctgtggatagacttagttttgacataaaacaatgcccattcacctcctccttcagcacaacgtcacccattgggcaagagatccagatttgttaacaaaaaagattttacttcgtgattccacgtctataattctatattgctaattttttcttttgtgtgaattactgaatatttcagagcaaagctatcaacttggagaaacagggattaaaaataaggataaacactaataagagctctagaaaaaagggaacagaaagtctgcctgtttagtaagtggcaattccatacatattttagagttttttctatctaaaattagttaaatacttagaatgtttgtaatgagtgttcgatatttgctataggttttagggttttgtaaatcttcatagtaattataaacatttgtaaaatttgtaaaatactataagtcattttgagtgttggtgttaagcatgaaacaaacagcagctgttgtccttaaaaatgaattgacctggccgggcgcggtggctcacgcctgtaatcccagcactttgggaggccgaggcgggtggatcatgaggtcaggagatggagaccatcctggctaacaaggtgaaaccccgtctctactaaaaatacaaaaaattagccgggcgcggtggcgggcgcctgtagtcccagctacttgggaggctgaggcaggagaatggcgtgaacccgggaagcggagcttgcagtgagccgagattgcgccactgcagtccgcagtccggcctgggcgacagagcgagactccgtctcaaaaaaaaaaaaaaaaaaaaaaaaaaaaaaaaa

SEQ ID NO: 4219 - DNA, 3670 bp, Homo sapiens
cgttggtgctgtttgcggatgctgatgcagtttctgcaggactgtaaactggattcctggaacctttgatattcctggctgtgtatagtgcctgttggtggactgtactgatactcaactagagtgtgaagggactggattcctgcccctgagacacaatgcaagctgtagtgcccttgaacaagatgacagccatctcaccagaacctcaaactctggcctcgactgaacaaaatgaggtcccaagagtggttacttctggggaacaagaagctattttaagaggaaatgctgctgatgcagagtctttcagacagaggtttaggtggttttgttactcagaagtagctggacccaggaaagctctgagtcaactctgggagctctgcaatcagtggctgagaccagacattcacacgaaagaacagattttagagcttctggtgtttgagcagttcctgaccattttgcctggggagatcaggatttgggtaaagtcacaacatcctgagagtagtgaggaagtggtgaccctaatagaagatttgacccagatgcttgaagaaaaagatccagtctctcaagattctactgtttcccaagaggagaactcaaaagaggataaaatggtcactgtttgtcccaatactgagtcctgtgaatctataacattgaaggatgtagctgtgaacttttcaagaggagagtggaagaagctggagccttttcaaaaggagctatataaggaagtgctactggaaaacctcaggaacctagaatttctggactttccagtttcaaaattagagttgatttcccagctaaagtgggttgaattgccatggctgctggaagaagtctcaaaaagctcccgactagatgaatcagctttagataaaataatagaaaggtgcctcagggatgatgatcatggcttgatggaagaatcccagcaatattgtggcagctcagaggaggatcacggtaatcagggaaattcaaaaggaagagtcgcacaaaacaaaactcttgggagtggcagtaggggtaagaaatttgacccagataaaagcccctttggacataatttcaaagaaacttcagacttaattaaacatctgagagtctacttgaggaagaaatctcggaggtataatgaaagcaagaaacccttcagttttcattcagaccttgttctgaaccgcaaggagaaaaccgccggagaaaagtcacggaaatctaatgatggtgggaaagtcctgagtcactcttcagctcttactgaacatcagaaacgtcagaagattcatttgggggataggtcccaaaaatgcagtaagtgtgggataatctttattagaagatcaactctttctaggagaaaaacccctatgtgtgagaaatgtcggaaagattcatgtcaagaagcagccttaaataaagatgagggaaatgagagtggaaaaaaaactcataaatgtagtaagtgtggaaaagcctttggctatagcgcctcactcaccaaacatcggagaattcacactggagaaaaaccctatatgtgtaatgaatgtggaaaagcttttagtgatagttcatcgctcacaccacatcatagaactcatagtggagagaaacccttcaaatgtgatgactgtgggaaaggtttcaccctaagtgctcacctcattaaacatcagagaattcatactggagaaaaaccttataaatgtaaagactgtgggagaccctttagtgacagttcatctcttattcaacatcagcgaattcatactggagaaaaaccctatacatgtagcaattgtggaaaatccttcagtcatagctcatccctttccaaacatcagagaattcatactggagagaaaccctataaatgtggcgaatgtggaaaagcctttaggcagaattcatgccttacccggcatcagagaattcacactggagaaaaaccatatttgtgtaatgattgcggaatgacttttagccattttacgtctgtgatttatcatcaaagacttcattcaggagaaaaaccctacaaatgtaaccagtgtgagaaagccttcccaacccattcactgctaagtcgtcatcagagaattcatactggtgtaaaaccttataaatgtaaagaatgtgggaagtccttcagtcagagttcatctcttaatgagcaccaccgaattcatacaggagagaaaccctatgagtgtaactattgtggtgcaacctttagtcgaagctcaatccttgtagaacacctaaaaattcataccggaaggagagaatatgaatgtaacgaatgtgagaagacatttaaaagtaattcaggcctcattagacatcggggatttcactctgcagagtaatcctggaactacattaaagtggggggaatttaattcaaattgtcagttactgaaaccctgggatgtaaacttacagtattgatcagtagctgcagctttcgtaaattggcagttaggaaaaatatccttttgcccattcatccctcttcttttcaaggatggcaacgactggtaaacagtaattagttggtaaagtcactggaaagggaagaatgcaaaatgattctgaggccagacgaattggaaaagctcttttcttcaggggatttctctctgatttcttctactaccatgtagtgtgatggagagaacttgactgcagtcacataacttggattctgtcccagtttgccaaccaacttgctgtatacaccttggacaagtcatttgacctttcagaattttattttcgtcaccagcagaatgaagggatgggattaatgatttttgccttttttggttttttagttttttattggtatcctgataatctctgaagctgtggacataagttatttttttttatttgtcattactttcaagtttctctagtaaaaaatacaataccactattcaggatgctggacttcttttcttttttttttcttttttttttttcaatttttcttttttgggatggagtctcactatgttgcccagactggtcttgaactcctgggctcaagtgatccttccatctcactttcctgagtagctgacattacgggtacactccatcaagcctggttcctaggatgctggacttctagcttagtgagaatgcagtatactttttgaaaacttcgtgcaggaatccctcaaatgctgtaactaggaatgggtcagtgaagttcaaacgacttttccttgagggagtattttaatcggacaagggaactctttttcttttgggcattggccaacaggactgagaagccagagagcttgcacctgagccatctcagccgtgagagtaacagtcctaggaaaatagatgggggctgggggtaaggaaatgtgctgaagacagagctattctggatggattttggtttgcaaaaattctactttaaaacaattttgcctgtagcaagtacatttttttgcaattggagtgtaaacattctgtgtggcaacagttaaaagctgttataacaatttgcttgggtgtgtgtgcatgtgtgtgtgtgtgtgtgtgtgtgtatacattgttgccactatctaaaattagggcatttcatactaaaaacaaagcttgtcttaaaaaaaaaaaaaaa

SEQ ID NO: 4220 - DNA, 5319 bp, Homo sapiens
catggcggtgccggctcggacctgcggcgcctctcggcccggcccagcgcggactgcgcgcccctggcccggctgcggcccccaccctggccccggcacccggcgcccgacgtccgggcccccgcgcccgctgtggctgctgctgccgcttctaccgctgctcgccgcccccggcgcctctgcctacagcttcccccagcagcacacgatgcagcactgggcccggcgtctggagcaggaggtcgacggcgtgatgcggatttttggaggcgtccagcagctccgtgagatttacaaggacaaccggaacctgttcgaggtacaggagaatgagcctcagaagttggtggagaaggtggcaggggacattgagagccttctggacaggaaggtgcaggccctgaagagactggctgatgctgcagagaacttccagaaagcacaccgctggcaggacaacatcaaggaggaagacatcgtgtactatgacgccaaggctgacgctgagctggacgaccctgagagtgaggatgtggaaagggggtctaaggccagcaccctaaggctggacttcatcgaggacccaaacttcaagaacaaggtcaactattcatacgcggctgtacagatccctacggacatctacaaaggctccactgtcatcctcaatgagctcaactggacagaggccctggagaatgtgttcatggaaaaccgcagacaagaccccacactgctgtggcaggtcttcggcagcgccacaggagtcactcgctactacccggccaccccgtggcgagcccccaagaagatcgacctgtacgatgtccgaaggagaccctggtatatccagggggcctcgtcacccaaagacatggtcatcatcgtggatgtgagtggcagtgtgagcggcctgaccctgaagctgatgaagacatctgtctgcgagatgctggacacgctgtctgatgatgactatgtgaatgtggcctcgttcaacgagaaggcacagcctgtgtcatgcttcacacacctggtgcaggccaatgtgcgcaacaagaaggtgttcaaggaagctgtgcagggcatggtggccaagggcaccacaggctacaaggccggctttgagtatgcctttgaccagctgcagaactccaacatcactcgggccaactgcaacaagatgatcatgatgttcacggatggtggtgaggaccgcgtgcaggacgtctttgagaagtacaattggccaaaccggacggtgcgcgtgtttactttctccgtggggcagcataactatgacgtcacaccgctgcagtggatggcctgtgccaacaaaggctactattttgagatcccttccatcggagccatccgcatcaacacacaggaatatctagatgtgttgggcaggcccatggtgctggcaggcaaggaggccaagcaggtgcagtggaccaacgtgtatgaggatgcactgggactggggttggtggtaacagggaccctccctgttttcaacctgacacaggatggccctggggaaaagaagaaccagctgatcctgggcgtgatgggcattgacgtggctctgaatgacatcaagaggctgacccccaactacacgcttggagccaacggctatgtgtttgccattgacctgaacggctacgtgttgctgcaccccaatctcaagccccagaccaccaacttccgggagcctgtgactctggacttcctggatgcggagctagaggatgagaacaaggaagagatccgtcggagcatgattgatggcaacaagggccacaagcagatcagaacgttggtcaagtccctggatgagaggtacatagatgaggtgacacggaactacacctgggtgcctataaggagcactaactacagcctggggctggtgctcccaccctacagcaccttctacctccaagccaatctcagtgaccagatcctgcaggtcaagtattttgagttcctgctccccagcagctttgagtctgaaggacacgttttcattgctcccagagagtactgcaaggacctgaatgcctcagacaacaacaccgagttcctgaaaaactttattgagctcatggagaaagtgactccagactccaagcagtgcaacaacttccttctgcacaacctgatcttggacacgggcatcacgcagcagctggtagagcgtgtgtggagggaccaggatctcaacacgtacagcctactggccgtgttcgctgccacagacggtggcatcacccgagtcttccccaacaaggcagctgaggactggacagagaaccctgagcccttcaatgccagcttctaccgccgcagcctggataaccacggttatgtcttcaagcccccacaccaggatgccctgttaaggccgctggagctggagaatgacactgtgggcatcctcgtcagcacagctgtggagctcagcctaggcaggcgcacactgaggccagcagtggtgggcgtcaagctggacctagaggcttgggctgagaagttcaaggtgctagccagcaaccgtacccaccaagaccagcctcagaagtgcggccccaacagccactgtgagatggactgcgaggttaacaatgaggacttactctgtgtcctcattgatgatggaggattcctggtgctgtcaaaccagaaccatcagtgggaccaggtgggcaggttcttcagtgaggtggatgccaacctgatgctggcactctacaataactccttctacacccgcaaggagtcctatgactatcaggcagcctgtgcccctcagccccctggcaacctgggtgctgcaccccggggtgtctttgtgcccaccgttgcagatttccttaacctggcctggtggacctctgctgccgcctggtccctgttccagcagcttctctacggcctcatctaccacagctggttccaagcagaccccgcggaggccgaggggagccccgagacgcgcgagagcagctgcgtcatgaaacagacccagtactacttcggctcggtaaacgcctcctacaacgccatcatcgactgcggaaactgctccaggctgttccacgcgcagagactgaccaacaccaatcttctctttgtggtggccgagaagccgctgtgcagccagtgcgaggctggccggctgctgcagaaggagacgcactgcccagcggacggcccggagcagtgtgagctagtgcagagaccgcgataccggagaggcccgcacatctgcttcgactacaacgcgacagaagatacctcagactgtggccgcggggcctccttcccgccgtcgctgggcgtcctggtctccctgcaactgctgctcctcctgggcctgccgccccggccgcagcctcaagtcctcgtccacgcctctcgccgcctctgagcaccctgccccaccccacctccactcccacctcacccggcctcttcgcctttcccaccctcctgccccacactccccgccttagagcctcgtccctccctcactgaaggacctgagctggccaggccctgagagtctggtctgcgccttgggatggggagtcccaaagcgggacgccgcaggtgtttggcacccaaatcacatctcacctccgaactgttcaagtgtccccagacccttcttgcctgctgggctccccccagtgggatgggacagggaggccacacgcactggtgccaaaaccaggcctctgctgccgcccttcctggaggctgcctatgttgggggggaccctgcctcagctgacccggcctctctgccccacccaagcccaaacttggtttctgtgagaatagtggaggaaggtgagatggccagtttgaagcctgtgcctcccagcttaaatcctagcaggagagaggctctggggcagcccccatgggctcctgcccctttcaggcctacagccacatccccaagcccaccaggtgtcaggatagtcacagtgataccagttcagacactaccccatatacacctggaacattgaggatggaaactggactcacattcgacataccccactgggcacacgcacaaacacacacactatggggtggggtgggtgtaggggcttacaaagccttacacagggcgaggggttggtgggagggttggcacctgcacactccatctcctgctcaccacctgcctctaatctgagctgcagcctggctggtcctcccatttctaaagctgaatgtcaaacagtgccaaatgctggggcagggggtgaagaaccctctgtcccacccctagccaccagtgtcctccaagtgccccctcacctctccaggtgctcattgtaaccatttctcactagtgtcaggcccccagtgggaccacatgccactgcctgcacctttcggcagaggaacccccaccagacatcaccctttgccttagcaggggtgactttgtctctcctggctgggccatccttccgccaatctggcccttacacactcaggcctgtgcccactccctatctccttcccacccctacacacacactccctgcttgcaggaggccaaactgtccctcccttgctgaacacacacacacacacacacacacaggtggggactgggcacagctcttcacaccattcattctggtcatttcccccaaaggcatcccagcctgggggccagtggggaactgagggcaaggggatatagtgatggggctcagatggactgggaggagggggagggtgatgcattaattaatggcttcgttaattaatgtcatgttgcttgtcgctttctcagtgtgtgtgtgtggtccatgcccactgctggtgccagggtgggtgtccatgtgcacccggcctggatgccagctgtgtccttcgggggcgtgcgtgtaactgtagtgtagtcaggtgctcaatggagaatataaacatatacagaaaaatatatattttaagtttaaaaaacagaaaaacagacaaaacaatccccatcaggtagctgtctaacccccagctgggtctaatccttctcattacccacccgacctggctgcccctcaccttgggctgggggactggggggccatttccttttctctgccctttttttgttgttctattttgtacagacaagttggaaaaacaacagcgacaaaaaagtcaagaaactttgtaaaatatcgtgtgtgtgattccttgtaaaatattttcaaatggtttattacagaagatcagttattaaataatgttcatattttcacttcaaaaaaaaaaaaaaaa

SEQ ID NO: 4221 - DNA, 5723 bp, Homo sapiens
gcacatccctgcactagtggccgcaaccgagacgccgcgctccagcagctgctgccgcccagcccggccccgccgccgccccccagccctgcagccccgcagccccggccgcgcccagcccggcgaggacagcaccaggaggcggcccccagcgcggccacaaagacccccggcggcgtctctccgcggaccggtcctacttgaagtccatcatgtccttcggcagagacatggagctggagcacttcgacgagcgggataaggcgcagagatacagccgagggtcgcgggtgaacggcctgccgagcccgacgcacagcgcccactgcagcttctaccgcacccgcacgctgcagacgctcagctccgagaagaaggccaagaaagttcgtttctatcgaaacggagatcgatacttcaaagggattgtgtatgccatctccccagaccggttccgatcttttgaggccctgctggctgatttgacccgaactctgtcggataacgtgaatttgccccagggagtgagaacaatctacaccattgatgggctcaagaagatttccagcctggaccaactggtggaaggagagagttatgtatgtggctccatagagcccttcaagaaactggagtacaccaagaatgtgaaccccaactggtcggtgaacgtcaagaccacctcggcttctcgggcagtgtcttcactggccactgccaaaggaagcccttcagaggtgcgagagaataaggatttcattcggcccaagctggtcaccatcatcagaagtggcgtgaagccacggaaagctgtcaggattctgctgaacaagaaaacggctcattcctttgagcaggtcctcaccgatatcaccgatgccatcaagctggactcgggagtggtgaaacgcctgtacacgttggatgggaaacaggtgatgtgccttcaggacttttttggtgatgatgacatttttattgcatgtggaccggagaagttccgttaccaggatgatttcttgctagatgaaagtgaatgtcgagtggtaaagtccacttcttacaccaaaatagcttcatcatcccgcaggagcaccaccaagagcccaggaccgtccaggcgtagcaagtcccctgcctccaccagctcagttaatggaacccctggtagtcagctctctactccgcgctcaggcaagtcgccaagcccatcacccaccagcccaggaagcctgcggaagcagaggagctctcagcatggcggctcctctacgtcacttgcgtccaccaaagtctgcagctcgatggatgagaacgatggccctggagaagaagtgtcggaggaaggcttccagattccagctacaataacagaacgatataaagtcggaagaacaataggagatggaaattttgctgttgtcaaggaatgtgtagaaagatcgactgctagagagtacgctctgaaaattatcaagaaaagcaaatgtcgaggcaaagagcacatgatccagaatgaagtgtctattttaagaagagtgaagcatcccaatatcgttcttctgattgaggagatggatgtgccaactgaactgtatcttgtcatggaattagtaaaggggggagacctttttgatgccattacttccactaacaaatacaccgagagagacgccagtgggatgctgtacaacctagccagcgccatcaaatacctgcatagcctgaacatcgtccaccgtgatatcaagccagagaacctgctggtgtatgagcaccaagatggcagcaaatcactgaagctgggtgactttggactggccaccattgtagacggccccctgtacacagtctgtggcaccccaacatacgtggctccagaaatcattgcagagactggatacggcctcaaggtggacatctgggcagcaggtgtaatcacttatatcctgctgtgtggtttccctccattccgtggaagtggtgatgaccaggaggtgctttttgatcagattttgatggggcaggtggactttccttctccatactgggataatgtttccgattctgcaaaggagctcattaccatgatgctgttggtcgatgtagatcagcgattttctgctgttcaagtacttgagcatccctgggttaatgatgatggcctcccagaaaatgaacatcagctgtcagtagctggaaagataaagaagcatttcaacacaggccccaagccgaatagcacagcagctggagtttctgtcatagcactggaccacgggtttaccatcaagagatcagggtctttggactactaccagcaaccaggaatgtattggataagaccaccgctcttgataaggagaggcaggttttccgacgaagacgcaaccaggatgtgaggagccggtacaaggcgcagccagctcctcccgaactcaactcggaatcggaagactactccccaagctcctccgagactgttcgctcccctaactcgcccttttaataagacccttttactcaaagtcctagcttaaccctttgagactctgagatttttttcccccaaatttgtgtaaaacagtttcatctgatctatctagcgctcaatgcttgaatggcagaactgaaagtgttttcaggtatctttgtagcggtttccctttactgaataagatgacacgtggtgattgtgaagatggtaatttgctgctaatagagtcctcaaagggttaaggccaatttgcaatttttttttaaacttagaagcaatgaatgttttcatcagtcaagctaggatctgcagtatgtaatatagcacttgttaaccctctgagtgcatagaattttattgagaattcttgtttgggaatttttcaggcctttggatgtatacacacatgtttcttgattttactgcagatcaaggggtgttgttagatgctgaaatgtccagaaaagaaggacatttagaatgatatcttgtttgtccttttctgtgggtttagaacgtggcaggtttataacttagacacacgcacggttctttcttcttcacaatcctattcagaaacagattttttttttcattagagatatgactgtcagttgcagtgagttctgcatcccaagtggagggaattgggtttgtggcaaagagcttgacccaggaaatagatggtgccccccaaattgtctccacatgaagatgtactgatgacgccccagaaatgctgcttccatatcagctgctgctagcgccagcgcagactctcagggagtcaccacagcttgtcttgtgcttggtgagtgagggtctctctactcagtgtcagacatctacaggaaagaaacaactggtggaaaagagcaataaattgcccggtgctctgcagggctggaatttcaaacagaaagagggaataagatcctgtgatttttctcacctgcttttccacgcactgtggtcatcactgtgcaatctacatctagtatgaaatccacacataggagagctggggcacaaggggactggaggcagttgctttgcaagatggctgaggagaaagcacactgggaacacaatccagaatgttctaacaataagttttcagtgaataaaccactggcaagacatttccatgtgcacctttaggttacctatatagtctcctaggaagatcaggatgaaagacctagatgatacccctgaggataaaacctccatcccctaaaatgattttttttaaataccactgtctttagctgtccaggaggtcagagtgttttttctgtctttgggccaagtcctgtctgagacctgtattttcactcttgttaccaaatctatctccctagtgcagtgtctccaggcctgagtttcttctggaacagattccattttagaatggggattcacaggttctgtgcatcaccacagtgctcagagaggattctcctggggtgtcttagaggcaggtgcccaactcaaatgtattcccaaggtttgctgggctctgggatccacgagacaaccagagagggatatctcatgaaatttgcatctggtggctgaacagtacctatgttctctgttttgaatatactttaatacctgagagtcttaaaatttgtgaacaacgtttctatagtcctttattttcaaatgcacattgatcttcacttgctgcatttttactcttcaaccctgaaactatggtctacattaatatggatttttaaatcacatgtcattacttttgcaacaccatcaccaaaattttttgctcttttacatttaggttcatctctgtggtctgtgttgtcctgacatgtaaaaagcatatcgtttattgaggtttttttcccccccttttagagcatccggaagtgataacacgcaaaatcacaaagtagcataaatcagtaaattagttgagttgtttttgggggggaggtgggggtagggggcacagaacaccagaaagagtgttggtgtgtaggtagattccatattaatgaggaacactgaactagttggaaattactgctttctctagaaatataaagcaaagcactattccaaggctatggagtagctctacagcctggcctcaactctaaaagtgtgaagaatgcaatgggcagagacctacctgcagtggactgtcattttcctttctttctctgaattactgctttttctgtgggcattaactatattgctacagcatctagtgtactgagcctgcggtgcatggctcaggccttttcccatcgacgtctagggggactctggaccgtgtgaagctagggggtgtttctcagcacactgcagaagggcagctcagaagaatgcagggcccattcagcatggggatcccagcacatcactgtagaatttgagtgatctatgctgaataaacagtggaatgtgaccagtcaagtagaaatcttgagtaatcagatggaatgcaatctttctaacattaagctaccaagatcctgaatgtcagagatgtactcagagggttaacagacaagcacaaggcatgctgactacattggtgtatccagattgctttgcttttagccagtgctttctaatttttttctcgacattcttgggatagttcaagtttgaaataattaagtggtggtgttctttaaggaatttctataaccaaattgatcttatttttgatttcacttatcatagaacaaatatgtatcattatggcagtgtatctatgtaattatcaatttaatcatcaccaccggtgtttccatattttttcccaagtatttaatatagctctcttatggtggtggcctggtgatggggaccgtctttcttttactgacacatgaccaatcatatggtattttcaagggaattttaagattcatcttttcagtttgatagtagactagttaaggaagaactctttcattacttgcatcgtgtaaatcatctctgtagacatgtgttcatattaatgaacacattttttctcaacattgtagcagaaatcattttattcgtcatgatcaatgaatatgtgatttgctccagatcgttagaaggaaaagtaagatttcagtcatcaaaaatgtttttaccgtagccctcatctaacttacacgtggtgcatattaaaataagcagagaaaaaaaaatgtgaataaactactgaaaacaaaaaaaaaaaaaaaaaaaa

SEQ ID NO: 4222 - DNA, 2136 bp, Homo sapiens; identical to SEQ ID NO: 224

SEQ ID NO: 4223 - DNA, 912 bp, Homo sapiens; identical to SEQ ID NO: 1993

SEQ ID NO: 4224 - DNA, 2668 bp, Homo sapiens; identical to SEQ ID NO: 1959

SEQ ID NO: 4225 - DNA, 5906 bp, Homo sapiens; identical to SEQ ID NO: 233

SEQ ID NO: 4226 - DNA, 2842 bp, Homo sapiens; identical to SEQ ID NO: 579

SEQ ID NO: 4227 - DNA, 437 bp, Homo sapiens
agccccttatttcmcaggcccccggcttggggcgccttccttccccatggcgggacacctggcttcagatttcgccttctcgccccctccaggtggtggaggtgatgggccaggggggccggagccgggctgggttgatcctcggacctggctaagcttccaaggccctcctggagggccaggaatcgggccgggggttgggccaggctctgaggtgtgggggattcccccatgccccccgccgtatgagttctgtggggggatggcgtactgtgggccccaggttggagtggggctagtgccccaaggcggcttggagacctctcagcctgagggtgaagcaggagtcggggtggagagcaactccgatggggcctccccggagccctgcaccgtcaccccggtgccktacamctkstmatcagactctgaggagc

SEQ ID NO: 4228 - DNA, 438 bp, Homo sapiens
agccctcatttcaccaggcccccggcttggggcgccttccttccccatggcgggacacctggcttcagatttcgccttctcgccccctccaggtggtggaggtgatgggccaggggggccggagccgggctgggttgatcctcggacctggctaagcttccaaggccctcctggagggccaggaatcgggccgggggttgggccaggctctgaggtgtgggggattcccccatgccccccgccgtatgagttctgtggggggatggcgtactgtgggccccaggttggagtggggctagtgccccaaggcggcttggagacctctcagcctgagggtgaagcaggatcggggkgagagcaactccgatggggcctccccgggagccctgcacgtcamcccggtgccgkasaagctkgtkatctaggctcgaggagagt

SEQ ID NO: 4229 - DNA, 433 bp, Homo sapiens
tagcccccttatttcaccaggcccccggcttggggcgccttccttccccatggcgggacacctggcttcagatttcgccttctcgccccctccaggtggtggaggtgatgggccaggggggccggagccgggctgggttgatcctcggacctggctaagcttccaaggccctcctggagggccaggaatcgggccgggggttgggccaggctctgaggtgtgggggattcccccatgccccccgccgtatgagttctgtggggggatggcgtactgtgggccccaggttggagtggggctagtgccccaaggcggcttggagacctctcagcctgagggtgaagcaggagtcggggtggagagcaactccgatggggcctccccggagccctgcaccgtcaccccggtgccgkaaagckatgataatgacagt

SEQ ID NO: 4230 - DNA, 434 bp, Homo sapiens
tagccctcatttcaccaggcccccggcttggggcgccttccttccccatggcgggacacctggcttcagatttcgccttctcgccccctccaggtggtggaggtgatgggccaggggggccggagccgggctgggttgatcctcggacctggctaagcttccaaggccctcctggagggccaggaatcgggccgggggttgggccaggctctgaggtgtgggggattcccccatgccccccgccgtatgagttctgtggggggatggcgtactgtgggccccaggttggagtggggctagtgccccaaggcggcttggagacctctcagcctgagggtgaagcaggagtcggggkggagcaatccgatggggcctccccggagccctgcmmagtcamcccggtgccgkagaagtsgtkactagctctctagagt

SEQ ID NO: 4231 - DNA, 431 bp, Homo sapiens
tagccctcatttcaccaggcccccggcttggggcgccttccttccccatggcgggacacctggcttcagatttcgccttctcgccccctccaggtggtggaggtgatgggccaggggggccggagccgggctgggttgatcctcggacctggctaagcttccaaggccctcctggagggccaggaatcgggccgggggttgggccaggctctgaggtgtgggggattcccccatgccccccgccgtatgagttctgtggggggatggcgtactgtgggccccaggttggagtggggctagtgccccaaggcggcttggagacctctcagcctgagggkaagcaggatcggggkgagagcaactccgatggggcctccccgggagccctgcacgtcamcccggtgccgkgaactagcttaggattatasagt

SEQ ID NO: 4232 - DNA, 1976 bp, Homo sapiens
ggaggggcgggcggtccccaggcgggcgggcgcagggcgcagggcgccgacctgctggagagggggccccgggcgcgaggcggagtcccggcgcgcagccaggctggtgggggcccccggcaggctgcagattccctccggctccgggagccgcagcaggaccggccaggaggcgccatagaggggagccccatcccggtgctgacagtgcccaccgcgccctacgaggaccagcggccgtccggcggcgggggtctgcggcgacccaccggcctcttcgagggccagcgcaactacctgcccaactttatccagagcgtgctgtcgtccatcgacctgcgcgaccgtcagggctgcaccatggtggtgggcagcgacggcaggtactttagcaggacggccatcgagatcgtggtgcagatggccgcggccaacgggattggatgactgattattggacagaatggcatcttgtcaacacctgcggtctcctgcattatcaggaagatcaaggcagctggtggaatcattctaacagccagccactgccctggaggaccagggggagagtttggagtgaagtttaatgttgccaatggaggtcctgcacccgatgttgtctcagacaaaatctaccaaatcagcaaaacgattgaggaatatgctatatgtcctgatctccaaatcgacctatctcgactaggaagacaagaatttgacctagagaacaaattcaaaccattcagagtggagatagtggacccagtggatatctatcttaacctccttcagaccatctttgactttcatgccatcaagagtttgctgactgggcccagccaactgaagattcgcgttgatgcaatgcatggagttatggaaccttatgtgagaaaagttctgtgtgatgagctgggggccccagccaattctgcaataaactgtgttcccctggaagactttggagggcagcaccctgacccaaacctgacatatgcaatgactcttctggaagcaatgaaaggaggagaatatggatttggagctgcatttgatgctgatggggaccgttatatgatcctaggccaaaatggcttctttgtgagcccttctgactccctggccatcattgctgccaacctctcttgcattccatatttccatcagatgggggtccgcgggtttgggaggagtatgccaaccagcatggccctggacagagagacatctggtgatactatctgttgattgcaaagaaaaatatacccgactaataagaagaaaatgaatggtgcataatgacccaatctcctttggatataataaaactatgcctgatttgtggtcttcatttacatttagaatacctgaaacttggtaatttatgaagaaaaggaattcatttcttacagttatggaggctgagaagtccaaggtccaggggcataacagctcagagtaatttgatcgtctgaagccttctctcagctcttcaaagtcattctccgtccagctttgttccgttgctggtgagcagctgcgttcctctggaggaggagaggcgctctgatttttagagtttccagtttttctgttctgttttttccccatctttgtggttttatctacttttggtctttgatgatggtgatgatgtacaggtgggtttttggtgtgtggatgtcctttctgtttgttagttttccttctaacagacaggaccctcagctgtaggtctgttggagtaccctgcagtgtgaggtgtcagtgtgcacctgctggagggtgcctcccagttagaataactaatatagagaagtgcttaaaggagctgatggagctgaaaaccaaggctcgagaactacaggaagaatgcagaagcctcaggagccgatgcgatcaactggaagaaagggtatcagcaatggcagatgaaatgaatgaaatgaagcgagaaggaaagtttagagaaaaaa

SEQ ID NO: 4233 - DNA, 2499 bp, Homo sapiens; identical to SEQ ID NO: 1426

SEQ ID NO: 4234 - DNA, 2220 bp, Homo sapiens; identical to SEQ ID NO: 1934

SEQ ID NO: 4235 - DNA, 3282 bp, Homo sapiens; identical to SEQ ID NO: 216

SEQ ID NO: 4236 - DNA, 7239 bp, Homo sapiens; identical to SEQ ID NO: 2511

SEQ ID NO: 4237 - DNA, 5843 bp, Homo sapiens; identical to SEQ ID NO: 590

SEQ ID NO: 4238 - DNA, 3077 bp, Homo sapiens
gagcggacaggcgtggcggccggagccccagcatccctgcttgaggtccaggagcggagcccgcggccaccgccgcctgatcagcgcgaccccggcccgcgcccgccccgcccggcaagatgctgcccgtgtaccaggaggtgaagcccaacccgctgcaggacgcgaacctctgctcacgcgtgttcttctggtggctcaatcccttgtttaaaattggccataaacggagattagaggaagatgatatgtattcagtgctgccagaagaccgctcacagcaccttggagaggagttgcaagggttctgggataaagaagttttaagagctgagaatgacgcacagaagccttctttaacaagagcaatcataaagtgttactggaaatcttatttagttttgggaatttttacgttaattgaggaaagtgccaaagtaatccagcccatatttttgggaaaaattattaattattttgaaaattatgatcccatggattctgtggctttgaacacagcgtacgcctatgccacggtgctgactttttgcacgctcattttggctatactgcatcacttatatttttatcacgttcagtgtgctgggatgaggttacgagtagccatgtgccatatgatttatcggaaggcacttcgtcttagtaacatggccatggggaagacaaccacaggccagatagtcaatctgctgtccaatgatgtgaacaagtttgatcaggtgacagtgttcttacacttcctgtgggcaggaccactgcaggcgattgcagtgactgccctactctggatggagataggaatatcgtgccttgctgggatggcagttctaatcattctcctgcccttgcaaagctgttttgggaagttgttctcatcactgaggagtaaaactgcaactttcacggatgccaggatcaggaccatgaatgaagttataactggtataaggataataaaaatgtacgcctgggaaaagtcattttcaaatcttattaccaatttgagaaagaaggagatttccaagattctgagaagttcctgcctcagagggatgaatttggcttcatttttcagtgcaagcaaaatcatcgtgtttgtgaccttcaccacctacgtgctcctcggcagtgtgatcacagccagccgcgtgttcgtggcagtgacgctgtatggggctgtgcggctgacggttaccctcttcttcccctcagccattgagagggtgtcagaggcaatcgtcagcatccgaagaatccagacctttttgctacttgatgagatatcacagcgcaaccgtcagctgccgtcagatggtaaaaagatggtgcatgtgcaggattttactgctttttgggataaggcatcagagaccccaactctacaaggcctttcctttactgtcagacctggcgaattgttagctgtggtcggccccgtgggagcagggaagtcatcactgttaagtgccgtgctcggggaattggccccaagtcacgggctggtcagcgtgcatggaagaattgcctatgtgtctcagcagccctgggtgttctcgggaactctgaggagtaatattttatttgggaagaaatacgaaaaggaacgatatgaaaaagtcataaaggcttgtgctctgaaaaaggatttacagctgttggaggatggtgatctgactgtgataggagatcggggaaccacgctgagtggagggcagaaagcacgggtaaaccttgcaagagcagtgtatcaagatgctgacatctatctcctggacgatcctctcagtgcagtagatgcggaagttagcagacacttgttcgaactgtgtatttgtcaaattttgcatgagaagatcacaattttagtgactcatcagttgcagtacctcaaagctgcaagtcagattctgatattgaaagatggtaaaatggtgcagaaggggacttacactgagttcctaaaatctggtatagattttggctcccttttaaagaaggataatgaggaaagtgaacaacctccagttccaggaactcccacactaaggaatcgtaccttctcagagtcttcggtttggtctcaacaatcttctagaccctccttgaaagatggtgctctggagagccaagatacagagaatgtcccagttacactatcagaggagaaccgttctgaaggaaaagttggttttcaggcctataagaattacttcagagctggtgctcactggattgtcttcattttccttattctcctaaacactgcagctcaggttgcctatgtgcttcaagattggtggctttcatactgggcaaacaaacaaagtatgctaaatgtcactgtaaatggaggaggaaatgtaaccgagaagctagatcttaactggtacttaggaatttattcaggtttaactgtagctaccgttctttttggcatagcaagatctctattggtattctacgtccttgttaactcttcacaaactttgcacaacaaaatgtttgagtcaattctgaaagctccggtattattctttgatagaaatccaataggaagaattttaaatcgtttctccaaagacattggacacttggatgatttgctgccgctgacgtttttagatttcatccagagatgggatctcgctgtgttgtcctggctggtctcaaactcctaggctcaagcaatcctcctccctcctcaagcaaacctcagtgctgggattataggcatgagccactgtacctggctaaatgttgtttttttgatattcaatttttgtttatagaattttcatttgttttgctcttatacttttcatctttttatgtttattgaccaattaaatatcatttgggtaagcacctatttaagtgtcttaacaatttttctattgagtactctgggtttttgttttgtttttcttactgatttgtagaattctttatgtattctgaattgcagataccttccttctgtactaatgcttatctttttagccctgtaatattgtgttttcataaacatacttatcaatctttaaaaaaaaaaaaaa

SEQ ID NO: 4239 - DNA, 6253 bp, Homo sapiens; identical to SEQ ID NO: 2515

SEQ ID NO: 4240 - DNA, 7326 bp, Homo sapiens; identical to SEQ ID NO: 535

SEQ ID NO: 4241 - DNA, 2620 bp, Homo sapiens; identical to SEQ ID NO: 1441

SEQ ID NO: 4242 - DNA, 2431 bp, Homo sapiens
acatgctgcccaggctgcgcgggtgattggcttggctggacctgaatgatgcggctgtgattgctgaattgtctgggcaggtttggagtctctggcaagctcccctgactgtgcatccctctggagacgaagaggagggggaggcctgtcctctctgggatccattggtcacatccccctgaggattcccgaatgcctacctccagtgtcgtcaacatggagttctgaagtccatgtggctcttcacagtgaatcaggtgttaaggaagatgcagagacgccacagcagcaacacggataacattccacctgaaagaaaccgcagccaggcgctcagctccgaggcgagtgtggatgaaggtggcgtctttgagagtctgaaggcagaggcagcctccccaccagcgctcttctcgggcttatcaggcagcctccccaccagctcgttcccctccagcctggtgctgggctcctcggctggcggcggggacgtgttcatccagatgcccgcgtccagggaggaaggagggggccggggcgaggggggcgcctaccaccaccgccagccccaccaccatttccaccatggcggccaccgcgggggctccctgctgcagcacgtgggtggggaccaccgggggcactcggaggagggaggcgacgagcagcctgggacgcccgcccccgccctgtccgagctgaaggctgtgatctgctggctccagaaaggactccccttcatcctgatcctcctggccaaactgtgctttcagcataagctcggcattgctgtgtgcatcgggatggccagcaccttcgcctatgccaactccacgcttcgagaacaggtctcactgaaggagaagaggtcagtgctggtcatcttgtggatcctggcctttctggcggggaacaccctctatgtgctttatacattcagctcccagcagctgtacaacagcctcatattcctgaagcccaacctggagatgctggacttctttgacctgctatggattgtggggatcgcagactttgttctgaagtacatcaccatcgccctcaagtgcctcatcgtggccctgcccaagatcatcctggctgtcaagtccaagggaaagttctatctggtcatcgaggagctgagccagctgttccgatcccttgtccccatccagctgtggtacaaatacatcatgggtgacgactcctccaacagctacttcctgggcggggtcctgatcgttctctacagcctctgcaagtccttcgacatctgtggacgtgtgggcggagttaggaaagccctgaagcttctctgtacctctcagaactatggagtccgagccaccgggcagcagtgcacagaagctggtgacatctgcgccatctgtcaggccgagttccgagagcctctgattctcctgtgccagatgctgttgaaggggcacaagaaattggagctggagaagattgatgaaagtgcaggtgtgtaaggaaatagaacagtctgctgggagtcagacctggaattctgattccaaactctttattactttgggaagtcactcagcctccctgtagccatctccagggtgacggaacccagtgtattacctgctggaaccaaggaaactaacaatgtaggttactagtgaataccccaatggtttctccaattatgcccatgccaccaaaacaataaaacaaaattctctaacactgcaaagagtgagccatgcctgttaacactgtaaagaatgtaacatgtgggggacacacaggggcagatgggatggtttagtttaggattttattagtgcatgccctaccctctgggggaacgtcccatctgaggttttcttctcggtggggggatttaacttctgtcctagggaaaacagtgtctgatgaggagtgtttccaacacaggctacatgaattcccctataccagtgcgaaagcagccaggagtccccgttggaaaagaacaatgccactctcttttatgtatcttggttctgcaactcatttgttgtaagtagggttaatcgagtatcaggttcacagtatcctgcccttattattttatgattcactgactcaagttccacgaagtccttagaaatggacctcttcatgtaaaatatcttgagaataataaatgtgagggaataagaaaggcaagctttggacacagatatgataggtgcatcagcttcggaagagaagaatgatgtgcagagtgttaggaagacatccgggctgctgagactcgggattagaagaaagagaggtaaataaagtgggtcctggaatcttttaggacttctgctgtaggacaaacagctgcctttggtgttttaatgtctcccaaagtacccttcagccaataaataccatctgttggtgcaaaaaaaaaaaaaaaaaa

SEQ ID NO: 4243 - DNA, 2914 bp, Homo sapiens; identical to SEQ ID NO: 2454

SEQ ID NO: 4244 - DNA, 1625 bp, Homo sapiens
gttgtgaagttgcggtgatccagcgcagagccccgtcctgattgatcgcatcgcggggctcagatgactgtaaaatgaatagatgaaattcttgcttctcgaagattttcttgggcatctcccggaaagtgcgttttaaggcgaagtcatgatgtattctcccatctgtctcactcaggatgaatttcacccattcatcgaggcacttcttccacatgtccgtgcaattgcctatacttggttcaacctgcaggctcgaaaacgcaagtactttaaaaagcatgagaagcgaatgtcaaaggatgaagaaagagcagtcaaagatgagcttctcagtgaaaagcctgaaatcaaacagaagtgggcatccaggctccttgccaaactgcgcaaagatattcgccaggagtatcgagaggacttcgtgctcaccgtgactggcaagaagcacccgtgctgtgtcttatccaatcccgaccagaagggtaagattaggagaatcgactgcctgcgacaggcagacaaagtctggcgtctggatctagtcatggtgatcctgttcaaaggcatccccttggaaagtaccgatggagagcggctcatgaaatccccacattgcacaaacccagcactttgtgtccagccacatcatatcacagtatcagttaaggagcttgatttgtttttggcatactacgtgcaggagcaagattctggacaatcaggaagtccaagccacaatgatcctgccaagaatcctccaggttaccttgaggatagttttgtaaaatctggagtcttcaatgtatcagaacttgtaagagtatccagaacgcccataacccagggaactggagtcaacttcccaattggagaaatcccaagccaaccatactatcatgacatgaactcgggggtcaatcttcagaggtctctgtcttctccaccaagcagcaaaagacccaaaactatatccatagatgaaaatatggaaccaagtcctacaggagacttttacccctctccaagttcaccagctgctggaagtcgaacatggcacgaaagagatcaagatatgtcttctccgactactatgaagaagcctgaaaagccattgttcagctctgcatctccacaggattcttccccaagactgagcactttcccccagcaccaccatcccggaatacctggagttgcacacagtgtcatctcaactcgaactccacctccaccttcaccgttgccatttccaacacaagctatccttcctccagccccatcgagctacttttctcatccaacaatcagatatcctccccacctgaatcctcaggatactctgaagaactatgtaccttcttatgacccatccagtccacaaaccagccagtcctggtacctgggctagcttggttcctttccaagtgtcaaataggacacccatcttaccggccaatgtccaaaattacggtttgaacataattggagaacctttccttcaagcagaaacaagcaactgagggaaaaagaaacacaacaatagtttaagaaattttttttttaaataaaaaaaaaggaaaagaggaagactggacaaaacaacacaaaggcagaaaggaaag

SEQ ID NO: 4245 - DNA, 2218 bp, Homo sapiens
cccctcggcggctgctgcgccgcgctcccggcgcactcggagcccggcggggaccgggaggcagagacggggcggccgtggctccgagggcgggagctgagccgggccccgggaccgaagtttggcggcggctccgggaggcagagcgggctccccgggcgacttccaggcccctctcgcgtcctcgccccggacccgtgggcagccgggggggacggaagccgcggccgggccaactccgaggcggggacgccgcgacgggaacttgaggcccgagagggatgtgaaggcccaaaatgaccctcttaccgggagacaattctgactacgactacagcgcgctgagctgcacctcggacgcctccttccacccggccttcctcccgcagcgccaggccatcaagggcgcgttctaccgccgggcgcagcggctgcggccgcaggatgagccccgccagggctgtcagcccgaggaccgccgccgtcggatcatcatcaacgtaggcggcatcaagtactcgctgccctggaccacgctggacgagttcccgctgacgcgcctgggccagctcaaggcctgcaccaacttcgacgacatcctcaacgtgtgcgatgactacgacgtcacctgcaacgagttcttcttcgaccgcaacccgggggccttcggcactatcctgaccttcctgcgcgcgggcaagctgcggctgctgcgcgaaatgtgcgcgctgtccttccaggaggagctgctgtactggggcatcgcggaggaccacctggacggctgctgcaagcgccgctacctgcagaagattgaggagttcgcggagatggtggagcgggaggaagaggacgacgcgctggacagcgagggccgcgacagcgagggcccggccgagggcgagggccgcctggggcgctgcatgcggcgactgcgcgacatggtggagaggccgcactcggggctgcctggcaaggtgttcgcctgcctgtcggtgctcttcgtgaccgtcaccgccgtcaacctctccgtcagcaccttgcccagcctgagggaggaggaggagcagggccactgttcccagatgtgccacaacgtcttcatcgtggagtcggtgtgcgtgggctggttctccctggagttcctcctgcggctcattcaggcgcccagcaagttcgccttcctgcggagcccgctgacgctgatcgacctggtggccatcctgccctactacatcacgctgctggtggacggcgccgccgcaggccgtcgcaagcccggcgcgggcaacagctacctggacaaggtggggctggtgctgcgcgtgctgcgggcgctgcgcatcctgtacgtgatgcgcctggcgcgccactccctggggctgcagacgctggggctcacggcccgccgctgcacccgcgagttcgggctcctgctgctcttcctctgcgtggccatcgccctcttcgcgcccctgctctacgtcatcgagaacgagatggccgacagccccgagttcaccagcatccctgcctgctactggtgggctgtcatcaccatgacgacggtgggctatggcgacatggtccccaggagcaccccgggccaggtagtggccctgagcagcatcctgagcggcatcctgctcatggccttcccagtcacctccatcttccacaccttctcccgctcctacctggagctcaagcaggagcaagagagggtgatgttccggagggcgcagttcctcatcaaaaccaagtcgcagctgagcgtgtcccaggacagtgacatcttgttcggaagtgcctcctcggacaccagagacaataactgagcgcggaggacacgcctgccctgcctgccatctgtggcccgaagccattgccatccactgcagacgcctggagagggacaggccgcttccgagtgcagtcctggcgcagcaccgactcccacgcacccggggaaggacaccctcactcccacaccccgggaagaacactagaacatcagcagaggggccctgcccctccgcctgcagccgtgaaaggaagctgggtcatcagcccagccccgcccaccccagcccctatgtgtgtttccctcaataaggagatgccttgttcttttcaccatgcaaataacatgcccagcaaaaacttgctttatgggtctgcctggagaaaaaaaaaaaatacaaacagcagaaacagc

SEQ ID NO: 4246 - DNA, 1796 bp, Homo sapiens
aaatccgagcctcgcgtgggctcctggcccccgacggacaccaccaggcccacggagcccaccatgccgcgcccggcccccgcgcgccgcctcccgggactcctcctgctgctctggccgctgctgctgctgccctccgccgcccccgaccccgtggcccgcccgggcttccggaggctggagacccgaggtcccgggggcagccctggacgccgcccctctcctgcggctcccgacggcgcgcccgcttccgggaccagcgagcctggccgcgcccgcggtgcaggtgtttgcaagagcagacccttggacctggtgtttatcattgatagttctcgtagcgtacggcccctggaattcaccaaagtgaaaacttttgtctcccggataatcgacactctggacattgggccagccgacacgcgggtggcagtggtgaactatgctagcactgtgaagatcgagttccaactccaggcctacacagataagcagtccctgaagcaggctgtgggtcgaatcacacccttgtcaacaggcaccatgtcaggcctagccatccagacagcaatggacgaagccttcacagtggaggcaggggctcgagagccctcttctaacatccctaaggtggccatcattgttacagatgggaggccccaggaccaggtgaatgaagtggcggctcgggcccaagcatctggtattgagctctatgctgtgggcgtggaccgggcagacatggcgtccctcaagatgatggccagtgagcccctagaggagcatgttttctacgtggagacctatggggtcattgagaaactttcctctagattccaggaaaccttctgtgcgctggacccctgtgtgcttggaacacaccagtgccagcacgtctgcatcagtgatggggaaggcaagcaccactgtgagtgtagccaaggatacaccttgaatgccgacaagaaaacgtgttcagctcttgataggtgtgctcttaacacccacggatgtgagcacatctgtgtgaatgacagaagtggctcttatcattgtgagtgctatgaaggttataccttgaatgaagacaggaaaacttgttcagctcaggataaatgtgctttgggtacccatgggtgtcagcacatttgtgtgaatgacagaacagggtcccatcattgtgaatgctatgagggctacactctgaatgcagataaaaaaacatgttcagtccgtgacaagtgtgtcctaggctctcatggttgccagcacatttgtgtgagtgatggggccgcatcctaccactgtgattgctatcctggctacaccttaaatgaggacaagaaaacatgttcagccactgaggaagcacgaagacttgtttccactgaagatgcttgtggatgtgaagctacactggcattccaggacaaggtcagctcgtatcttcaaagactgaacactaaacttgatgacattttggagaagttgaaaataaatgaatatggacaaatacatcgttaaattgctccaatttctcacctgaaaatgtggacagcttggtgtacttaatactcatgcattcttttgcacacctgttattgccaatgttcctgctaataatttgccattatctgtattaatgcttgaatattactggataaattgtatgaagatcttctgcagaatcagcatgatttttccaaggaaatacatatgcagatacttattaagagtaaactttagtgtctctaagttatgactgtgaaatgattggtaggaaatagaatgaaaag

SEQ ID NO: 4247 - DNA, 2355 bp, Homo sapiens
atgagatcaaatgcgagggagatgcaccgtcaattacaaacacttggacaagtctaactttttttttcttctacaaaaacgctttcaaaagcaaccttagcaacgcccaaataagaagccacctctaagcaaaatagtatatgtataaacggagggcgaatatatacaagtatatatatatgtatattacagacgcacaggtttacacccggtgaactttttctttttctttttctttttctttttttttaagaaaaactagtgacattgcagagaaggacgcttcctctctatcttttggcgcattagtgaagggggtattctattttgttaaagcgcccaagggggcgcagggaccttggagagaagagtggggaggaaagaggaagggtgggtggggggcagagggcgagtcggcggcggcgagggcaagctctttcttgcggcacgatgccgtctctgctggtgctcactttctccccgtgcgtactactcggctgggcgttgctggccggcggcaccggtggcggtggcgttggcggcggcggcggtggcgcgggcataggcggcggacgccaggagagagaggcgctgccgccacagaagatcgaggtgctggtgttactgccccaggatgactcgtacttgttttcactcacccgggtgcggccggccatcgagtatgctctgcgcagcgtggagggcaacgggactgggaggcggcttctgccgccgggcactcgcttccaggtggcttacgaggattcagactgtgggaaccgtgcgctcttcagcttggtggaccgcgtggcggcggcgcggggcgccaagccagaccttatcctggggccagtgtgcgagtatgcagcagcgccagtggcccggcttgcatcgcactgggacctgcccatgctgtcggctggggcgctggccgctggcttccagcacaaggactctgagtactcgcacctcacgcgcgtggcgcccgcctacgccaagatgggcgagatgatgctcgccctgttccgccaccaccactggagccgcgctgcactggtctacagcgacgacaagctggagcggaactgctacttcaccctcgagggggtccacgaggtcttccaggaggagggtttgcacacgtccatctacagtttcgacgagaccaaagacttggatctggaagacatcgtgcgcaatatccaggccagtgagagagtggtgatcatgtgtgcgagcagtgacaccatccggagcatcatgctggtggcgcacaggcatggcatgaccagtggagactacgccttcttcaacattgagctcttcaacagctcttcctatggagatggctcatggaagagaggagacaaacacgactttgaagctaagcaagcatactcgtccctccagacagtcactctactgaggacagtgaaacctgagtttgagaagttttccatggaggtgaaaagttcagttgagaaacaagggctcaatatggaggattacgttaacatgtttgttgaaggattccacgatgccatcctcctctacgtcttggctctacatgaagtactcagagctggttacagcaaaaaggatggagggaaaattatacagcagacttggaacagaacatttgaaggtatcgccgggcaggtgtccatagatgccaacggagaccgatatggggatttctctgtgattgccatgaccgatgtggaggcgggcacccaggaggttattggtgattattttggaaaagaaggtcgttttgaaatgcggccgaatgtcaaatatccttggggccctttaaaactgagaatagatgaaaaccgaattgtagagcatacaaacagctctccctgcaaatcatcaggtggcctagaagaatcggcagtgacaggaattgtcgtgggggctttactaggagctggcttgctaatggccttctactttttcaggaagaaatacagaataaccattgagaggcgaacccagcaagaagaaagtgaccttggaaaacatcgggaattacgggaagattccatcagatcccatttttcagtagcttaaaggaagccccccactttttttttttctgcctgagattctttaaggagatagacgggttgaaagacatcaatgaaacagaaggggcgttcttgaagaattcataattttaagcagttagtaatttcattttaaaatttctgtagaagctcaggaattatgattaatcaccatctgcctccaggcctttcatctcatgacaaacaaatataataatgatatcgtgtcactctgttaaatgttcatactgtttcaagcccatatgattagatttatgttttt

SEQ ID NO: 4248 - DNA, 1118 bp, Homo sapiens
aaaaacgttctcactcgctctctgctcgctgcgggcgctccccgccctctgctgccagaaccttggggatgtgcctagacccggcgcagcacacgtccgggccaaccgcgagcagaacaaacctttggcgggcggccaggaggctccctcccagccaccgcccccctccagcgcctttttttccccccatacaatacaagatcttccttcctcagttcccttaaagcacagcccagggaaacctcctcacagttttcatccagccacgggccagcatgtctgggggcaaatacgtagactcggagggacatctctacaccgttcccatccgggaacagggcaacatctacaagcccaacaacaaggccatggcagacgagctgagcgagaagcaagtgtacgacgcgcacaccaaggagatcgacctggtcaaccgcgaccctaaacacctcaacgatgacgtggtcaagattgactttgaagatgtgattgcagaaccagaagggacacacagttttgacggcatttggaaggccagcttcaccaccttcactgtgacgaaatactggttttaccgcttgctgtctgccctctttggcatcccgatggcactcatctggggcatttacttcgccattctctctttcctgcacatctgggcagttgtaccatgcattaagagcttcctgattgagattcagtgcatcagccgtgtctattccatctacgtccacaccgtctgtgacccactctttgaagctgttgggaaaatattcagcaatgtccgcatcaacttgcagaaagaaatataaatgacatttcaaggatagaagtatacctgattttttttccttttaattttcctggtgccaatttcaagttccaagttgctaatacagcaacaatttatgaattgaattatcttggttgaaaataaaaagatcactttctcagttttcataagtattatgtctcttctgagctatttcatctatttttggcagtctgaatttttaaaacccatttaaatttttttccttacctttttatttgcatgtggatcaaccatcgctttattggctgagatatgaacatattgttgaaaggtaatttgagag

SEQ ID NO: 4249 - DNA, 1672 bp, Homo sapiens
aaggcgattgtcatatgatagctaagaagtggcacattaatgaagcgccgctacaggggtcttttctgctcctgtcaccgcttaaaactatcagatggttcgagggaggacatggaggcagccacctagctcagcggagacgcggagcccacagcagcgccctccggagccctaacacgtcgctgccaccatccgcgccgggactccgcagccgagctcggccgcccgcaggacgctccaggagcgtcgcggaccgggcggcacgggacgctgcggggctgagctcaagagcccaggttcgcgccgagtccaaccggacccggacgctgcgcgcggagtgcgcgtcgagtgcgcgccgagagagaagcggcgcgcagcggcgtcctcccggatgcggacgcgcaacttgaagcaactttaagatccgagcagtccgccggcccgcgcggacccagagcaagaagagggcgaggaagaagatgcctcggcccggccgcaacacgtacagcgaccagaagccgccctactcgtacatctcgctgaccgctatggccatccagagctctcccgagaagatgctgccgctgagcgagatctacaagttcatcatggaccgcttcccctactacagggagaacacgcagcgctggcagaacagtctgcgccacaacctctccttcaacgactgcttcatcaagatcccgcggcggccggaccagccaggcaagggcagcttctgggcgctgcacccaagctgcggggacatgttcgagaacggcagcttcctgcggcgccgcaagcgcttcaaggtgcttaagtccgaccacctggcgcccagcaagccagccgacgcggcgcagtacctgcagcagcaggccaagctgcggctcagcgcgctggcggcctcgggcacgcacctgccacagatgcccgccgccgcctacaacttgggcggcgtggcgcagccctcgggcttcaagcaccccttcgccatcgagaacatcatcgcgcgggaatacaagatgcctggggggctggccttctccgccatgcagccggtgcccgctgcctacccgctccccaaccagttgactaccatgggcagctcgctgggcaccggctggccacacgtgtatggctccgccggcatgatcgactcggccacccccatctccatggcgagtggcgactacagcgcctacggcgtgccgttgaagccgctgtgccacgcggcgggccaaacgctgcccgccatccccgtgcccattaagcccacgccggccgccgtgcccgcgctgcctgcgctgccagcgcccatccccaccttgctctcgaactcgccgccctcgctcagccccacgtcctcgcaaacagccaccagccaaagcagccccgccacccccagcgaaacgctcaccagcccggcctccgccttgcactcggtggcggtgcactgacccgcaggagcccacgccccctctcgttctcctccccaccacctcactcgccttccctggctcccagtcctgccggccccaacctgggaccgccaccctaacttgttcatttcaccttcggccaacccgccttgccccaagagaactttgttttggacccaggagaccaaacacaaacttgcagatgggccgagaggcgcgtgggagttgtcctc

SEQ ID NO: 4250 - DNA, 1506 bp, Homo sapiens
gcagaaagagattaccagccacagacgggtcatgagcgcggtattactgctggccctcctggggttcatcctcccactgccaggagtgcaggcgctgctctgccagtttgggacagttcagcatgtgtggaaggtgtccgacctgccccggcaatggacccctaagaacaccagctgcgacagcggcttggggtgccaggacacgttgatgctcattgagagcggaccccaagtgagcctggtgctctccaagggctgcacggaggccaaggaccaggagccccgcgtcactgagcaccggatgggccccggcctctccctgatctcctacaccttcgtgtgccgccaggaggacttctgcaacaacctcgttaactccctcccgctttgggccccacagcccccagcagacccaggatccttgaggtgcccagtctgcttgtctatggaaggctgtctggaggggacaacagaagagatctgccccaaggggaccacacactgttatgatggcctcctcaggctcaggggaggaggcatcttctccaatctgagagtccagggatgcatgccccagccaggttgcaacctgctcaatgggacacaggaaattgggcccgtgggtatgactgagaactgcaataagaaagattttctgacctgtcatcgggggaccactattatgacacacggaaacttggctcaagaacccactgattggaccacatcgaataccgagatgtgcgaggtggggcaggtgtgtcaggagacgctgctgctcctagatgtaggactcacatcaaccctggtggggacaaaaggctgcagcactgttggggctcaaaattcccagaagaccaccagccactcagcccctcctggggtgcttgtggcctcctatacccacttctgctcctcggacctgtgcaatagtgccagcagcagcagcgttctgctgaactccctccctcctcaagctgcccctgtcccaggagaccggcagtgtcctacctgtgtgcagccccttggaacctgttcaagtggctccccccgaatgacctgccccaggggcaccactcattgttatgatgggtacattcatctctcaggaggtgggctgtccaccaaaatgagcattcagggctgcgtggcccaaccttccagcttcttgttgaaccacaccagacaaatcgggatcttctctgcgcgtgagaagcgtgatgtgcagcctcctgcctctcagcatgagggaggtggggctgagggcctggagtctctcacttggggggtggggctggcactggccccagcgctgtggtggggagtggtttgcccttcctgctaactctattacccccacgattcttcaccgctgctgaccacccacactcaacctccctctgacctcataacctaatggccttggacaccagattctttcccattctgtccatgaatcatcttccccacacacaatcattcatatctactcacctaacagcaaca

SEQ ID NO: 4251 - DNA, 1370 bp, Homo sapiens
gttgcggtggccaatagacgcattcggaacatcggcggctgcccgggtgacttggttatatgtcacagaataacattcgagaatgggacatggaatgaggcgacggccccagcaagccccagcagccccagccccagccccaggcccagcagcagcagcagcagcccctgctctcccgccgcccggagaggctctgcagccatgaagccaaccgtcccgaggcaccgccggtaagcagggagcctccgcggagctcccgccgccgctcccccttggtgagcctcgccaccagcgggggctcagaggaggaggacaaagacggcggggtgctgttccacgtcaacaagagcggcttccccatcgacagccacacctgggagcgcatgtggatgcacgtggccaaggtgcaccctaaggggggagaaatggtgggcgccatcaggaacgccgccttcttggtaaagccttcaataccccaggtcccaaactacaggctgtcgatgacgatcccagactggctccaggcgatccagaattacatgaagaccctacaatataatcacacagggacccagttctttgaaattaggaaaatgagaccgctgagtgggttaatggaaacagcaaaagaaatgacccgagagtccttgcctatcaaatgccttgaagctgtcatcctgggcatctacttaaccaatgggcagccttccattgagcggttccccatcagctttaaaacctacttctcaggaaactactttcaccacgttgtgctggggatttactgcaatggccgctatggctcattgggcatgagccgcagggctgagctgatggacaagccattgacttttcggactctgagtgacctcatctttgactttgaggactcttacaagaaatacctgcacacagtcaagaaggtcaagattgggctgtacgtcccccatgagcctcatagcttccagcccattgagtggaagcagctggtcctcaacgtctcaaagatgctgagggctgacataaggaaggagctggagaaatatgccagggacatgagaatgaagatcctgaaacctgcaagtgcccactctccgacccaagtgagaagccggggaaaatccctgtcccccagaaggagacaggcaagccccccgaggaggctcggccggcgagagaagtcgcctgcactgcctgaaaagaaggtggctgatctgagcactctgaatgaagtgggctatcaaatccgaatttagccaagccataccggccagcaagagggtttctgtggtgcttctctctgcactttacccagcatcttcaggaggaactgcaactatttattaagaacttgtgaattttatttttaa

SEQ ID NO: 4252 - DNA, 3745 bp, Homo sapiens
catttcctcccagcctcgtgcgggaaatggctttaattctgacggcagggctgtgagggactagcgggaacccgagccttttgtcaaggaactgcggcgtcggtggccagtcaaccccgccgccgcggagccgctgcactgctgggggatctcccagcagctctgacgagcgcgggctgcagcatgggcagaaaacgctgctctgcagattagctgggtggattttttaagcgcaccccaccccccaaacccataaaataacaaaaccaacccgcagtggccgaccggagatagctaagatgccgcgcaggagtttccacctggatgtttgaggttgtgtagatgtggccggcacccttgagagtggagctagggggtgcagactgagcagtgaacagaaggagccttggacagggctgggccagcctcccgagttccaggagcgaattgcaaacccaccgggaaaatgagcgaagagacggtccccgaggctgcctcgccgccgcccccgcaggggcagccttactttgaccgcttctcagaggacgaccccgagtacatgcgccttcgcaaccgggcggcggacctgcggcaggacttcaacctgatggagcagaagaagcgcgtcaccatgatcctgcagagtccctctttcagggaggagctggaaggcctcatccaggagcagatgaagaaggggaacaactcctccaacatctgggccctgcgacagatcgcggacttcatggccagcacctcccacgcagtcttcccgacatcttccatgaatgtctccatgatgacgcctatcaatgacctccacacagctgactccctgaacctggccaaaggggagcggctcatgcggtgcaagatcagcagtgtctaccgactcctggacctctatggctgggcccagctgagtgacacctatgtcacgttgagagtcagcaaggagcaggaccacttcctgatcagccctaagggagtttcttgcagtgaagtcacagcgtccagcctgatcaaggtgaacattctgggagaggtggtggagaagggcagcagctgcttcccagtggacaccacaggcttctgtctgcactcggccatctatgcagcgaggcccgacgtgcgctgcatcatccacctgcacacaccggccacagcagcggtgtcggccatgaagtggggcctcctgcctgtctcccacaatgccctgctggtgggggacatggcctattatgacttcaatggggaaatggagcaggaagccgatcggatcaacctgcagaagtgccttggacccacctgcaagatcctggtgctaagaaaccatggagtggttgctctgggtgacacggtagaggaggcattttacaagatcttccacctgcaggctgcatgtgagatacaggtgtcggctctgtccagtgccgggggagtggagaacctcatcctcctggagcaggagaagcaccggccccatgaggtgggctccgtgcagtgggccgggagcacctttgggcctatgcagaagagtcggctgggggagcatgagtttgaggccctcatgaggatgctggacaacctgggctacagaacaggttacacgtatcgccacccctttgttcaagagaaaaccaaacacaaaagtgaggtggagattccagccacggtcacagccttcgtgtttgaggaggacggtgccccggtgcccgccctgcgacagcatgcccagaagcagcagaaggagaagacccgctggctcaatacgcccaacacctacctgcgggtcaatgtggccgatgaggtccagaggagcatgggcagcccccgacccaagaccacgtggatgaaggctgacgaggtggagaaatccagcagtggcatgccgattcgcatcgaaaacccaaaccaatttgtgcctctctatactgacccccaggaagtactggagatgaggaacaagattcgagaacaaaaccgacaagatgtgaagtcagcggggcctcagtcccagctcctggcgagcgtcattgccgagaagagccgaagcccgtctacagagagccagctgatgtccaagggagacgaggataccaaagacgattcagaggagacggtgcccaaccccttcagccaactcactgaccaggagttggaggagtacaagaaagaggtggagaggaagaaactagaacttgatggagagaaagaaactgccccagaagagcctggctcacctgcaaagtctgcacctgcttctccagtgcagagcccagcgaaggaggcagagacaaagagccctttagtctctccttccaagtctttagaggaaggtactaagaagacagaaacaagcaaagccgccaccacagagcccgaaacaacccagccggaaggggtggtggtcaacgggagggaggaggagcagacggcagaggaaatcctcagcaaaggcctgagccagatgaccaccagtgctgacacggatgttgatacctctaaggacaaaaccgagtcggtcaccagcggccccatgtccccagagggctcaccttccaagtctccctcaaagaagaaaaagaaattccgaaccccctccttcctgaaaaagagcaaaaagaaggagaaagttgagtcctgattcatgacacccttgggctccctcctgcctcctctctctcctccccttcccttctcccatctctgtccctgcaagcacagggctaaggagggatagagtaggaccctggaccacattcggaaggggaacttagagatcacccgaccaacccttcgttttacagttgcccaagagaaatcagattacctgagactgggtcatttataatgaacacagatttatttctctcacatctggaagctgggaagtccaagatcaaggcaccagcatttggtgaagccttctttctgtgtcatcccatggcagaagacagaagggcaagagaggaaaccggtccaagcaggatgccttcctttttctgacgggcagcccccagcagtaccatcacaaaccttggtctcttcttgtcaccagcaaagggatgaaggataagtgatgaggagactgaagcacagaggtgaagcagcttgcccaacgtcacactgctgcttagtgatagaggcagtgctagaccccggggctcctgaatgttactgttggaggctcttaacccactgggatcaagaaggtgtcaagaactagactctccctccaggagaatgaacacagacacaaaaccttgcatatatgcttccgggtaaagaacctgcctgcattttggtaccactacgtgctggcctgtcctgggcatgttatatcatgagaaggcagggaaggctgaatcattaaggacatgaatcagattgattctcgtggctttaaaaacaaacactacaggaccagcatgacccgccagcctgttatccacagaggcttgtggtctccattgaaaagaagcaaagacagcacgtcccaactcaaaagattgtgtcatcctaaaggtgaaaggaagagatgatccaagcaaatttaggaccaatagcagactcttcacactgcctggggatagagggaccaccctgggctcctcttactcctggatttacttggatgaccagactcaggacttcatttaaatagaatttggtttcataatggaatcttcagcttgaaatataaatttgtttctgtctccctctgccatctcagcctttcttg

SEQ ID NO: 4253 - DNA, 3284 bp, Homo sapiens
ggacggcgccagcagccagccccgaggacgcgagcggcaggtgtgcacagaggttctccactttgttttctgaactcgcggtcaggatggttttctctgtcaggcagtgtggccatgttggcagaactgaagaagttttactgacgttcaagatattccttgtcatcatttgtcttcatgtcgttctggtaacatccctggaagaagatactgataattccagtttgtcaccaccacctgctaaattatctgttgtcagttttgccccctcctccaatgaggttgaaacaacaagcctcaatgatgttactttaagcttactcccttcaaacgaaacagaaaaaactaaaatcactatagtaaaaaccttcaatgcatcaggcgtcaaaccccagagaaatatctgcaatttgtcatctatttgcaatgactcagcattttttagaggtgagatcatgtttcaatatgataaagaaagcactgttccccagaatcaacatataacgaatggcaccttaactggagtcctgtctctaagtgaattaaaacgctcagagctcaacaaaaccctgcaaaccctaagtgagacttactttataatgtgtgctacagcagaggcccaaagcacattaaattgtacattcacaataaaactgaataatacaatgaatgcatgtgctgtaatagctgctttggaaagagtaaagattcgaccaatggaacactgctgctgttctgtcaggataccctgcccttcctccccagaagagttggaaaagcttcagtgtgacctgcaggatcccattgtctgtcttgctgaccatccacgtggcccaccattttcttccagccaatccatcccagtggtgcctcgggccactgtgctttcccaggtccccaaagctacctcttttgctgagcctccagattattcacctgtgacccacaatgttccctctccaataggggagattcaacccctttcaccccagccttcagctcccatagcttccagccctgccattgacatgcccccacagtctgaaacgatctcttcccctatgccccaaacccatgtctccggcaccccacctcctgtgaaagcctcattttcctctcccaccgtgtctgcccctgcgaatgtcaacactaccagcgcacctcctgtccagacagacatcgtcaacaccagcagtatttctgatcttgagaaccaagtgttgcagatggagaaggctctgtccttgggcagcctggagcctaacctcgcaggagaaatgatcaaccaagtcagcagactccttcattccccgcctgacatgctggcccctctggctcaaagattgctgaaagtagtggatgacattggcctacagctgaacttttcaaacacgactataagtctaacctccccttctttggctctggctgtgatcagagtgaatgccagtagtttcaacacaactacctttgtggcccaagaccctgcaaatcttcaggtttctctggaaacccaagctcctgagaacagtattggcacaattactcttccttcatcgctgatgaataatttaccagctcatgacacggagctagcttccagggttcagttcaatttttttgaaacacctgctttgtttcaggatccttccctggagaacctctctctgatcagctacgtcatatcatcgagtgttgcaaacctgaccgtcaggaacttgacaagaaacgtgacagtcacattaaagcacatcaacccgagccaggatgagttaacagtgagatgtgtattttgggacttgggcagaaatggtggcagaggaggctggtcagacaatggctgctctgtcaaagacaggagattgaatgaaaccatctgtacctgtagccatctaacaagcttcggcgttctgctggacctatctaggacatctgtgctgcctgctcaaatgatggctctgacgttcattacatatattggttgtgggctttcatcaatttttctgtcagtgactcttgtaacctacatagcttttgaaaagatccggagggattacccttccaaaatcctcatccagctgtgtgctgctctgcttctgctgaacctggtcttcctcctggactcgtggattgctctgtataagatgcaaggcctctgcatctcagtggctgtatttcttcattattttctcttggtctcattcacatggatgggcctagaagcattccatatgtacctggcccttgtcaaagtatttaatacttacatccgaaaatacatccttaaattctgcattgtcggttggggggtaccagctgtggttgtgaccatcatcctgactatatccccagataactatgggcttggatcctatgggaaattccccaatggttcaccggatgacttctgctggatcaacaacaatgcagtattctacattacggtggtgggatatttctgtgtgatatttttgctgaacgtcagcatgttcattgtggtcctggttcagctctgtcgaattaaaaagaagaagcaactgggagcccagcgaaaaaccagtattcaagacctcaggagtatcgctggccttacatttttactgggaataacttggggctttgccttctttgcctggggaccagttaacgtgaccttcatgtatctgtttgccatctttaataccttacaaggatttttcatattcatcttttactgtgtggccaaagaaaatgtcaggaagcaatggaggcggtatctttgttgtggaaagttacggctggctgaaaattctgactggagtaaaactgctactaatggtttaaagaagcagactgtaaaccaaggagtgtccagctcttcaaattccttacagtcaagcagtaactccactaactccaccacactgctagtgaataatgattgctcagtacacgcaagcgggaatggaaatgcttctacagagaggaatggggtctcttttagtgttcagaatggagatgtgtgccttcacgatttcactggaaaacagcacatgtttaacgagaaggaagattcctgcaatgggaaaggccgtatggctctcagaaggacttcaaagcggggaagcttacactttattgagcaaatgtgattcctttcttctaaaatcaaagcatgatgcttgacagtgtgaaatgtccaattttaccttttacacaatgtgagatgtatgaaaatcaactcattttattctcggcaacatctggagaagcataagctaattaagggcgatgattattattac

SEQ ID NO: 4254 - DNA, 1795 bp, Homo sapiens
gtcggggggcaagatggcagcccaggctttggcgctgctgagagaggtagcgaggctggaagcgccgctggaggagctacgcgcgcttcactccgtgctgcaggcagtgccgctcaacgagcttcgccggcaagcggcggagctgcgcctcggcccgctcttctccctgcttaacgagaaccatagggaaaagactaccttgtgtgtatccattctggagagattgctccaagctatggaaccggttcacgtggcccggaacctcagggttgacctgcagaggggactaattcaccctgatgattctgtaaaaatcctcactctttcccagattggaagaattgttgaaaattctgatgctgttactgagattctaaataatgctgaattactaaaacaaattgtttattgcattggtggagagaatctatctgtagcaaaagcggctatcaaatccctgtcaagaatatcactaacccaagctggactggaggctttatttgaaagcaatctgctggatgatttgaaaagtgtaatgaaaacaaatgacattgttcgatacagggtgtatgagctaattatagagatttcttccgtgtcaccagaatctttaaactactgtaccacaagtggattggtaacccagctcctgagagagctgactggtgaggatgtgttggtcagagccacctgtatagaaatggtgacatcactggcatatactcatcatgggcgacaatatcttgctcaagaaggagtaattgaccaaatttctaatataattgttggggcagattcagaccctttctctagcttctatctgccaggattcgtgaagttttttggaaacctggctgtcatggatagtcctcaacagatctgtgagcgttatcctatctttgtggaaaaagtctttgaaatgatagaaagtcaggaccccactatgattggtgtagctgtagacacagttggaatcttgggatccaatgttgaaggaaaacaggttttacagaaaacaggaactcgctttgaacgcttgcttatgagaataggacatcaatcaaagaatgccccagtggagctaaaaattagatgtttggatgcaatttcatctcttctgtacttaccacctgagcagcagactgatgaccttctgaggatgacagaatcctggttttcttctttatctcgggacccactggagctcttccgtggcattagtagtcagcccttccctgaactacactgtgctgccttaaaagtgtttacggccattgcaaaccaaccctgggctcagaaacttatgtttaacagtccaggttttgtagaatatgtggtggaccggtctgtggagcatgacaaagcttcaaaggatgccaaatatgaactagtgaaagcacttgccaattccaagacaattgcagaaatctttgggaacccaaattatttgaggctcagaacttacctgagtgaagggccatactatgtgaaacctgtttccacgacagcagtagaaggagccgaatgatttcttctagagctcatgtagaggaccacgttttgaccaaaacttctcctaaggcatttgactccatctatatttcacaaaagagacttcctttccccaagaattatcatggaatgtcagatgttactttgttaccaacactgttatatttctacattgaaatgcaaagtggaactaggagtttggaatgcattaagagcagacaagcttggtcataatagatccagtgtttttcagattcctttcactgccttaatctttgcaaca

SEQ ID NO: 4255 - DNA, 2258 bp, Homo sapiens
actcggtgtcaccacaggaggagactcaggcaggccgcgctccagcctcaccaggctccccggctcgccgtggctctctgagcccccttttcagggaccccagtcgctggaacatttgcccagactcgtaccaaacttttccgccctgggctcgggatcctggactccggggcctccccgtcctcccctttcccgggttccagctccggcctctggactaggaaccgacagcccccctccccgcgtccctccctctctctccagccgttttggggaggggctctccacgctccggatagttcccgagggtcatccgcgccgcactcgcctttccgtttcgccttcacctggatataatttccgagcgaagctgcccccaggatgaccacgctggccggcgctgtgcccaggatgatgcggccgggcccggggcagaactacccgcgtagcgggttcccgctggaagtgtccactcccctcggccagggccgcgtcaaccagctcggcggcgtttttatcaacggcaggccgctgcccaaccacatccgccacaagatcgtggagatggcccaccacggcatccggccctgcgtcatctcgcgccagctgcgcgtgtcccacggctgcgtctccaagatcctgtgcaggtaccaggagactggctccatacgtcctggtgccatcggcggcagcaagcccaagcaggtgacaacgcctgacgtggagaagaaaattgaggaatacaaaagagagaacccgggcatgttcagctgggaaatccgagacaaattactcaaggacgcggtctgtgatcgaaacaccgtgccgtcagtgagttccatcagccgcatcctgagaagtaaattcgggaaaggtgaagaggaggaggccgacttggagaggaaggaggcagaggaaagcgagaagaaggccaaacacagcatcgacggcatcctgagcgagcgagcctcagcaccccaatcagatgaaggctctgatattgactctgaaccagatttaccactaaagaggaaacagcgcagaagccgaaccaccttcacagcagaacagctggaggaactggagcgtgcttttgagagaactcattaccctgacatttatactagggaggaactggcccagagggcgaagctcaccgaggcccgagtacaggtctggtttagcaaccgccgtgcaagatggaggaagcaagctggggccaatcaactgatggctttcaaccatctcattcccggggggttccctcccactgccatgccgaccttgccaacgtaccagctgtcggagacctcttaccagcccacatctattccacaagctgtgtcagatcccagcagcaccgttcacagacctcaaccgcttcctccaagcactgtacaccaaagcacgattccttccaacccagacagcagctctgcctactgcctccccagcaccaggcatggattttccagctatacagacagctttgtgcctccgtcggggccctccaaccccatgaaccccaccattggcaatggcctctcacctcaggtaatgggactcctgaccaaccacggtggggtacctcatcagccccagactgattacgcgctctcccctctcaccgggggtctggaacctaccaccacggtgtcggccagctgcagtcagagactagaccatatgaagagcttggacagtctgccaacatctcagtcctactgtccacccacctatagcaccacaggctacagtatggaccctgtcacaggctaccaatatgggcagtatggacaaagtgcctttcattatctcaagccagatatcgcgtaagtgaactgtccacttggagctaaaactggccctgtttctggtcttcgcagcctagatatgaagaatctgctctgaaaacaaaaaaaaattacccttttgttggggggggtggggcagtggtcccaataggagacaaaggagagtgattgattttcttcctccaatagttggtttcaaatccttttgaacacgttcgacaaaagcagtggagaagaggaagacctggagcaataaaagacaaatgcaacattttaagccaatggtttcacatggttacatatcaaaacatcccaattctttagtgctgatcatcgaggagctagaacattccatttgcttgtgtgcgtgcgtgcgtgtgtgtgtgtgtgtgtgtattgagatttacccagactggtttgggcaagcagactgttctaaaatat

SEQ ID NO: 4256 - DNA, 1326 bp, Homo sapiens
acccgccgtcatgctccgggccgcgctgcccgcgctcctgctgccgttgctgggcctcgccgctgctgccgtcgcggactgtccttcatctacttggattcagttccaagacagttgttacatttttctccaagaagccatcaaagtagaaagcatagaggatgtcagaaatcagtgtactgaccatggagcggacatgataagcatacataatgaagaagaaaatgcttttatactggatactttgaaaaagcaatggaaaggcccagatgatatcctactaggcatgttttatgacacagatgatgcgagtttcaagtggtttgataattcaaatatgacatttgataagtggacagaccaagatgatgatgaggatttagttgacacctgtgcttttctgcacatcaagacaggtgaatggagaaaaggaaattgtgaagtttcttctgtggaaggaacactatgcaaaacagctatcccatacaaaaggaaatatttatcagataaccacattttaatatcagcattggtgattgctagcacggtaattttgacagttttgggagcaatcatttggttcctgtacaaaaaacattctgattctcgtttcaccacagttttttcaaccgcaccccaatcaccttataatgaagactgtgttttggtagttggagaagaaaatgaatatcctgttcaatttgactaagtttttggtaatcttgcactaagacatcaacaaaatgccctggcagagataacttgggaaagattttaatataaaacttgacattggatattagagctttaatggtattccttattccagtaacatttttatgtactcatctgctgtgaaaagtctttaggttcattaaaaaaacaggttttagaaatgatcttagatctaatatagtgattttaagcatcccgtcaaaggcagaatctgtcacttgaatgaaggaaagcttaaagcccaagcagataaaaataaaagcccagcctatttgtcttgcctgctgtatcttccctatttagttgacccactttagtttatatgtttattagtaaacatgaaatggggaataagtgattttaagtacatcccatacatttaaatatctttgataattgttatttttttggcagataattcctctagaatgtgtatctttttatgatttagatgaagaaaattttacaacttttaacaccccacaccaattttagtttcattacttttacacacaccattttatcacaaatgactcaagttttaatgaatgtttataaattatttgaaacaaaatatgatcgctgtgtcca

SEQ ID NO: 4257 - DNA, 3473 bp, Homo sapiens
agtcgccggagaagcatcatgccgaggaggaagcagcaggcgccccggcgcgcagcagcctatgtttccgaagagttaaaggctgctgccctggtggacgaaggtttagacccagaggagcatacggcagatggagagccctcggccaagtacatgtgcccggagaaggagctcgccagggcctgccccagctaccagaactccccggccgccgagttttcctgccatgaaatggacagcgagtcacacatcagtgagaccagtgaccgaatggctgactttgaaagcggctccatcaagaacgaagaggagaccaaggaggtcacggtcccactggaagacacgactgtgtcggatagcctggagcagatgaaggccgtgtacaacaacttcctctccaactcctactggtccaacctcaacctcaacctgcaccagccctcctcggagaagaacaacggcagcagcagcagcagcagtagcagcagcagcagctgtggcagcgggagcttcgactggcaccagagcgccatggctaagacgctgcagcaggtgtcacagagccgcatgctcccggagcccagcctcttcagcaccgtgcagctgtaccggcagagcagcaagctctatggctccatcttcacgggggccagcaagttccgctgtaaggactgcagcgctgcctacgacaccctggtggagttgacggtgcacatgaacgagacggggcattaccgcgacgacaaccatgagaccgataacaacaaccccaagcgctggtccaagcctcgcaaacgctccttgctggaaatggaagggaaggaagacgcccagaaggtgctgaagtgcatgtactgtggccactcctttgagtccctgcaggatttgagtgtccatatgatcaaaacaaaacactaccaaaaagtgcctctgaaggaacccgtcactcctgttgccgccaaaatcatccctgccactcggaagaaagcttccctggagctggagctccccagctccccagattccacaggtggaacccccaaagccaccatctcagacaccaacgatgcacttcagaagaactccaacccttacatcacgccaaataatcggtacggccaccagagtggggccagctatgcatggcactttgaggcccggaagtcgcagatcctgaagtgcatggagtgtgggagctcgcatgacaccctgcaggagctcactgcccacatgatggtcactggccacttcatcaaggtcactaactctgctatgaaaaaggggaagcccattgtggagacgcctgtcacacctaccatcacaaccctgctggatgagaaggtccagtccgtgcccctggcagccaccaccttcacgtccccctccaatacacctgccagcatctccccaaaactgaatgtggaggtcaagaaggaagtcgacaaggagaaagcggtcactgacgagaaacctaagcaaaaagacaagcctggcgaagaagaggagaagtgtgacatctcttccaaataccattacttgactgaaaatgacttagaagagagtcccaagggggggcttgatatcctcaaatccttggaaaacacagtgacatccgcaatcaacaaggcccagaacggcactcctagctgggggggctatcccagcatccatgccgcctaccaacttcccaacatgatgaagttgtccctgggctcgtcggggaagagcacgcccctgaaacccatgtttggcaacagtgagattgtctccccgacgaaaaaccagaccctggtctctccacccagcagccagacgtcccccatgcccaagacaaactttcatgccatggaggagctggtgaaaaaggtcactgagaaagttgccaaagtggaggagaagatgaaggagccggatgggaagctttccccgcccaagcgggccactccctccccatgtagcagcgaagtcggggaacccatcaagatggaggcatccagcgatgggggcttccgcagccaggagaacagccccagccccccgcgggatgggtgcaaggatgggagccccctcgctgagccggtggagaatggcaaggagctggtgaagcccctagccagcagtttgagtggcagcacggccatcatcaccgaccacccgcctgaacagccttttgttaaccctttgagcgccctgcagtcagtcatgaacattcacctgggcaaggccgccaagccctccctgcctgccctggaccccatgagcatgcttttcaagatgagcaacagcctggcggagaaggctgctgtggccaccccgccgcccctgcagtccaagaaggcagaccacctcgaccgctatttctaccacgtcaacaacgaccagcccatagacttgacaaaagggaagagtgacaaaggctgctccttgggttcagtgcttctgtcacccacgtccacagccccggcaacctcctcatccacggtgacaacggcaaagacatctgccgtcgtatcattcatgtcaaactcgccgctacgcgagaatgccttgtcagatatatccgatatgctgaagaacttgacagagagccacacgtcaaaatcctccactccttccagcatctccgagaagtctgacattgacggggccactctggaggaggctgaggagtcgacgcccgcccagaagaggaagggccgccagtcaaactggaacccccagcacctcctgatcctccaggcccagtttgccgccagcctccggcagacctcagaagggaagtacatcatgtcagacctgagccccctggagcggatgcatatctccaggttcaccgggctgtccatgaccaccatcagccactggctggccaacgtgaaataccagcttcgaaggacaggtggaacaaagttcctcaaaaacttggacactggccaccccgtcttcttttgtaacgattgtgcgtcccaaatcaggactccttccacgtacatcagtcacctagagtcacacttaggcttccggctacgggacttatccaaactgtccaccgaacagattaacagtcagatagcacaaaccaagtcaccgtcagaaaaaatggtgacgtcctcccccgaggaagacctggggacttcctatcagtgcaaactttgcaatcggacctttgccagcaagcacgctgttaaacttcaccttagcaaaacacacgggaaatctccggaagaccaccttctgtatgtctctgagttagagaagcagtagcatttgcttttgatagaaaggactgcagtttgctttgagggaaactgtggaaggcaccttcaggccccctctgacttgttgttcttggcacatgttcttattttaactgcagagaatcactctgggctggactgttttgtataactgtacagtgtttaatagaggtgcataatcagctgttgttactggtaaaatgtgaaggttaaaat

SEQ ID NO: 4258 - DNA, 3171 bp, Homo sapiens
ataaacgcaggtcacctgagccagtagcagcaacctgggtccccttccacgctgtggaatctttgtttttttttcactgctcgcaataaatcttgctgctgcttattatttgggtccgtgttacctttatgagctgtagcactcaccgcgaaggtttgcagcttcgctattcactcttgaagccagcgagaccacgaacccaccgggaggaagaaacaactccggacgcgccacctttaagagctgtaacactaacggtgaaagtctgcggtatcactcctgaagtcagggagaccacgaaccccccagaagaaactccggacgcatctgaacatctgaaggaacaaactctggacacaccatctttaagaactgaaacaccgcgacagttcgctgcttcattcttaaaggcagtgagaccgagaacgcaccaattctggacacaaaaggaccttagcaggctcaggaaatggcaagccatttatgaagagggaagagatagcaaacgttggtctcaagttctctagttctttacccagaccatagctggctgggggatgatcctgatttagtctggggggttcctttacgcattgccaccagcaggtgccgcaaatggaccattggcagtcttaaggtatagacacgtgtggccgtttacgctgtaggatcctcattcccactggctttgaacattttggggacttacaatgccgccacccgcggacatcgtcaaggtggccatagaatggccgggcgcctaccccaaactcatggaaattgatcagaaaaaaccactgtctgcaataataaaggaagtctgtgatgggtggtctcttgccaaccatgaatattttgcactccagcatgccgatagttcaaacttctatatcacagaaaagaaccgcaatgagataaaaaatggcactatccttcgattaaccacatctccagctcagaacgcccagcagctccatgaacgaatccagtcctcgagtatggatgccaagctggaagccctgaaggacttggccagcctctcccgggatgtcacgtttgcccaggagtttataaacctggacggtatctctctcctcacgcagatggtggagagcggcactgagcgataccagaaattgcagaagatcatgaagccttgctttggagacatgctgtccttcaccctgacggccttcgttgagctgatggaccatggcatagtgtcctgggatacattttcggtggcgttcattaagaagatagcaagttttgtgaacaagtcagccatagacatctcgatcctgcagcggtccttggccattttggagtcgatggtgctcaatagccatgacctctaccagaaagtggcgcaggagatcaccatcggccagctcattccacacctgcaagggtcagatcaagaaatccaaacctatactattgcagtgattaatgcgcttttcctgaaggctcctgatgagaggaggcaggagatggcgaatattttggctcagaagcaactgcgttccatcattttaacacatgtcatccgagcccagcgggccatcaacaatgagatggcgcaccagctgtatgttctacaagtgctcacctttaacctcctggaagacaggatgatgaccaaaatggacccccaggaccaggctcagagggacatcatatttgaacttcgaagaattgcttttgatgctgagtctgaacctaacaacagcagtggcagcatggagaaacgcaagtccatgtacacgcgagattataagaagcttgggttcattaatcatgtcaaccctgccatggacttcacgcagactccacctgggatgttggctctggacaacatgctgtactttgccaagcaccaccaagatgcctacatccggattgtgcttgagaacagtagtcgagaagacaagcatgaatgtccctttggccgcagtagtatagagctgaccaagatgctatgtgagatcttgaaagtgggcgagttgcctagtgagacctgcaacgacttccacccgatgttcttcacccacgacagatcctttgaggagtttttctgcatctgtatccagctcctgaacaagacatggaaggaaatgagggcaacttctgaagacttcaacaaggtaatgcaggtggtgaaggagcaggttatgagagcacttacaaccaagcctagctccctggaccagttcaagagcaaactgcagaacctgagctacactgagatcctgaaaatccgccagtccgagaggatgaaccaggaagatttccagtcccgcccgattttggaactaaaggagaagattcagccagaaatcttagagctgatcaaacagcaacgcctgaaccgccttgtggaagggacctgctttaggaaactcaatgcccggcggaggcaagacaagttttggtattgtcggctttcgccaaatcacaaagtcctgcattacggagacttagaagagagtcctcagggagaagtgccccacgattccttgcaggacaaactgccggtggcagatatcaaagccgtggtgacgggaaaggactgccctcatatgaaagagaaaggtgcccttaaacaaaacaaggaggtgcttgaactcgctttctccatcttgtatgactcaaactgccaactgaacttcatcgctcctgacaagcatgagtactgtatctggacggatggactgaatgcgctactcgggaaggacatgatgagcgacctgacgcggaatgacctggacaccctgctcagcatggaaatcaagctccgcctcctggacctggaaaacatccagatccctgacgcacctccgccgattcccaaggagcccagcaactatgacttcgtctatgactgtaactgaagtggccgggcccagacatgccccttccaaaactggaacacctagctaacaggagagaggaatgaaaacacacccacgccttggaaccgtcctttggtaaagggaagctgtgggtccacattcccttcagcatcacctctagccctggcaactttcagcccctagctggcatcttgctcaccgccctgattctgttcctcggctccactgcttcaggtcacttcccatggctgcagtccactggtgggacaagagcaaagcccactgccagtaagaa

SEQ ID NO: 4259 - DNA, 1664 bp, Homo sapiens
ggcactgggggagaccagagcgaggggagcgagaggcgcggagagtttggcaggcagacccagaaatccctggagcgcggcggacccggcggccggaggggcgaccccgcccgatgtaacgcgccccgcccgagccccggcccctgcacggggggggtgatgtgagcagagcccaggaatgccttatgtggatcggcagaaccgaatctgtgggtttctggacatcgaggagcatgagaacagcggcaagtttctgcggaggtacttcattctggacacccaggctaactgcctcctctggtatatggacaacccccagaatctggcaatgggggcaggagctgttggagctttgcagctgacctacatctcgaaggtgagcatagctaccccaaaacagaaaccaaaaactccattttgctttgttatcaatgccctgtctcagagatatttccttcaagccaatgatcagaaagatatgaaggactgggttgaagccctgaaccaagccagcaagatcaccgttcccaaaggtgggggcctacccatgaccactgaagttctcaagagcttagcagctcctccagccctggagaagaagccacaggtggcctacaagacggagatcattggaggggtggtggtccacacacccatcagccagaacggtggggatgggcaggaagggagtgagcccgggtcccacaccatccttcgaaggtctcagagttacatccccacgtcaggctgccgtgcttccactgggcctcccctcattaagagtggttactgcgtgaagcaagggaatgtgcggaagagctggaaacgtcgcttctttgcacttgatgactttaccatctgctacttcaagtgtgagcaggaccgagaaccactgcgcaccatatttcttaaggatgttctgaagacccatgaatgtctggtcaagtctggtgatctcttaatgagggacaacctgtttgaaataataacaagctccaggaccttctacgtacaggcagacagtccagaagacatgcacagctggattaaggagattggcgcagctgtccaggccctcaagtgccaccccagagaaacgtccttttctagatccatttctttgacccgacctggaagctccagcctttcaagtgggcccaactctatcctgtgcagggggcggccacctttggaggaaaagaaagccctctgcaaagccccctctgtggcctcctcctggcagccctggacacctgtcccccaggctggggagaagctgcttccacctggagacacttcagaggactccttgttcacgcctcgtcctggggagggcagcgctcctggggtgctgcccagctcccggataaggcacagatcggagccccagcaccccaaggagaagccgtttatgttcaaccttgatgatgaaaacatacggacctctgatgtgtgatggagcacagtgccatgggagggagggagggagggaggacttgagagaaggaggctgtgactcagtttctctaccttgttggagggtagtcagaggcctttatgtcactcatattcctgtggatgctctttgggagggaggggcccatccagctgggctgtgtgtgtgtgtgtgtgtgtgtgtgtgtgtgtgtgtaatatcaacgcag

SEQ ID NO: 4260 - DNA, 2810 bp, Homo sapiens
gaattatgcatgacggcgtgcctcggccaggctggggctgggcgaggattggctgaaggggctgtaattcagcggtttccggagctgcggcggcgcagactgggagggggagccgggggttccgacgtcgcagccgagggaacaagccccaaccggatcctggacaggcaccccggcttggcgctgtctctccccctcggctcggagaggcccttcggcctgagggagcctcgccgcccgtccccggcacacgcgcagccccggcctctcggcctctgccggagaaacagttgggacccctgattttagcaggatggcccaatggaatcagctacagcagcttgacacacggtacctggagcagctccatcagctctacagtgacagcttcccaatggagctgcggcagtttctggccccttggattgagagtcaagattgggcatatgcggccagcaaagaatcacatgccactttggtgtttcataatctcctgggagagattgaccagcagtatagccgcttcctgcaagagtcgaatgttctctatcagcacaatctacgaagaatcaagcagtttcttcagagcaggtatcttgagaagccaatggagattgcccggattgtggcccggtgcctgtgggaagaatcacgccttctacagactgcagccactgcggcccagcaagggggccaggccaaccaccccgcagcagccgtggtgacggagaagcagcagatgctggagcagcaccttcaggatgtccggaagagagtgcaggatctagaacagaaaatgaaagtggtagagaatctccaggatgactttgatttcaactataaaaccctcaagagtcaaggagacatgcaagatctgaatggaaacaaccagtcagtgaccaggcagaagatgcagcagctggaacagatgctcactgcgctggaccagatgcggagaagcatcgtgagtgagctggcggggcttttgtcagcgatggagtacgtgcagaaaactctcacggacgaggagctggctgactggaagaggcggcaacagattgcctgcattggaggcccgcccaacatctgcctagatcggctagaaaactggataacgtcattagcagaatctcaacttcagacccgtcaacaaattaagaaactggaggagttgcagcaaaaagtttcctacaaaggggaccccattgtacagcaccggccgatgctggaggagagaatcgtggagctgtttagaaacttaatgaaaagtgcctttgtggtggagcggcagccctgcatgcccatgcatcctgaccggcccctcgtcatcaagaccggcgtccagttcactactaaagtcaggttgctggtcaaattccctgagttgaattatcagcttaaaattaaagtgtgcattgacaaagactctggggacgttgcagctctcagaggatcccggaaatttaacattctgggcacaaacacaaaagtgatgaacatggaagaatccaacaacggcagcctctctgcagaattcaaacacttgaccctgagggagcagagatgtgggaatgggggccgagccaattgtgatgcttccctgattgtgactgaggagctgcacctgatcacctttgagaccgaggtgtatcaccaaggcctcaagattgacctagagacccactccttgccagttgtggtgatctccaacatctgtcagatgccaaatgcctgggcgtccatcctgtggtacaacatgctgaccaacaatcccaagaatgtaaacttttttaccaagcccccaattggaacctgggatcaagtggccgaggtcctgagctggcagttctcctccaccaccaagcgaggactgagcatcgagcagctgactacactggcagagaaactcttgggacctggtgtgaattattcagggtgtcagatcacatgggctaaattttgcaaagaaaacatggctggcaagggcttctccttctgggtctggctggacaatatcattgaccttgtgaaaaagtacatcctggccctttggaacgaagggtacatcatgggctttatcagtaaggagcgggagcgggccatcttgagcactaagcctccaggcaccttcctgctaagattcagtgaaagcagcaaagaaggaggcgtcactttcacttgggtggagaaggacatcagcggtaagacccagatccagtccgtggaaccatacacaaagcagcagctgaacaacatgtcatttgctgtaatcatcatgggctataagatcatggatgctaccaatatcctggtgtctccactggtctatctctatcctgacattcccaaggaggaggcattcggaaagtattgtcggccagagagccaggagcatcctgaagctgacccaggtagcgctgccccatacctgaagaccaagtttatctgtgtgacaccaacgacctgcagcaataccattgacctgccgatgtccccccgcactttagattcattgatgcagtttggaaataatggtgaaggtgctgaaccctcagcaggagggcagtttgagtccctcacctttgacatggagttgacctcggagtgcgctacctcccccatgtgaggagctgagaacggaagctgcagaaagatacgactgaggcgcctacctgcattctgccacccctcacacagccaaaccccagatcatctgaaactactaactttgtggttccagattttttttaatctcctacttctgctatctttgagcaatctgggcacttttaaaaatagagaaatgagtg

SEQ ID NO: 4261 - DNA, 1234 bp, Homo sapiens
gctccatggcgctgtgcgaggccgcgggctgcgggagtgccctgctctggcctcgcttgttgctcttcggggactccatcacccagttttccttccagcagggtggatggggagcatcgctggctgacaggctggtcagaaaatgtgatgttctgaatcgtggattttcaggttacaataccaggtgggccaaaattatccttccaagattaatcaggaaaggaaacagtttggacatcccagtagcagttacaattttctttggggccaatgacagtgcactaaaagatgagaatcccaagcagcacattcccctggaggagtacgctgcgaacctaaagagcatggtgcagtacctgaagtccgtggacatccctgagaatcgagtcattctcatcacgccgaccccactttgtgaaacagcctgggaagaacagtgcatcatacaaggttgcaaactaaatcgcctgaactctgttgttggtgaatatgccaatgcgtgtttacaagtggcccaagactgtgggactgacgtacttgacctgtggaccctgatgcaggacagccaggacttctcatcttatttatcagatggactacatttgtctccaaaggggaatgaatttttgttctcgcatctctggcctttgatagagaaaaaggtctcttctctacctttgctgcttccttactggcgggatgtagcagaagcaaaacctgaattaagtctgctgggagatggagaccattagccaatcacaggagacccaaatctgcttgttatctacagaactcaaagttgtcaatacgtagaggtacgcttttttcctcaggcttaaacctttgccactgatattaataataaaagtattagatgatttttcagggaagttttatacttaggtccattgtgtttcgacagtatttattaatgcagatatcagtgctacagctataaaatataccctgagcagcttgttaattctataaatgacaaagactatgtttttaaaaagtcacaattttataaaaatggtttttcttacattcttttgagaactgtttcactcatacatacacccacacaccccactcaaccttgtatcaaattccaaaagtgtaactaaagtataagaatatcatgactagttaaaagatagcaaataccataaggtacaagttcaagtattagtataacaagtatctgagtaacaaatgtccttggaaatggggg

SEQ ID NO: 4262 - DNA, 3701 bp, Homo sapiens
gtataaaacaaaagtttgcgagctgttaattgctgtgctgtgttattaagagacgctttcaagtttcaagtaccaaatgtagctttacgttgccaaaggaagttgaggcaattgctttgctgttttaacttgctctgtgagggaaatctcataaactgaccaatgcaccaaatgaatgctaaaatgcactttaggtttgtttttgcacttctgatagtatctttcaaccacgatgtactgggcaagaatttgaaatacaggatttatgaggaacagagggttggatcagtaattgcaagactatcagaggatgtggctgatgttttattgaagcttcctaatccttctactgttcgatttcgagccatgcagaggggaaattctcctctacttgtagtaaacgaggataatggggaaatcagcataggggctacaattgaccgtgaacaactgtgccagaaaaacttgaactgttccatagagtttgatgtgatcactctacccacagagcatctgcagcttttccatattgaagttgaagtgctggatattaatgacaattctccccagttttcaagatctctcatacctattgagatatctgagagtgcagcagttgggactcgcattcccctggacagtgcatttgatccagatgttggggaaaattccctccacacatactcgctctctgccaatgatttttttaatatcgaggttcggaccaggactgatggagccaagtatgcagaactcatagtggtcagagagttagatcgggagctgaagtcaagctacgagcttcagctcactgcctcagacatgggagtacctcagaggtctggctcatccatactaaaaataagcatttcagactccaatgacaacagccctgcttttgagcagcaatcttatataatacaactcttagaaaactccccggttggcactttgctcttagatctgaatgccacggatccagatgagggcgctaatgggaaaattgtatattccttcagcagtcatgtgtctcccaaaattatggagacttttaaaattgattctgaaagaggacatttgactcttttcaagcaagtggattatgaaatcaccaaatcctatgagattgatgttcaggctcaagatttgggtccaaattcaatcccagcccattgcaaaattataattaaggttgtggatgttaatgacaataaacctgaaattaacatcaacctcatgtcccctggaaaagaagaaatatcttatatttttgaaggggatcctattgatacatttgttgctttggtcagagttcaggacaaggattctgggctgaatggagaaatagtttgtaagcttcatggacatggtcactttaaacttcagaagacatatgaaaacaattatttaatcttaactaatgccacactggatagagaaaagagatctgagtatagtttgactgtaatcgctgaggacagggggacacccagtctctctacagtgaaacattttacagttcaaatcaatgatatcaatgacaatccaccccacttccagagaagccgatatgaatttgtaatttcagaaaataactcaccaggggcatatatcaccactgttacagccacagatcctgatcttggagaaaatgggcaagtgacatacaccatcttggagagttttattctaggaagttccataactacatatgtaaccattgacccatctaatggagccatctatgccctcagaatctttgatcatgaagaagtgagtcagatcacttttgtggtagaagcaagagatggaggaagcccgaagcaactggtaagcaataccacagttgtgctcaccatcattgacgaaaatgacaacgttcctgtggttatagggcctgcattgcgtaataatacggcagaaatcaccattcccaaaggggctgaaagtggctttcatgtcacaagaataagggcaattgacagagactctggtgtgaatgctgaactcagctgcgccatagtagcaggtaatgaggagaatatcttcataattgatccacgatcatgtgacatccataccaacgttagcatggattctgttccctacacagaatgggagctgtcagttatcattcaggacaaaggcaatcctcagctacataccaaagtccttctgaagtgcatgatctttgaatatgcagagtcggtgacaagtacagcaatgacttcagtaagccaggcatccttggatgtctccatgataataattatttccttaggagcaatttgtgcagtgttgctggttattatggtgctatttgcaactaggtgtaaccgcgagaagaaagacactagatcctataactgcagggtggccgaatcaacttaccagcaccacccaaaaaggccatcccggcagattcacaaaggggacatcacattggtgcctaccataaatggcactctgcccatcagatctcatcacagatcgtctccatcttcatctcctaccttagaaagagggcagatgggcagccggcagagtcacaacagtcaccagtcactcaacagtttggtgacaatctcatcaaaccacgtgccagagaatttctcattagaactcacccacgccactcctgctgttgaggtctctcagcttctttcaatgcttcaccaggggcaatatcagccaagaccaagttttcgaggaaacaaatattccaggagctacagatatgcccttcaagacatggacaaatttagcttgaaagacagtggccgtggtgacagtgaggcaggagacagtgattatgatttggggcgagattctccaatagataggctgttgggtgaaggattcagcgacctgtttctcacagatggaagaattccagcagctatgaggctctgcacggaggagtgcagggtcctgggacactctgaccagtgctggatgccaccactgccctcaccgtcttctgattataggagtaacatgttcattccaggggaagaattcccaacgcaaccccagcagcagcatccacatcagagtcttgaggatgacgctcagcctgcagattccggtgaaaagaagaagagtttttccacctttggaaaggactccccaaacgatgaggacactggggataccagcacatcatctctgctctcggaaatgagcagtgtgttccagcgtctcttaccgccttccctggacacctattctgaatgcagtgaggtggatcggtccaactccctggagcgcaggaagggacccttgccagccaaaactgtgggttacccacagggggtagcggcatgggcagccagtacgcattttcaaaatcccaccaccaactgtgggccgccacttggaactcactccagtgtgcagccttcttcaaaatggctgccagccatggaggagatccctgaaaattatgaggaagatgattttgacaatgtgctcaaccacctcaatgatgggaaacacgaactcatggatgccagtgaactggtggcagagattaacaaactgcttcaagatgtccgccagagctaggagattttagcgaagcatttttgtttccatgtatatggaaatagggaacaacaacaacaacaaaaaaccctgaaagaactggcattgccaaatagttgcatttatcataaatgtgtctgtgtatattgaatatt

SEQ ID NO: 4263 - DNA, 1646 bp, Homo sapiens
agcgagcgagggacgacggaagggacgggcaggtgtgggcgcggggccacgcagcccgacggcgggagtcgcaggtgctgggtgcatgggccagtgaggacgcacagagatccctcgccgcgcggaggaggagcagcgcgggagccaggcgctgccccaagaccctgcctgcgtccgagcgagcggaacctcgcgcttcgcccggggacaatccgaagtccgcgctatggaagaggagaaatatttgcctgagctgatggcagagaaagatagcctggatccatcttttgtgcatgcgtcgcgccttttggcagaagaaattgaaaagtttcaaggttctgatggaaaaaaggaagacgaagaaaagaagtatcttgatgtcatcagcaacaaaaacataaagctctcagaaagagtactgattcctgtcaagcagtatccaaagttcaattttgtggggaaattgcttggaccaagaggaaactccttgaagaggctacaggaagaaacaggtgctaaaatgtctatcctgggcaaaggatcaatgagagataaagctaaggaagaagaactaaggaagagtggggaagccaaatatgcccacttgagtgatgagcttcatgtattaattgaagtgtttgctccacctggggaagcttattcacgtatgagtcatgcattggaagagattaaaaaattcctggttcctgactacaatgatgaaattcgtcaggaacaactacgtgaattatcttacttaaatggctcagaggactctggtcgtggcagaggtattagaggcagagggatcagaatagctcccacagctccttcaaggggccgtgggggtgccattcctcctcccccaccacctggacgaggtgttctcacccctcggggaagcactgtaacccgtggagcgcttccagtgccacctgtagcaagaggtgtccctacccctcgagcccggggggcaccaacagtgccaggatacagggcacctcctcctccagcccatgaagcttatgaagaatatggttatgatgatggctacgggggtgaatatgatgaccagacctatgagacttatgataacagctacgcgacccaaacacaaagtgtgcctgaatactatgactacggtcatggagtaagtgaggatgcctatgacagctacgcaccagaagaatgggccacaacccgctctagcttgaaggcaccaccgcaaaggtcagccagagggggatacagggaacacccctatggtagatattgaaggtccttcccacctgtgacctcacctcaaagacaattcatagcctgtggtctccacataaacagcaacaagacaagtaatagtcctttttttgtttgtttgtttctattctagggataactgctcatgattactcccatatatttctagtatttccctctgtactgttggcgtgacattgacactagcattattttacaaaacagactgaaaaagacattagcaagcatagtctataaacctttcagtaggatgatattctcttggttgtttttcattgttgtgtgtaatcttttttttttctttttcttttttttttttgaggaaaagcatgaatttgttaacagattttgagtctcaaccaactagc

SEQ ID NO: 4264 - DNA, 946 bp, Homo sapiens
ttttcaattctagatcaggaactgaggacatatctaaattttctagttttatagaaggcttttatccacaagaatcaagatcttccctctctgagcaggaatcctttgtgcattgaagactttagattcctctctgcggtagacgtgcacttataagtatttgatggggtggattcgtggtcggaggtctcgacacagctgggagatgagtgaatttcataattataacttggatctgaagaagagtgatttttcaacacgatggcaaaagcaaagatgtccagtagtcaaaagcaaatgtagagaaaatgcatctccattttttttctgctgcttcatcgctgtagccatgggaatccgtttcattattatggtaacaatatggagtgctgtattcctaaactcattattcaaccaagaagttcaaattcccttgaccgaaagttactgtggcccatgtcctaaaaactggatatgttacaaaaataactgctaccaattttttgatgagagtaaaaactggtatgagagccaggcttcttgtatgtctcaaaatgccagccttctgaaagtatacagcaaagaggaccaggatttacttaaactggtgaagtcatatcattggatgggactagtacacattccaacaaatggatcttggcagtgggaagatggctccattctctcacccaacctactaacaataattgaaatgcagaagggagactgtgcactctatgcctcgagctttaaaggctatatagaaaactgttcaactccaaatacgtacatctgcatgcaaaggactgtgtaaagatgatcaaccatctcaataaaagccaggaacagagaagagattacaccagcggtaacactgccaactgagactaaaggaaacaaacaaaaacaggacaaaatgaccaaagactgtcagatttcttagact

SEQ ID NO: 4265 - DNA, 2741 bp, Homo sapiens
actgtgtggagcttctgagatctgtggaggtttttctctgcaaatgcaggaagaaatcaggtggatggatgcataattatggccctgctcctggtctctttgctggcattcctgagcttgggctcaggatgtcatcatcggatctgtcactgctctaacagggtttttctctgccaagagagcaaggtgacagagattccttctgacctcccgaggaatgccattgaactgaggtttgtcctcaccaagcttcgagtcatccaaaaaggtgcattttcaggatttggggacctggagaaaatagagatctctcagaatgatgtcttggaggtgatagaggcagatgtgttctccaaccttcccaaattacatgaaattagaattgaaaaggccaacaacctgctctacatcaaccctgaggccttccagaaccttcccaaccttcaatatctgttaatatccaacacaggtattaagcaccttccagatgttcacaagattcattctctccaaaaagttttacttgacattcaagataacataaacatccacacaattgaaagaaattctttcgtggggctgagctttgaaagtgtgattctatggctgaataagaatgggattcaagaaatacacaactgtgcattcaatggaacccaactagatgagctgaatctaagcgataataataatttagaagaattgcctaatgatgttttccacggagcctctggaccagtcattctagatatttcaagaacaaggatccattccctgcctagctatggcttagaaaatcttaagaagctgagggccaggtcgacttacaacttaaaaaagctgcctactctggaaaagcttgtcgccctcatggaagccagcctcacctatcccagccattgctgtgcctttgcaaactggagacggcaaatctctgagcttcatccaatttgcaacaaatctattttaaggcaagaagttgattatatgactcagactaggggtcagagatcctctctggcagaagacaatgagtccagctacagcagaggatttgacatgacgtacactgagtttgactatgacttatgcaatgaagtggttgacgtgacctgctcccctaagccagatgcattcaacccatgtgaagatatcatggggtacaacatcctcagagtcctgatatggtttatcagcatcctggccatcactgggaacatcatagtgctagtgatcctaactaccagccaatataaactcacagtccccaggttccttatgtgcaacctggcctttgctgatctctgcattggaatctacctgctgctcattgcatcagttgatatccataccaagagccaatatcacaactatgccattgactggcaaactggggcaggctgtgatgctgctggctttttcactgtctttgccagtgagctgtcagtctacactctgacagctatcaccttggaaagatggcataccatcacgcatgccatgcagctggactgcaaggtgcagctccgccatgctgccagtgtcatggtgatgggctggatttttgcttttgcagctgccctctttcccatctttggcatcagcagctacatgaaggtgagcatctgcctgcccatggatattgacagccctttgtcacagctgtatgtcatgtccctccttgtgctcaatgtcctggcctttgtggtcatctgtggctgctatatccacatctacctcacagtgcggaaccccaacatcgtgtcctcctctagtgacaccaggatcgccaagcgcatggccatgctcatcttcactgacttcctctgcatggcacccatttctttctttgccatttctgcctccctcaaggtgcccctcatcactgtgtccaaagcaaagattctgctggttctgtttcaccccatcaactcctgtgccaaccccttcctctatgccatctttaccaaaaactttcgcagagatttcttcattctgctgagcaagtgtggctgctatgaaatgcaagcccaaatttataggacagaaacttcatccactgtccacaacacccatccaaggaatggccactgctcttcagctcccagagtcaccaatggttccacttacatacttgtccctctaagtcatttagcccaaaactaaaacacaatgtgaaaatgtatctgagtattgaatgataattcagtcttgcctttgaagggtatgtcacaaagagctgacagtgcttctacacatttcatctaatttaatattcctggcatacctttaaggtaaattggtcaggaactattaattccatgtgatacattaggaagctgaattattagtaacaacaataataattaaagaatgcaatactgtattacatattttatccttatatatgttatttttgcacgttatgttcaaagtgcttttgttcagatatctcaagtgatccctgttaaataagcaggacagggattattcttggagttttacaaatgaggaaaccacgactcaaagagttaagtgacttgttcaaaattgtttagtttgtaagaggcagagccaggattaggtattccgactcccagagaatttcccagagaagcaccatggtttcattcattcattcattcaacaaatattaattgaacacccatctgaagcctttgtaatgcgtcagtgtggataggctgaaatacatttcccagatttcccttcctcatgtgttt

SEQ ID NO: 4266 - DNA, 1167 bp, Homo sapiens
gtccagccacaaaggtgacagcatttaacaaagcttagagaaacctccaggagactgctaccatggcagagaagcccaagctccactactccaatatacggggcagaatggagtccatccggtggctcctggctgcagctggagtagagtttgaagagaaatttataaaatctgcagaagatttggacaagttaagaaatgatggatatttgatgttccagcaagtgccaatggttgagattgatgggatgaagctggtgcagaccagagccattctcaactacattgccagcaaatacaacctctatgggaaagacataaaggagaaagccctgattgatatgtatatagaaggtatagcagatttgggtgaaatgatccttcttctgccctttactcaacctgaggaacaagatgccaagcttgccttgatccaagagaaaacaaaaaatcgctacttccctgcctttgaaaaagtcttaaagagccacggacaagactaccttgttggcaacaagctgagccgggctgacattcacctggtggaacttctctactacgtgaaagagcttgactctagccttatttccagcttccctctgctgaaggccctgaaaaccagaatcagtaacctgcccacagtgaagaagtttctacagcctggcagcccaaggaagcctcccatggatgagaaatctttagaagaatcaaggaagattttcaggttttaataaaccagccatagaggtcaagaacatgcaagaccagtattctaaagttttgcaacaattaagtgctttacctaagtgttgattgtgcctgttgtgaagctaatgaactctttcaaattatatgctaattaaataatacaactcctattcacccacttagttaaaattgatttcttctcattaggatctgatgtgaattcagttttccaatctcctcctagccaacaattttcttggaattacaaattcagtaaaaatggaaactataaattatgtggtttgtttgacttttccaagaattgccctgtaacatacaatttgtcatacaatctattaaaatgccaatgtaaaaatgcacctctgacattttcaggtatgcacaggagaagagttaccatcctggataatggcataaagacattttcttcttttcctg

SEQ ID NO: 4267 - DNA, 1187 bp, Homo sapiens
acttcatggcttctcacgcttgtgctgcatatcccacaccaattagacccaaggatcagttggaagtttccaggacatcttcattttatttccaccctcaatccacatttccagatgtccctgcagcaaagcgaaattccaggagaagaggacaaagatactcagagagaaaaagtaaaagaccgaagaaggaggctggagagaccaggatccttccagctgaacaaagtcagccacaaagcagactagccagccggctacaattggagtcagagtcccaaagacatgggcttgttagagtgctgtgcaagatgtctggtaggggccccctttgcttccctggtggccactggattgtgtttctttggggtggcactgttctgtggctgtggacatgaagccctcactggcacagaaaagctaattgagacctatttctccaaaaactaccaagactatgagtatctcatcaatgtgatccatgccttccagtatgtcatctatggaactgcctctttcttcttcctttatggggccctcctgctggctgagggcttctacaccaccggcgcagtcaggcagatctttggcgactacaagaccaccatctgcggcaagggcctgagcgcaacggtaacagggggccagaaggggaggggttccagaggccaacatcaagctcattctttggagcgggtgtgtcattgtttgggaaaatggctaggacatcccgacaagtttgtgggcatcacctatgccctgaccgttgtgtggctcctggtgtttgcctgctctgctgtgcctgtgtacatttacttcaacacctggaccacctgccagtctattgccttccccagcaagacctctgccagtataggcagtctctgtgctgatgccagaatgtatggtgttctcccatggaatgctttccctggcaaggtttgtggctccaaccttctgtccatctgcaaaacagctgagttccaaatgaccttccacctgtttattgctgcatttgtgggggctgcagctacactggtttccctgctcaccttcatgattgctgccacttacaactttgccgtccttaaactcatgggccgaggcaccaagttctgatcccccgtagaaatccccctttctctaatagcgaggctctaaccacacagcctacaatgctgcgtctc

SEQ ID NO: 4268 - DNA, 2576 bp, Homo sapiens
aagaggcaagaggtagcaacagcgagcgtgccggtcgctagtcgcgggtccccgagtgagcacgccagggagcaggagaccaaacgacgggggtcggagtcagagtcgcagtgggagtccccggaccggagcacgagcctgagcgggagagcgccgctcgcacgcccgtcgccacccgcgtacccggcgcagccagagccaccagcgcagcgctgccatggagcccagcagcaagaagctgacgggtcgcctcatgctggccgtgggaggagcagtgcttggctccctgggctacaacactggagtcatcaatgccccccagaaggtgatcgaggagttctacaaccagacatgggtccaccgctatggggagagcatcctgcccaccacgctcaccacgctctggtccctctcagtggccatcttttctgttgggggcatgattggctccttctctgtgggccttttcgttaaccgctttggccggcggaatttaatgctgatgatgaacctgctggccttcgtgtccgccgtgctcatgggcttctcgaaactgggcaagtcctttgagatgctgatcctgggccgcttcatcatcggtgtgtactgcggcctgaccacaggcttcgtgcccatgtatgtgggtgaagtgtcacccacagcccttcgtggggccctgggcaccctgcaccagctgggcatcgtcgtcggcatcctcatcgcccaggtgttcggcctggactccatcatgggcaacaaggacctgtggcccctgctgctgagcatcatcttcatcccggccctgctgcagtgcatcgtgctgcccttctgccccgagagtccccgcttcctgctcatcaaccgcaacgaggagaaccgggccaagagtgtgctaaagaagctgcgcgggacagctgacgtgacccatgacctgcaggagatgaaggaagagagtcggcagatgatgcgggagaagaaggtcaccatcctggagctgttccgctcccccgcctaccgccagcccatcctcatcgctgtggtgctgcagctgtcccagcagctgtctggcatcaacgctgtcttctattactccacgagcatcttcgagaaggcgggggtgcagcagcctgtgtatgccaccattggctccggtatcgtcaacacggccttcactgtcgtgtcgctgtttgtggtggagcgagcaggccggcggaccctgcacctcataggcctcgctggcatggcgggttgtgccatactcatgaccatcgcgctagcactgctggagcagctaccctggatgtcctatctgagcatcgtggccatctttggctttgtggccttctttgaagtgggtcctggccccatcccatggttcatcgtggctgaactcttcagccagggtccacgtccagctgccattgccgttgcaggcttctccaactggacctcaaatttcattgtgggcatgtgcttccagtatgtggagcaactgtgtggtccctacgtcttcatcatcttcactgtgctcctggttctgttcttcatcttcacctacttcaaagttcctgagactaaaggccggaccttcgatgagatcgcttccggcttccggcaggggggagccagccaaagtgacaagacacccgaggagctgttccatcccctgggggctgattcccaagtgtgagtcgccccagatcaccagcccggcctgctcccagcagccctaaggatctctcaggagcacaggcagctggatgagacttccaaacctgacagatgtcagccgagccgggcctggggttcctttctccagccagcaatgatgtccagaagaatattcaggacttaacggctccaggattttaacaaaagcaagactgttgctcaaatctattcagacaagcaacaggttttataatttttttattactgattttgttatttttatatcagcctgagtctcctgtgcccacatcccaggcttcaccctgaatggttccatgcctgagggtggagactaagccctgtcgagacacttgccttcttcacccagctaatctgtagggctggacctatgtcctaaggacacactaatcgaactatgaactacaaagcttctatcccaggaggtggctatggccacccgttctgctggcctggatctccccactctaggggtcaggctccattaggatttgccccttcccatctcttcctacccaaccactcaaattaatctttctttacctgagaccagttgggagcactggagtgcagggaggagaggggaagggccagtctgggctgccgggttctagtctcctttgcactgagggccacactattaccatgagaagagggcctgtgggagcctgcaaactcactgctcaagaagacatggagactcctgccctgttgtgtatagatgcaagatatttatatatatttttggttgtcaatattaaatacagacactaagttatagtatatctggacaagccaacttgtaaatacaccacctcactcctgttactcacctaaacagatataaatggctggtttttagaaac

SEQ ID NO: 4269 - DNA, 2660 bp, Homo sapiens
agggagtgggctgcagtgacagccggcggcggagcggccggtccacggaggagaattcagcttagagaactatcaacacaggacaatgcaagcccatgagctgttccggtattttcgaatgccagagctggttgacttccgacagtacgtgcgtactcttccgaccaacacgcttatgggcttcggagcttttgcagcactcaccaccttctggtacgccacgagacccaaacccctgaagccgccatgcgacctctccatgcagtcagtggaagtggcgggtagtggtggtgcacgaagatccgcactacttgacagcgacgagcccttggtgtatttctatgatgatgtcacaacattatacgaaggtttccagaggggaatacaggtgtcaaataatggcccttgtttaggctctcggaaaccagaccaaccctatgaatggctttcatataaacaggttgcagaattgtcggagtgcataggctcagcactgatacagaagggcttcaagactgccccagatcagttcattggcatctttgctcaaaatagacctgagtgggtgattattgaacaaggatgctttgcttattcgatggtgatcgttccactttatgatacccttggaaatgaagccatcacgtacatagtcaacaaagctgaactctctctggtttttgttgacaagccagagaaggccaaactcttattagagggtgtagaaaataagttaataccaggccttaaaatcatagttgtcatggatgcctacggcagtgaactggtggaacgaggccataggtgtggggtggaagtcaccagcatgaaggcgatggaggacctgggaagagccaacagacggaagcccaagcctccagcacctgaagatcttgcagtaatttgtttcacaagtggaactacaggcaaccccaaaggagcaatggtcactcaccgaaacatagtgagcgattgttcagcttttgtgaaagcaacagagaatacagtcaatccttgcccagatgatactttgatatctttcttgcctctcgcccatatgtttgagagagttgtagagtgtgtaatgctgtgtcatggagctaaaatcggatttttccaaggagatatcaggctgctcatggatgacctcaaggtgcttcaacccactgtcttccccgtggttccaagactgctgaaccggatgtttgaccgaattttcggacaagcaaacaccacgctgaagcgatggctcttggactttgcctccaagaggaaagaagcagagcttcgcagcggcatcatcagaaacaacagcctgtgggaccggctgatcttccacaaagtacagtcgagcctgggcggaagagtccggctgatggtgacaggagccgccccggtgtctgccactgtgctgacgttcctcagagcagccctgggctgtcagttttatgaaggatacggacagacagagtgcactgccgggtgctgcctgaccatgcctggagactggaccgcaggccatgttggggccccgatgccgtgcaatttgataaaacttgttgatgtggaagaaatgaattacatggctgccgagggcgagggcgaggtgtgtgtgaaagggccaaatgtatttcagggctacttgaaggacccagcgaaaacagcagaagctttggacaaagacggctggttacacacaggggacattggaaaatggttaccaaatggcaccttgaaaattatcgaccggaaaaagcacatatttaagctggcacaaggagaatacatagcccctgaaaagattgaaaatatctacatgcgaagtgagcctgttgctcaggtgtttgtccacggagaaagcctgcaggcatttctcattgcaattgtggtaccagatgttgagacattatgttcctgggcccaaaagagaggatttgaagggtcgtttgaggaactgtgcagaaataaggatgtcaaaaaagctatcctcgaagatatggtgagacttgggaaggattctggtctgaaaccatttgaacaggtcaaaggcatcacattgcaccctgaattattttctatcgacaatggccttctgactccaacaatgaaggcgaaaaggccagagctgcggaactatttcaggtcgcagatagatgacctctattccactatcaaggtttagtgtgaagaagaaagctcagaggaaatggcacagttccacaatctcttctcctgctgatggccttcatgttgttaattttgaatacagcaagtgtagggaaggaagcgttcgtgtttgacttgtccattcggggttcttctcataggaatgctagaggaaacagaacactgccttacagtcacctcatgttgcagaccatgtttatggtaatacacactttccaaaatgagccttaaaaattgtaaaggggatactataaatgtgctaagttatttgagacttcctcagtttaaaaagtgggttttaaatcttctgtctccctgtttttctaatcaaggggttaggactttgctatctctgagatgtctgctacttgctgcaaattctgcagctgtctgctgctctaaagagtacagtgcactagagggaagtgttccctttaaaaataagaacaactgtcctggctggagaatctcac

SEQ ID NO: 4270 - DNA, 1951 bp, Homo sapiens
attggatcaaacatgtcacaagagtcggacaataataaaagactagtggccttagtgcccatgcccagtgaccctccattcaatacccgaagagcctacaccagtgaggatgaagcctggaagtcatacttggagaatcccctgacagcagccaccaaggccatgatgagcattaatggtgatgaggacagtgctgctgccctcggcctgctctatgactactacaaggttcctcgagacaagaggctgctgtctgtaagcaaagcaagtgacagccaagaagaccaggagaaaagaaactgccttggcaccagtgaagcccagagtaatttgagtggaggagaagaccgagtgcaagtcctaaagactgttccagtgaacctttccctaaatcaagatcacctggagaattccaagcgggaacagtacagcatcagcttccccgagagctctgccatcatcccggtgtcgggaatcacggtggtgaaagctgaagatttcacaccagttttcatggccccacctgtgcactatccccggggagatggggaagagcaacgagtggttatctttgaacagactcagtatgacgtgccctcgctggccacccacagcgcctatctcaaagacgaccagcgcagcactccggacagcacatacagcgagagcttcaagggcgcagccacagagaaatttcggagtgcttcagttggggctgaggagtacatgtatgatcagacatcaagtggcacatttcagtacaccctggaagccaccaaatctctccgtcagaagcagggggagggccccatgacctacctcaacaaaggacagttctatgccataacactcagcgagaccggagacaacaaatgcttccgacaccccatcagcaaagtcaggagtgtggtgatggtggtcttcagtgaagacaaaaacagagatgaacagctcaaatactggaaatactggcactctcggcagcatacggcgaagcagagggtccttgacattgccgattacaaggagagctttaatacgattggaaacattgaagagattgcatataatgctgtttcctttacctgggacgtgaatgaagaggcgaagattttcatcaccgtgaattgcttgagcacagatttctcctcccaaaaaggggtgaaaggacttcctttgatgattcagattgacacatacagttataacaatcgtagcaataaacccattcatagagcttattgccagatcaaggtcttctgtgacaaaggagcagaaagaaaaatccgagatgaagagcggaagcagaacaggaagaaagggaaaggccaggcctcccaaactcaatgcaacagctcctctgatgggaagttggctgccatacctttacagaagaagagtgacatcacctacttcaaaaccatgcctgatctccactcacagccagttctcttcatacctgatgttcactttgcaaacctgcagaggaccggacaggtgtattacaacacggatgatgaacgagaaggtggcagtgtccttgttaaacggatgttccggcccatggaagaggagtttggtccagtgccttcaaagcagatgaaagaagaagggacaaagcgagtgctcttgtacgtgaggaaggagactgacgatgtgttcaatgcattgatgttgaagtctcccacagtgaagggcctgatggaagcgatatctgagaaatatgggctgcccgtggagaagatagcaaagctttacaagaaaagcaaaaaaggcatcttggtgaacatggatgacaacatcatcgagcactactcgaacgaggacaccttcatcctcaacatggagagcatggtggagggcttcaaggtcacgctcatggaaatctagccctgggtttggcatccgctttggctggagctctcagtgcgttcctccctgagagagacag

SEQ ID NO: 4271 - DNA, 3135 bp, Homo sapiens
ataacgctacctgccgagcaagccgagtggagggaggcaaaggccaggctgaggatcagggtggcccgggtggcagcggggaggcgctgcatgctggaggctgtgctgagtgcccggtgcaggtgagccggtcctgcggagttgtgccgagtgcctgctgcagtctcatttccagttcctccatgacgtggcaagtgaagacaggaatgaaaggaatgtaaagcagcttttctctgaagagaagaagagagagagacacagccaagaccgaggctgggccaagatggcgtctgtgtttcgaagcgaggagatgtgtttgtcacaactgtttctccaggtggaagctgcatattgctgtgtggctgagctcggagagctcggattggttcagttcaaagatttaaatatgaatgtgaacagctttcaaaggaaatttgtgaatgaagtcagaaggtgtgaatcactggagagaatcctccgttttctggaagacgagatgcaaaatgagattgtagttcagttgctcgagaaaagcccactgaccccgctcccacgggaaatgattaccctggagactgttctagaaaaactggaaggagagttacaggaagccaaccagaaccagcaggccttgaaacaaagcttcctagaactgacagaactgaaatacctcctgaagaaaacccaagacttctttgagacggaaaccaatttagctgatgatttctttactgaggacacttctggcctcctggagttgaaagcagtgcctgcatatatgaccggaaagttggggttcatagccggtgtgatcaacagggagaggatggcttcctttgagcggttactgtggcgaatctgccgaggaaacgtgtacttgaagttcagtgagatggacgcccctctggaggatcctgtgacgaaagaagaaattcagaagaacatattcatcatattttaccaaggagagcagctcaggcagaaaatcaagaagatctgtgatgggtttcgagccactgtctacccttgcccagagcctgcggtggagcgcagagagatgttggagagcgtcaatgtgaggctggaagatttaatcaccgtcataacacaaacagagtctcaccgccagcgcctgctgcaggaagccgctgccaactggcactcctggctcatcaaggtgcagaagatgaaagctgtctaccacatcctgaacatgtgcaacatcgacgtcacccagcagtgtgtcatcgccgagatctggttcccggtggcagatgccacacgtatcaagagggcactggagcaaggcatggaactaagtggctcctccatggcccccatcatgaccacagtgcaatctaaaacagcccctcccacatttaacaggaccaataaattcacagctggcttccagaatattgttgatgcctatggtgtcggcagctaccgggagataaacccagccccctacaccatcatcactttccccttcctgttcgctgtgatgtttggagactgtggtcatggaaccgtgatgctcctggctgcactttggatgattctgaatgagagacgcttgctctcccagaagacagacaatgagatttggaacaccttcttccacgggcgctatctgatcctacttatgggcatcttctccatctacacgggtttgatctacaatgactgcttctccaagtccttgaacatctttggctcttcttggagtgtccaacccatgttcagaaacggcacatggaatactcatgtaatggaggaaagtctatatctgcagctggacccagccataccaggagtgtattttggaaatccatacccgtttggaattgatccgatttggaacttggcttcaaacaaactcacatttctgaactcgtataaaatgaagatgtcggtgatcctgggaattgtccagatggtttttggtgtcatcctcagccttttcaatcacatatacttcagaagaactctcaacatcattctgcaatttatccctgagatgatttttatcctgtgtctgtttggatacctggttttcatgatcattttcaaatggtgctgctttgacgtccacgtatctcagcacgcccccagcatcctcatccacttcatcaacatgtttctgtttaactacagtgactcttccaacgcacccctctacaaacatcagcaagaagtccaaagtttctttgtggttatggctttgatttctgtgccgtggatgcttctgattaagccgtttattcttagagccagtcatcggaaatcccagctgcaggcatccaggatccaagaagatgccactgagaacattgaaggtgatagctccagcccttctagccgttctggccagaggacttctgcagatacccacggggctctggacgaccatggagaagagttcaactttggagacgtctttgtccaccaagccatccacaccatcgagtactgcctgggctgcatttcaaacacagcctcctacctgcggctctgggccctcagcctggctcatgcacaactgtctgaagtgctctggactatggtgatgaacagcggccttcagacgcgaggctggggaggaatcgtcggggtttttattatttttgccgtatttgctgtcctgacagtagccatccttctgatcatggagggcctctctgctttcctgcacgccctgcgactgcactgggttgagttccagaacaagttctatgtcggggatggttacaagttttctccattctcctttaaacacatcctggatggcacagccgaggagtaggctgagggctgcacctcccacggtggtcaccatgccaatgaaggaagttcagtcttgtctttgatatcagcccctgcaaggcgctcaatgggaaggttgttcttggctcacctgaagcatgaaactgtgtattatttggacgtcagcctgtggatttgatacgacttaaccacgtcagaggaaggactttggcaagtgatattgtcttcatgtggggtattaattctcaaataataaaataattgacaaatgaggggagaatgctaaacagatgtcttcttgcaatattttaaatattgtatttgagaaaataaacatctgagtcattc

SEQ ID NO: 4272 - DNA, 1234 bp, Homo sapiens
aaccgagagagcacgtgagcatctgtcctttctacccgttcctctttatctttagtgttcagtagcagcggggatagcccggggcccggtgtatggccacggagttacagtgtccggactccatgccctgtcacaaccagcaagtaaactctgcctcaaccccaagtcccgagcagctgcgacctggcgatctgatcctggaccacgcagggggaaacagagcctccagggccaaggtgattctcctcacggggtacgcccattctagcctgccggccgagctggactctggggcctgcggcggctccagcctcaactcagagggcaacagtggtagtggtgacagtagcagctatgacgcaccagctggcaactccttcctagaggactgcgaactctcccggcagatcggggcgcagcttaagctgctgcctatgaatgatcagatacgggagctacagaccatcatccgggacaagacagccagtagaggtgacttcatgttttctgcggatcgtttgatcagacttgttgtggaagagggattgaatcagctgccatataaagaatgcatggtgaccactccaacagggtacaagtatgaaggagtgaaatttgagaagggaaattgtggggtcagcataatgagaagcggtgaggcaatggaacaaggtttacgagactgctgtcgatccatacgaattggaaagatcctgattcagagtgatgaggagacacaaagagccaaagtatattatgccaaattccccccagacatttaccggagaaaagtccttctgatgtatccaattctcagcactggaaatactgtaattgaagctgtaaaggttcttatagaacatggagttcaacccagtgttatcatcctactcagtctgttctccactcctcatggtgccaaatcaatcattcaggagtttccagagatcacaattttaactactgaagttcatcctgttgcacctacacattttggacagaaatactttggaacagactaagttatttaagtaaaataattgtcttatgtaatattacaatcatgttttgattttctatttgttttactgattcacttgagggtggcagagaaaaatgtgttaaaatgctttttagttttggaagtgggtatatttgaggttatatctcatttagttatttgtttactgttggcaccgaattcaacaatgaagtatatgcaactcttacaaaa

SEQ ID NO: 4273 - DNA, 1555 bp, Homo sapiens
agctccccggcagcggcggtggagagcgcagcgcgcagcccggtgcagccctggctttcccctcgctgcgcgcccgcgccccctttcgcgtccgcaaccagaagcccagtgcggcgccaggagccggacccgcgcccgcaccgctcccgggaccgcgaccccggccgcccagagatgaccgcgaccgaagccctcctgcgcgtcctcttgctcctgctggctttcggccacagcacctatggggctgaatgcttcccggcctgcaacccccaaaatggattctgcgaggatgacaatgtttgcaggtgccagcctggctggcagggtcccctttgtgaccagtgcgtgacctctcccggctgccttcacggactctgtggagaacccgggcagtgcatttgcaccgacggctgggacggggagctctgtgatagagatgttcgggcctgctcctcggccccctgtgccaacaacgggacctgcgtgagcctggacgatggcctctatgaatgctcctgtgcccccgggtactcgggaaaggactgccagaaaaaggacgggccctgtgtgatcaacggctccccctgccagcacggaggcacctgcgtggatgatgagggccgggcctcccatgcctcctgcctgtgcccccctggcttctcaggcaatttctgcgagatcgtggccaacagctgcacccccaacccatgcgagaacgacggcgtctgcactgacatcgggggcgacttccgctgccggtgcccagccggcttcatcgacaagacctgcagccgcccggtgaccaactgcgccagcagcccgtgccagaacgggggcacctgcctgcagcacacccaggtgagctacgagtgtctgtgcaagcccgagttcacaggtctcacctgtgtcaagaagcgcgcgctgagcccccagcaggtcacccgtctgcccagcggctatgggctggcctaccgcctgacccctggggtgcacgagctgccggtgcagcagccggagcaccgcatcctgaaggtgtccatgaaagagctcaacaagaaaacccctctcctcgccgagggccaggccatctgcttcaccatcctgggcgtgctcaccagcctggtggtgctgggcactgtgggtatcgtcttcctcaacaagtgcgagacctgggtgtccaacctgcgctacaaccacatgctgcggaagaagaagaacctgctgcttcagtacaacagcggggaggacctggccgtcaacatcatcttccccgagaagatcgacatgaccaccttcagcaaggaggccggcgacgaggagatctaagcagcgttcccacagccccctctagattcttggagttccgcagagcttactatacgcggtctgtcctaatctttgtggtgttcgctatctcttgtgtcaaatctggtgaacgctacgcttacatatattgtctttgtgctgctgtgtgacaaacgcaatgcaaaaacaatcctctttctctctcttaatgcatgatacagaataataataagaatttcatctttaaatg

SEQ ID NO: 4274 - DNA, 3064 bp, Homo sapiens
agattgcgcgagggggagcgagcgagcgggcgctgccaggagcccgcagccctggcgcccgccgccgcccggagccccgcaatatgccgccgcggccctctggctctaggccatggcgaggctctgccggcgtgtcccctgcaccctgcttctcggcctggccgtggtgctactgaaagcgcggctggtccccgcggccgccagagcggaactcagccgctccgacctcagcctcatccaacagcagcagcagcagcagcaacaacaacaacaacaacagcaaaagcagctggaggaggctgaggaggagaggacagaggtgcctggggcaacctccaccttgacggttccagtgtctgtatttatgttgaaagtccaggtgaatgacatcatcagtcgtcagtacctgagccaagcagttgtagaagtgtttgtaaactacacgaagacaaattccacagtaactaaaagcaatggagcagtgctgataaaagtaccctacaaattaggacttagtttaactattattgcttacaaagatggctacgtgttgacccctctgccttggaaaaccagaagaatgccaatatattcatcagttacactttcactgttcccgcaaagccaagcaaatatatggctatttgaagacactgttttaattactggaaaattagctgatgccaagtctcaaccaagtgttcagttttcaaaagccttaattaaacttcctgacaaccatcatattagcaacgttactggctatcttacagttctacaacagtttttgaaagtggacaattttctgcatacaactggaattactctcaataaaccaggttttgaaaacattgaattgactcctcttgctgcaatatgtgtgaaaatatattctggaggaaaagaactaaaggtcaatggctctattcaagtttctcttcctcttctacgtctgaatgatataagtgcaggggatcgcatacctgcttggacatttgatatgaacacaggtgcttgggtaaatcatggtcggggaatggtcaaggaacataacaatcatttaatctggacatatgatgcaccacatttggggtactggatagcagctccacttccaggaactagaggttcaggtataaatgaagattccaaggacataactgcctaccacacagtgtttcttacagccatattaggaggaacaatagtcattgtcattggattttttgctgtactactttgttattgcagggacaagtgtggtactccacagaaaagagaaagaaatatcactaaacttgaggtcctcaagagagaccagacaacttcaacaacacacataaatcatatcagtacagttaaagttgcattaaaagctgaggacaagtcgcagttattcaatgccaaaaactcctcatatagtcctcagaaaaaggaaccatcaaaggcagaaacagaagaaagagtttccatggtaaaaactcgggacgattttaaaatctacaatgaagatgtttcatttctatcagtcaatcaaaataattactcaagaaacccaacacagtctttggagcccaatgtagggtccaaacaacctaaacatattaacaacaatctatcttcatctctaggtgatgctcaagatgaaaagaggtatctcacaggtaatgaggaggcgtatgggcgttcccatattcctgaacagcttatgcatatttacagccaacccattgccatccttcaaacatctgaccttttctccacaccggaacaattacatactgctaagtcagctactttgccaagaaagggacagttagtctatggccaattgatggaaccagtaaatcgagagaactttacgcagaccttgcccaaaatgccaattcattctcatgcacagcccccagatgccagggaagaggatatcatacttgaaggtcaacagagcctgccatcccaggcttcagattggagccgatactcaagcagcttactggaatccgtctctgttcctggaacactaaatgaggctgttgtaatgactccattttcatcggaacttcaaggaatttcagaacagaccctcctggagctgtccaaaggaaagccctccccgcatcccagagcctggtttgtgtctcttgatggaaagccagttgcacaagtgaggcactcctttatagacctgaaaaagggcaagagaacccagagcaatgacaccagtctggactctggggtggacatgaatgagcttcactcaagtagaaagctcgagagggagaaaacattcatcaaaagcatgcatcagcccaagatcctttacttagaagatttagacctaagcagcagtgagagtggaaccaccgtctgttcccctgaggacccagctttaaggcacatcctagatggagggagtggagtgatcatggagcaccctggagaagagtcgccaggaaggaaaagcactgttgaagattttgaagctaatacatcccccactaaaagaaggggcagaccaccactagccaaaagagatagcaagactaacatctggaagaagcgagaggaacgcccactgattcccataaattaactccaatggggattgtgtgtctgctgtctcgtgctgtttattcttgcttcttgttgtaaattgcagtacgaacttaagaaaatgagactgagcaatctcatggttcttggacatgtctcaagcagagtaaatggtaattcagtaatcagagagaaagataccaaggaatgctttttctggcctattcatttatttttgggtgatgaatttacagtatctaagttttcaaaatgtaaaatagcttcaagatgttagttatctgaaaatgttgctcagccagccagtttggccttgactctcttaagaataacagtgaaatatatactccttaagttgcctccaaaaatgttgcctctaccatggtgactaccccatggaacatttagaaacaaaactgacttcaggcatcatattattttaaatgttactattacgtcttcttctgcctatacttaaaaataacttgat

SEQ ID NO: 4275 - DNA, 1814 bp, Homo sapiens
gttgatgcttttgactttctgtccttgttcctcgtcccatctggagcatttccaattctggttttgcggagcagcaggtctgagcttgtccggcgagggtgggagttggtcccggcggagatccagtgggaagagccggcggctgcccgggcaactcccccactggaaaggattctgaaagaaatgaagtcagccctcagaaatgaagttgactgcctgctggctttctgttgactggcccggagctgtactgcaagacccttgtgagcttccctagtctaagagtaggatgtctgctgaagtcatccatcaggttgaagaagcacttgatacagatgagaaggagatgctgctctttttgtgccgggatgttgctatagatgtggttccacctaatgtcagggaccttctggatattttacgggaaagaggtaagctgtctgtcggggacttggctgaactgctctacagagtgaggcgatttgacctgctcaaacgtatcttgaagatggacagaaaagctgtggagacccacctgctcaggaaccctcaccttgtttcggactatagagtgctgatggcagagattggtgaggatttggataaatctgatgtgtcctcattaattttcctcatgaaggattacatgggccgaggcaagataagcaaggagaagagtttcttggaccttgtggttgagttggagaaactaaatctggttgccccagatcaactggatttattagaaaaatgcctaaagaacatccacagaatagacctgaagacaaaaatccagaagtacaagcagtctgttcaaggagcagggacaagttacaggaatgttctccaagcagcaatccaaaagagtctcaaggatccttcaaataacttcaggctccataatgggagaagtaaagaacaaagacttaaggaacagcttggcgctcaacaagaaccagtgaagaaatccattcaggaatcagaagcttttttgcctcagagcatacctgaagagagatacaagatgaagagcaagcccctaggaatctgcctgataatcgattgcattggcaatgagacagagcttcttcgagacaccttcacttccctgggctatgaagtccagaaattcttgcatctcagtatgcatggtatatcccagattcttggccaatttgcctgtatgcccgagcaccgagactacgacagctttgtgtgtgtcctggtgagccgaggaggctcccagagtgtgtatggtgtggatcagactcactcagggctccccctgcatcacatcaggaggatgttcatgggagattcatgcccttatctagcagggaagccaaagatgttttttattcagaactatgtggtgtcagagggccagctggaggacagcagcctcttggaggtggatgggccagcgatgaagaatgtggaattcaaggctcagaagcgagggctgtgcacagttcaccgagaagctgacttcttctggagcctgtgtactgcggacatgtccctgctggagcagtctcacagctcaccatccctgtacctgcagtgcctctcccagaaactgagacaagaaagaaaacgcccactcctggatcttcacattgaactcaatggctacatgtatgattggaacagcagagtttctgccaaggagaaatattatgtctggctgcagcacactctgagaaagaaacttatcctctcctacacataagaaaccaaaaggctgggcgtagtggctcacacctgtaatcccagcactttgggaggccaaggagggcagatcacttcaggtc

SEQ ID NO: 4276 - DNA, 1672 bp, Homo sapiens
agccgcgcctgcccaggcccggggagggaggaggcgggcgtcagggtgctgcgccccgctcggcgtccgagcttccggccgggctgtgccccgcgcggtcttcgccgggatgaagcgcccctgcgaggagacgacctccgagagcgacatggacgagaccatcgacgtggggagcgagaacaattactcggggcaaagtactagctctgtgattagattgaattctccaacaacaacatctcagattatggcaagaaagaaaaggagagggattatagagaaaaggcgtcgggatcggataaataacagtttatctgagttgagaagacttgtgccaactgcttttgaaaaacaaggatctgcaaagttagaaaaagctgaaatattgcaaatgacagtggatcatttgaagatgcttcaggcaacagggggtaaaggctactttgacgcacacgctcttgccatggacttcatgagcataggattccgagagtgcctaacagaagttgcgcggtacctgagctccgtggaaggcctggactcctcggatccgctgcgggtgcggcttgtgtctcatctcagcacttgcgccacccagcgggaggcggcggccatgacatcctccatggcccaccaccatcatccgctccacccgcatcactgggccgccgccttccaccacctgcccgcagccctgctccagcccaacggcctccatgcctcagagtcaaccccttgtcgcctctccacaacttcagaagtgcctcctgcccacggctctgctctcctcacggccacgtttgcccatgcggattcagccctccgaatgccatccacgggcagcgtcgccccctgcgtgccacctctctccacctctctcttgtccctctctgccaccgtccacgccgcagccgcagcagccaccgcggctgcacacagcttccctctgcccttcgcgggggcattccccatgcttcccccaaacgcagcagcagcagtggccgcggccacagccatcagcccgcccttgtcagtatcagccacgtccagtcctcagcagaccagcagtggaacaaacaataaaccttaccgaccctgggggacagaagttggagctttttaaatttttcttgaacttcttgcaatagtaactgaatgtcctccatttcagagtcagcttaaaacctctgcaccctgaagatagccatacagatgccgacagatccacaaaggaacaataaagctatttgagacacaaacctcacgagtggaaatgtggtattctcttttttttctctcccttttttgtttggttcaaggcagctcggtaactgacatcagcaacttttgaaaacttcacacttgttaccatttagaagtttcctggaaaatatatggaccgtaccatccagcagtgcatcagtatgtctgaattggggaagtaaaatgccctgactgaattctcttgagactagatgggacatacatatatatagagagagtgagagagtcgtgtttcgtaagtgcctgagcttaggaagttttcttctggatatataacattgcacaagggaagacgagtgtggaggataggttaagaaaggaaagggacagaagtcttgcaataggctgcagacattttaataccatgccagagaagagtattctgctg

SEQ ID NO: 4277 - DNA, 2040 bp, Homo sapiens
aggcgtccaacctgctgccgcctgggccccgccgagcggagctagcgccgcgcgcagagcacacgctcgcgctccagctcccctcctgcgcggttcatgactgtgtcccctgaccgcagcctctgcgagcccccgccgcaggaccacggcccgctccccgccgccgcgagggccccgagcgaaggaaggaagggaggcgcgctgtgcgccccgcggagcccgcgaaccccgctcgctgccggctgcccagcctggctggcaccatgctgcccgcgcgctgcgcccgcctgctcacgccccacttgctgctggtgttggtgcagctgtcccctgctcgcggccaccgcaccacaggccccaggtttctaataagtgaccgtgacccacagtgcaacctccactgctccaggactcaacccaaacccatctgtgcctctgatggcaggtcctacgagtccatgtgtgagtaccagcgagccaagtgccgagacccgaccctgggcgtggtgcatcgaggtagatgcaaagatgctggccagagcaagtgtcgcctggagcgggctcaagccctggagcaagccaagaagcctcaggaagctgtgtttgtcccagagtgtggcgaggatggctcctttacccaggtgcagtgccatacttacactgggtactgctggtgtgtcaccccggatgggaagcccatcagtggctcttctgtgcagaataaaactcctgtatgttcaggttcagtcaccgacaagcccttgagccagggtaactcaggaaggaaagatgacgggtctaagccgacacccacgatggagacccagccggtgttcgatggagatgaaatcacagccccaactctatggattaaacacttggtgatcaaggactccaaactgaacaacaccaacataagaaattcagagaaagtctattcgtgtgaccaggagaggcagagtgccctggaagaggcccagcagaatccccgtgagggtattgtcatccctgaatgtgcccctgggggactctataagccagtgcaatgccaccagtccactggctactgctggtgtgtgctggtggacacagggcgcccgctgcctgggacctccacacgctacgtgatgcccagttgtgagagcgacgccagggccaagactacagaggcggatgaccccttcaaggacagggagctaccaggctgtccagaagggaagaaaatggagtttatcaccagcctactggatgctctcaccactgacatggttcaggccattaactcagcagcgcccactggaggtgggaggttctcagagccagaccccagccacaccctggaggagcgggtagtgcactggtatttcagccagctggacagcaatagcagcaacgacattaacaagcgggagatgaagcccttcaagcgctacgtgaagaagaaagccaagcccaagaaatgtgcccggcgtttcaccgactactgtgacctgaacaaagacaaggtcatttcactgcctgagctgaagggctgcctgggtgttagcaaagaagtaggacgcctcgtctaaggagcagaaaacccaagggcaggtggagagtccagggaggcaggatggatcaccagacacctaaccttcagcgttgcccatggccctgccacatcccgtgtaacataagtggtgcccaccatgtttgcacttttaataactcttacttgcgtgttttgtttttggtttcattttaaaacaccaatatctaataccacagtgggaaaaggaaagggaagaaagactttattctctctcttattgtaagtttttggatctgctactgacaacttttagagggttttgggggggtgggggagggtgttgttggggctgagaagaaagagatttatatgctgtatataaatatatatgtaaattgtatagttcttttgtacaggcattggcattgctgtttgtttatttctctccctctgcctgctgtgggtggtgggcactctggacacatagtccagctttctaaaatcca

SEQ ID NO: 4278 - DNA, 2927 bp, Homo sapiens
gtgagcttgcggaagtcagttcagactccagcccgctccagcccggcccgacccgaccgcacccggcgcctgccctcgctcggcgtccccggccagccatgggcccttggagccgcagcctctcggcgctgctgctgctgctgcaggtctcctcttggctctgccaggagccggagccctgccaccctggctttgacgccgagagctacacgttcacggtgccccggcgccacctggagagaggccgcgtcctgggcagagtgaattttgaagattgcaccggtcgacaaaggacagcctatttttccctcgacacccgattcaaagtgggcacagatggtgtgattacagtcaaaaggcctctacggtttcataacccacagatccatttcttggtctacgcctgggactccacctacagaaagttttccaccaaagtcacgctgaatacagtggggcaccaccaccgccccccgccccatcaggcctccgtttctggaatccaagcagaattgctcacatttcccaactcctctcctggcctcagaagacagaagagagactgggttattcctcccatcagctgcccagaaaatgaaaaaggcccatttcctaaaaacctggttcagatcaaatccaacaaagacaaagaaggcaaggttttctacagcatcactggccaaggagctgacacaccccctgttggtgtctttattattgaaagagaaacaggatggctgaaggtgacagagcctctggatagagaacgcattgccacatacactctcttctctcacgctgtgtcatccaacgggaatgcagttgaggatccaatggagattttgatcacggtaaccgatcagaatgacaacaagcccgaattcacccaggaggtctttaaggggtctgtcatggaaggtgctcttccaggaacctctgtgatggaggtcacagccacagacgcggacgatgatgtgaacacctacaatgccgccatcgcttacaccatcctcagccaagatcctgagctccctgacaaaaatatgttcaccattaacaggaacacaggagtcatcagtgtggtcaccactgggctggaccgagagagtttccctacgtataccctggtggttcaagctgctgaccttcaaggtgaggggttaagcacaacagcaacagctgtgatcacagtcactgacaccaacgataatcctccgatcttcaatcccaccacgtacaagggtcaggtgcctgagaacgaggctaacgtcgtaatcaccacactgaaagtgactgatgctgatgcccccaataccccagcgtgggaggctgtatacaccatattgaatgatgatggtggacaatttgtcgtcaccacaaatccagtgaacaacgatggcattttgaaaacagcaaagggcttggattttgaggccaagcagcagtacattctacacgtagcagtgacgaatgtggtaccttttgaggtctctctcaccacctccacagccaccgtcaccgtggatgtgctggatgtgaatgaagcccccatctttgtgcctcctgaaaagagagtggaagtgtccgaggactttggcgtgggccaggaaatcacatcctacactgcccaggagccagacacatttatggaacagaaaataacatatcggatttggagagacactgccaactggctggagattaatccggacactggtgccatttccactcgggctgagctggacagggaggattttgagcacgtgaagaacagcacgtacacagccctaatcatagctacagacaatggttctccagttgctactggaacagggacacttctgctgatcctgtctgatgtgaatgacaacgcccccataccagaacctcgaactatattcttctgtgagaggaatccaaagcctcaggtcataaacatcattgatgcagaccttcctcccaatacatctcccttcacagcagaactaacacacggggcgagtgccaactggaccattcagtacaacgacccaacccaagaatctatcattttgaagccaaagatggccttagaggtgggtgactacaaaatcaatctcaagctcatggataaccagaataaagaccaagtgaccaccttagaggtcagcgtgtgtgactgtgaaggggccgctggcgtctgtaggaaggcacagcctgtcgaagcaggattgcaaattcctgccattctggggattcttggaggaattcttgctttgctaattctgattctgctgctcttgctgtttcttcggaggagagcggtggtcaaagagcccttactgcccccagaggatgacacccgggacaacgtttattactatgatgaagaaggaggcggagaagaggaccaggactttgacttgagccagctgcacaggggcctggacgctcggcctgaagtgactcgtaacgacgttgcaccaaccctcatgagtgtcccccggtatcttccccgccctgccaatcccgatgaaattggaaattttattgatgaaaatctgaaagcggctgatactgaccccacagccccgccttatgattctctgctcgtgtttgactatgaaggaagcggttccgaagctgctagtctgagctccctgaactcctcagagtcagacaaagaccaggactatgactacttgaacgaatggggcaatcgcttcaagaagctggctgacatgtacggaggcggcgaggacgactaggggactcgagagaggcgggccccagacccatgtgctgggaaatgcagaaatcacgttgctggtggtttttcagctcccttcccttgagatgagtttctggggaaaaaaaagagactggttagtgatgcagttagtatagctttatactctctccactttatagctctaataagtttgtgt

SEQ ID NO: 4279 - DNA, 3730 bp, Homo sapiens
gcgccgggagctgccgagtgcgtggagggagccaggctccggctcgcctgatggattgacttggagatggatcgaattacaccatttgccgtgcatcggtttgttttgctcctgctctgtcccgctgctgctgctgctgctgcaaggggtggtggcgagtttcaggattctatcaaggaagccaagacctaaggagacagagggatatctatttttacaatatttttctttattttctttcttccttgcgcgtggcaagcttttttttttctttttcttttttcttaccagcctccccccaatgaggtagctcagtggcatttctgagcaggggccaccctgacttcaccttggcccaccatgagggtcttcctgctttgtgcctacatactgctgctgatggtttcccagttgagggcagtcagctttcctgaagatgatgaaccccttaatactgtcgactatcactattcaaggcaatatccggtttttagaggacgcccttcaggcaatgaatcgcagcacaggctggactttcagctgatgttgaaaattcgagacacactttatattgctggcagggatcaagtttatacagtaaacttaaatgaaatgcccaaaacagaagtaataccaaacaagaaactgacatggcgatcaagacaacaggatcgagaaaactgtgctatgaaaggcaagcataaagatgaatgccacaactttatcaaagtatttgttccaagaaacgatgagatggtttttgtttgtggtaccaatgcattcaatcccatgtgtagatactacaggttgagtaccttagaatatgatggggaagaaattagtggcctggcaagatgcccatttgatgccagacaaaccaatgttgccctctttgctgatgggaagctgtattctgccacagtggctgacttcttggccagcgataccgttatttatcgaagcatgggtgatggatctgcccttcgcacaataaaatatgattccaaatggataaaagagccacactttcttcatgccatagaatatggaaactatgtctatttcttctttcgagaaatcgctgtcgaacataataatttaggcaaggctgtgtattcccgcgtggcccgcatatgtaaaaacgacatgggtggttcccagcgggtcctggagaaacactggacttcatttctaaaggctcggctgaactgttctgtccctggagattcgtttttctactttgatgttctgcagtctattacagacataatacaaatcaatggcatccccactgtggtcggggtgtttaccacgcagctcaatagcatccctggttctgctgtctgtgcatttagcatggatgacattgaaaaagtattcaaaggacggtttaaggaacagaaaactccagattctgtttggacagcagttcccgaagacaaagtgccaaagccaaggcctggctgttgtgcaaaacacggccttgccgaagcttataaaacctccatcgatttcccggatgaaactctgtcattcatcaaatctcatcccctgatggactctgccgttccacccattgctgatgagccctggttcacaaagactcgggtcaggtacagactgacggccatctcagtggaccattcagccggaccctaccagaactacacagtcatctttgttggctctgaagctggcatggtacttaaagttctggcaaagaccagtcctttctctttgaacgacagcgtattactggaagagattgaagcctacaaccatgcaaagtgcagtgctgagaatgaggaagacaaaaaggtcatctcattacagttggataaagatcaccacgctttatatgtggcgttctctagctgcattatccgcatccccctcagtcgctgtgagcgttatggatcatgtaaaaagtcttgtattgcatctcgtgacccgtattgtggctggttaagccagggatcctgtggtagagtgaccccagggatgcttgctgaaggatatgaacaagacacagaattcggcaacacagctcatctaggggactgccatgaaattttgcctacttcaactacaccagattacaaaatatttggcggtccaacatctgacatggaggtatcttcatcttctgttaccacaatggcaagtatcccagaaatcacacctaaagtgattgatacctggagacctaaactgacaagctctcggaaatttgtagttcaagatgatccaaacacttctgattttactgatcctttatcgggtatcccaaagggtgtacgatgggaagtccagtctggagagtccaaccagatggtccacatgaatgtcctcatcacctgtgtctttgctgcttttgttttgggggcattcattgcaggtgtggcagtatactgctatcgagacatgtttgttcggaaaaacagaaagatccataaagatgcagagtccgcccagtcatgcacagactccagtggaagttttgccaaactgaatggtctctttgacagccctgtcaaggaataccaacagaatattgattctcctaaactgtatagtaacctgctaaccagtcggaaagagctaccacccaatggagatactaaatccatggtaatggaccatcgagggcaacctccagagttggctgctcttcccactcctgagtctacacccgtgcctcaccagaagaccctgcaggccatgaagagccactcagaaaaggcccatggccatggagcttcaaggaaagaaacccctcagttttttccgtctagtccgccacctcattccccattaagtcatgggcatatccccagtgccattgttcttccaaatgctacccatgactacaacacgtctttctcaaactccaatgctcacaaagctgaaaagaagcttcaaaacattgatcaccctctcacaaagtcatccagtaagagagatcaccggcgttctgttgattccagaaataccctcaatgatctcctgaagcatctgaatgacccaaatagtaaccccaaagccatcatgggagacatccagatggcacaccagaacttaatgctggatcccatgggatcgatgtctgaggtcccacctaaagtccctaaccgggaggcatcgctatactcccctccttcaactctccccagaaatagcccaaccaagcgagtggatgtccccaccactcctggagtcccaatgacttctctggaaagacaaagaggttatcacaaaaattcctcccagaggcactctatatctgctatgcctaaaaacttaaactcaccaaatggtgttttgttatccagacagcctagtatgaaccgtggaggatatatgcccacccccactggggcgaaggtggactatattcagggaacaccagtgagtgttcatctgcagccttccctctccagacagagcagctacaccagtaatggcactcttcctaggacgggactaaagaggacgccgtccttaaaacctgacgtgccaccaaagccttcctttgttcctcaaaccccatctgtcagaccactgaacaaatacacatactaggcctcaagtgtgctattcccatgtggctttatcctgtccgtgttgttgagaggatgatgttgtaagggtaccttaaaacaagagactcgcttgtattttaagagaaccaagtggccaaagaaactctttctaactttggcaacatcag

SEQ ID NO: 4280 - DNA, 1591 bp, Homo sapiens
gtagtttcccgggagagacgaaagcaggaacgagagcggagcggagcacagtccgccgagcacaagctccagcatcccgtcaggggttgcaggtgtgtgggaggcttgaaactgttacaatatggctttccttggactcttctctttgctggttctgcaaagtatggctacaggggccactttccctgaggaagccattgctgacttgtcagtgaatatgtataatcgtcttagagccactggtgaagatgaaaatattctcttctctccattgagtattgctcttgcaatgggaatgatggaacttggggcccaaggatctacccagaaagaaatccgccactcaatgggatatgacagcctaaaaaatggtgaagaattttctttcttgaaggagttttcaaacatggtaactgctaaagagagccaatatgtgatgaaaattgccaattccttgtttgtgcaaaatggatttcatgtcaatgaggagtttttgcaaatgatgaaaaaatattttaatgcagcagtaaatcatgtggacttcagtcaaaatgtagccgtggccaactacatcaataagtgggtggagaataacacaaacaatctggtgaaagatttggtatccccaagggattttgatgctgccacttatctggccctcattaatgctgtctatttcaaggggaactggaagtcgcagtttaggcctgaaaatactagaaccttttctttcactaaagatgatgaaagtgaagtccaaattccaatgatgtatcagcaaggagaattttattatggggaatttagtgatggctccaatgaagctggtggtatctaccaagtcctagaaataccatatgaaggagatgaaataagcatgatgctggtgctgtccagacaggaagttcctcttgctactctggagccattagtcaaagcacagctggttgaagaatgggcaaactctgtgaagaagcaaaaagtagaagtatacctgcccaggttcacagtggaacaggaaattgatttaaaagatgttttgaaggctcttggaataactgaaattttcatcaaagatgcaaatttgacaggcctctctgataataaggagatttttctttccaaagcaattcacaagtccttcctagaggttaatgaagaaggctcagaagctgctgctgtctcaggaatgattgcaattagtaggatggctgtgctgtatcctcaagttattgtcgaccatccatttttctttcttatcagaaacaggagaactggtacaattctattcatgggacgagtcatgcatcctgaaacaatgaacacaagtggacatgatttcgaagaactttaagttactttatttgaataacaaggaaaacagtaactaagcacattatgtttgcaactggtatatatttaggatttgtgttttacagtatatcttaagataatatttaaaatagttccagataaaaacaatatatgtaaattataagtaacttgtcaaggaatgttatcagtattaagctaatggtcctgttatgtcattgtgtttgtgtgctgttgtttaaaataaaagtacctattg

SEQ ID NO: 4281 - DNA, 2048 bp, Homo sapiens
agactgccacgaggaaaaagcagatgtgagaactcaaggttcagggctgctcttctaagaaacaagtctgccataatctccatctgtgttggaatctgttaactaatgaactggtctctgtgcaaatcctgagtgctaaagcttccaacaagactgatgctagctcgtgtcaccaggaagatgctacgtcatgccaagtgttttcagcgcctagcaatttttggttctgtgagggcactgcataaagataatagaacagcaacccctcagaatttctccaactatgaatccatgaaacaggacttcaaactggggattccagagtatttcaactttgctaaagatgtcctggaccaatggactgataaggaaaaggctggaaagaaaccttcaaatccagccttctggtggatcaacagaaatggagaagagatgcgatggagttttgaggaactgggatctctgtccagaaaatttgccaatatactttcagaagcctgttccctacaaagaggagatcgggtaattctgattctgcccagggtcccagagtggtggcttgcaaatgtggcctgtctgcgaacagggacagttttaattccaggaaccactcagctgacccagaaagacattctctacagactacaatcttcaaaagcaaactgcattatcaccaatgatgttttagccccagcagtagacgctgttgcatccaaatgtgaaaatctgcactccaagctgattgtatcagagaactccagagaggggtgggggaacctcaaggagttgatgaaacatgccagtgacagccacacctgtgtgaagacaaaacacaatgagatcatggccatattctttaccagtggaacaagtggatatccgaaaatgactgcacacacccacagcagttttggtttaggattatctgtaaatggaaggttctggctagatttgacaccctcagatgtgatgtggaatacctcagatacgggctgggcaaagtctgcatggagtagtgttttttctccgtggatccagggagcatgtgtattcacacaccatttaccccgttttgagccgacttctatcttgcaaacactctccaagtaccccgtcacagtcttctgttcagcaccaactgtataccgaatgcttgtacagaatgatataaccagctataagtttaaaagcttaaagcactgtgtgagtgctggggaaccaattacccctgacgtgactgaaaaatggagaaacaagacgggcctggatatctacgaaggatatggacagactgaaacggtgctaatctgtggaaattttaagggaatgaaaattaaacctggctcaatgggaaaaccttctcctgctttcgatgttaagattgtagatgtaaatggcaatgttctacctcctggacaagaaggagatattggcattcaagttctacccaaccgaccatttggcctttttactcattacgtagataatccttcaaaaacagcttcaactctacgaggcaatttctatatcactggggacagaggatatatggataaagatgggtatttctggtttgttgcaagagcagatgatgtcatattatcctctggctatcgaattggaccatttgaggtagaaaatgccctgaatgaacacccttcagttgcagagtcatctgttgtcagcagcccagaccccatcagaggagaggtagtaaaggcttttgtcgttctaaatcctgattacaagtcacatgatcaagaacaactaataaaggagattcaggagcatgttaaaaaaactacagcaccttacaaatatcccagaaaggtagaatttattcaagagctgccaaagactatcagtgggaagacaaaaagaaatgaactgaggaagaaagaatggaagacaatttaaagttgtttcattaattaccatatctataaaacaaacatagtatctgtcaatctctagaaaccacaagatgatggagaggtcataaaaactgtggtagtatgcttagaaactgttgatttaaaatatcttgt

SEQ ID NO: 4282 - DNA, 1440 bp, Homo sapiens
atggacaagttttggtggcacgcagcctggggactctgcctcgtgccgctgagcctggcgcagatcgatttgaatataacctgccgctttgcaggtgtattccacgtggagaaaaatggtcgctacagcatctctcggacggaggccgctgacctctgcaaggctttcaatagcaccttgcccacaatggcccagatggagaaagctctgagcatcggatttgagacctgcaggtatgggttcatagaagggcacgtggtgattccccggatccaccccaactccatctgtgcagcaaacaacacaggggtgtacatcctcacatccaacacctcccagtatgacacatattgcttcaatgcttcagctccacctgaagaagattgtacatcagtcacagacctgcccaatgcctttgatggaccaattaccataactattgttaaccgtgatggcacccgctatgcccagaaaggagaatacagaacgaatcctgaagacatctaccccagcaaccctactgatgatgacgtgagcagcggctcctccagtgaaaggagcagcacttcaggaggttacatcttttacaccttttctactgtacaccccatcccagacgaagacagtccctggatcaccgacagcacagacagaatccctgctaccagagaccaagacacattccaccccagtggggggtcccataccactcatggatctgaatcagatggacactcacatgggagtcaagaaggtggagcaaacacaacctctggtcctataaggacaccccaaattccagaatggctgatcatcttggcatccctcttggccttggctttgattcttgcagtttgcattgcagtcaacagtcgaagaaggtgtgggcagaagaaaaagctagtgatcaacagtggcaatggagctgtggaggacagaaagccaagtggactcaacggagaggccagcaagtctcaggaaatggtgcatttggtgaacaaggagtcgtcagaaactccagaccagtttatgacagctgatgagacaaggaacctgcagaatgtggacatgaagattggggtgtaacacctacaccattatcttggaaagaaacaaccgttggaaacataaccattacagggagctgggacacttaacagatgcaatgtgctactgattgtttcattgcgaatcttttttagcataaaattttctactctttttgttttttgtgttttgttctttaaagtcaggtccaatttgtaaaaacagcattgctttctgaaattagggcccaattaataatcagcaagaatttgatcgttccagttcccacttggaggcctttcatccctcgggtgtgctatggatggcttctaacaaaaactacacatatgtattcctgatcgccaacctttcccccaccagctaaggacattt

SEQ ID NO: 4283 - DNA, 2002 bp, Homo sapiens
actcttctcccctgattcaagactcctctgctttggactgaagcactgcaggagtttgtgaccaagaacttcaagagtcaagacagaaggaagccaagggagcagtgcaatggatttctcagtaaaggtagacatagagaaggaggtgacctgccccatctgcctggagctcctgacagaacctctgagcctagattgtggccacagcttctgccaagcctgcatcactgcaaagatcaaggagtcagtgatcatctcaagaggggaaagcagctgtcctgtgtgtcagaccagattccagcctgggaacctccgacctaatcggcatctggccaacatagttgagagagtcaaagaggtcaagatgagcccacaggaggggcagaagagagatgtctgtgagcaccatggaaaaaaactccagatcttctgtaaggaggatggaaaagtcatttgctgggtttgtgaactgtctcaggaacaccaaggtcaccaaacattccgcataaacgaggtggtcaaggaatgtcaggaaaagctgcaggtagccctgcagaggctgataaaggagaatcaagaggctgagaagctggaagatgacatcagacaagagagaaccgcctggaagaattatatccagatcgagagacagaagattctgaaagggttcaatgaaatgagagtcatcttggacaatgaggagcagagagagctgcaaaagctggaggaaggtgaggtgaatgtgctggacaacctggcagcagctacagaccagctggtccagcagaggcaggatgccagcacgctcatctcagatctccagcggaggttgacgggatcgtcagtagagatgctgcaggatgtgattgacgtcatgaaaaggagtgaaagctggacattgaagaagccaaaatctgtttccaagaaactaaagagtgtattccgagtaccagatctgagtgggatgctgcaagttcttaaagagctgacagatgtccagtactactgggtggacgtgatgctgaatccaggcagtgccacttcgaatgttgctatttctgtggatcagagacaagtgaaaactgtacgcacctgcacatttaagaattcaaatccatgtgatttttctgcttttggtgtcttcggctgccaatatttctcttcggggaaatattactgggaagtagatgtgtctggaaagattgcctggatcctgggcgtacacagtaaaataagtagtctgaataaaaggaagagctctgggtttgcttttgatccaagtgtaaattattcaaaagtttactccagatatagacctcaatatggctactgggttataggattacaggatacatgtgaatataatgcttttgaggactcctcctcttctgatcccaaggttttgactctctttatggctgtgcctccctgtcgtattggggttttcctagactatgaggcaggcattgtctcatttttcaatgtcacaaaccacggagcgctcatctacaagttctctggatgtcgcttttctcgacctgcttatccgtatttcaatccttggaactgcctagtccccatgactgtgtgcccaccgagctcctgagtgttctcattcctttacccacttctgcatagtagcccttgtgctgagactcagattctgcacctgagttcatctctactgagaccatctcttcctttctttccccttcttttacttagaatgtctttgtattcatttgctagggcttccatagcaaagcatcatagattgctgatttaaactgtaattgtattgccgtactgtgggctggaaatcccaaatctagattccagcagagttggttctttctgaggtctgcaaggaagggccctgttccatgcctctctccttggcttgtagaaggcatcttgtccctatgactcttcacattgtctttatgtacatctctgtgcccaagttttccctttttattaagacaccagtcatactggctca

SEQ ID NO: 4284 - DNA, 7086 bp, Homo sapiens; identical to SEQ ID NO: 1989

SEQ ID NO: 4285 - DNA, 6141 bp, Homo sapiens; identical to SEQ ID NO: 2300

SEQ ID NO: 4286 - DNA, 5691 bp, Homo sapiens
aacactcaatgtcggaacgttccgaagatgacgtcggagcgttctcgaatcccgtgtctctcggctgctgctgccgaaggaacagggaaaaagcaacaagaaggaagagcaatggcgacactggatcgcaaagtgcccagtccggaggcgtttctgggcaaaccctggtcctcctggatcgacgccgccaaattacactgctccgacaatgtagatttagaagaggctggaaaagagggtggaaaaagcagggaggttatgaggcttaataaagaagatatgcacttatttggccattacccagcacatgacgacttctatctcgtagtgtgcagtgcctgtaaccaggtcgtcaagccacaggttttccagtcgcactgcgagagaagacacggttcaatgtgtagaccttctccctctccagtgtctccagcctccaatcccaggacatcactagtacaggtgaaaacaaaagcctgtctcagcggccatcactctgccagcagcacctcaaagccattcaaaacgcccaaagacaatctacttacctccagcagcaaacagcacacagtctttcctgcgaaaggatcaagggataaaccatgtgttccagttcctgtagtcagtttagagaaaattcctaacctagtgaaggcagatggtgccaatgtcaaaatgaactccacaaccactactgcagtttctgcctcctccacctcgtcctctgccgtctccacccctcctttaattaagcctgtcctgatgtccaagtcagtgccaccttcaccagagaagatcttaaatggcaaaggaattctgccaaccaccatagacaagaaacaccaaaatggcaccaaaaacagcaacaagccttacaggagactttcagagagagaatttgacccaaataaacactgtggagtattggatcccgagacaaagaaaccttgcacaagatccctcacctgcaagacacattcgctaagccatcggagggcagtcccaggccggaaaaagcaatttgacctcctcctggcagaacacaaagcaaagtcccgggaaaaagaagttaaagataaagagcatctcctgacttccacgagggaaatacttccaagccaatccgggccggcacaggattctctgctagggtcttcagggagctctgggccagaaccaaaagttgcatcccctgcaaaatccagaccacccaactctgtacttcctagaccatcatctgcaaatagcataagcagcagcacatcttcaaatcatagcggccacactccagagcccccactcccaccggttggaggtgacctcgccagccgactgtccagtgatgaaggggagatggacggagccgacgaatccgagaagctagactgtcagttctccacgcaccaccccagacctctggcgttttgctcatttgggagtcgcctcatgggacgagggtactatgtgtttgatagaagatgggatcgttttcgattcgcactaaactccatggtagaaaaacacctgaattcacagatgtggaagaagatccctcctgcggcagatagccccctgccctcgccagcagcccacatcaccacccccgttccagcatccgttttgcagcctttcagcaaccccagtgctgtgtatcttccttcagctcccatcagctcgaggctcacctcttcttacataatgacatcagccatgctctcaaacgcagctttcgtgacatcgccggacccgagcgccctcatgtcccacaccacagctttccctcatgtggccgcaaccctcagcatcatggactcaaccttcaaggccccatccgccgtgtccccgataccagccgtcatcccttccccatcccacaagccatccaaaaccaaaaccagcaaatcctcaaaagtcaaagacctgtccacccgtagcgacgagtctccaagtaacaaaaaaaggaagccacagtcttcgacttcctcctcctcctcctcctcctcctcttccttgcagacatccctctcgtctccactgtcagggcctcacaaaaagaactgtgttttgaatgccagttctgctttgaactcctatcaggcggcccctccctataacagcctgtctgtgcacaactcaaacaatggggtgagcccactcagtgccaaactggagccctcaggacggacctcgctgcccggcggccccgcggacatagtgagacaggtgggcgcggtgggaggcagcagtgactcctgtcccctctctgtgccctcccttgcgctccacgcaggggacctctctctggcctcacacaatgctgtgtcttctctgcccctctcttttgacaaatcagaaggaaaaaagcgtaagaactcgagttctagtagcaaagcctgtaaaatcactaaaatgcctggtatgaatagcgttcacaaaaagaacccgcccagccttctcgcaccggtgcccgatcccgttaacagcacctcctctcggcaggttgggaaaaatagcagcctagctttgtcacaatccagtccttcaagtatatccagcccaggacacagccgacagaacacaaacagaacgggcaggataaggactcttccataacaagactatgaagccacttccacatcaattccaggccacctaatcccatccgaggaggccatggggaggaggagggaggggagtgggctggggggagagtctgttttctgtgcactccctgtgactctggcctttcttcttctttttttaattgaccaatttttagttaaaaaggcaaaagaaggtgaatttgagatttacagaaaacagttccagtgtttggtttccgctgtctttcctttcatttgccatgtttttacattcttccaaatttggggtcactcccctagctcctgatgctgctactgtaccatccttttgctccagccatgagagcagacattgcagaatgttggttccaggttggcatgctctgaagctcttgaactgtagcacaggcagagccctttttcttcctgtcatctccacccgattccttccatccctacgtctaccactctctgggtcctcactggtcttcaaaggacctggctctcataggatcccctcaggattgtgtgcagggagagggggctttgctggggaggagctgggagtggagagttggagggtgggtggggttccctcatccagtttccacagcccaccatggctggagccaaatgctagaagcgagattgagaacagtggccgtttagtgatgtggtttacctaataccactgtccagctgtgcagctcagaaaggataaaccagtcagggacaggggccagaacaggtttgggaaggtggcagcaagcagagcatggtgggtaggagatgatccctaaaaaaactggagactgtggtggtctgagctggtcaggaatctgcagaatcccttccaggaatcagtgtgccagtgcccacagcagggtgagctaggagggagaaatcccaggaaaaaggtcgtgagaacccagaaagccactccatgaggaggcacggtgaccacagctgctaaaggttcttaggctgccttcctgggctaggaagagccccccagggagagcttccacaaaagggtatgtgtcaaaccttttgtcagaataaataatagcatttcccacccacccccatgccctgggccacagggacttggtgggatcagcacacccatggatcagcttttgctgtcttagagacagccatccccatgaaggaatggtaaggacagccactgctcagtgaagaacagccatttggaagagccacgctggagccctgcagccatagaactattcacactggagttttaaaagaaacagcaataccataagctctagtagggaatcataatcaggaaaggaattcacaacataaaataggtgttctgtgctattaatcatgtaactttgtatatgatgtatagcaaagatactgggaggttttgtttcatccttaaatcagaaatgaatgctagtttcatagctgggcagaaccctcatccccaccccaaagttttccttttctttcccgttcccccaacccaaagatcagactactgttaagtttcaccacacaattggaattgcaaagacgggaggcaaatggagtgattttcatcaatggaattgcactgacagtgagtgtttcttataggattactaaattttttaatataaaatgatttgtttaaaaatcaggagttgatattaagtaccaggacattagttcggatgatttcatttttatttctacagtgttaaaagtgcacttatatgctggtttatttacgtcttgggaaaagagactgcaaattgaagggatgattgttactttttctttttttaaaaaaaaaaggttaaggagattttaagacttataaatgtttaagaaattataaacaaggttagaccctttgaaaaaaagtttagaagatattcttaaagtaaatttttatagtgttaattttgtaataatttatgttttactatattacagagctaactgaccagaatagtttcagaaacaatatgaaacttaggaaagtttaagcaatgtttatatttttaaaatgttctttgaattatgtttttattgtacatttcttcagactgaaaagtatgtacatatctttgttatttttgcacaattttgtcttgttcggtttcagaggtctgttgttttttataatttattttgagttgtaaaacttgcaggagtaaaaacaaaaaacaaaatctccacaacaaaataaccctctgatttataaactcttatagtcaaagagggaaaacaaaggttgagagattaagtggctgcttctgagaaataatgtctcaaggactaaaggagcaattcaataggtttagacattgtagctctctacatcttgaattggaagctggaataaagagcccccacccccccccccaccctcatcgaatgctgcttactttgtcaaaagactggctatgaccaaggtgaggatatttctggaaaactgggcaaaaagggaaagcccacagtattcttccttggcagtcaaccacaggtttactttacaatgatgtattaaaaacttgcagcttgaaaaatggaatgcaaataaaaggttctctttgggtttgtcttaatggagttaaactggagcagcctataaaacatttttagggtgatgtcctctgggtccttctgttctgcacacccactcagtcttctctcccagccccttgactgcacacacccctctttgcctgaagatctcctgacttgtcgccagccatagaggctcgaaagctctggttgtgaagcataacgcaatgcatagacctgtcagccataaaaaaaaaaaaaaaaaaaaaaaagcgacttggataacttgtatgccttcttttgtatcaatgtaccaattgtaaataatgctgatcaacctttgtagagaatagtttatacagcatattctattattgctgattctcagtgaactcttgttttaaaaaaggaaaaaaagaaattttctatttacaccttatattttgttatgctgtcggcccatggcactttaacaaaactctgtgggttttacgtagctggtcagtcatggggtatattaaataactgttgttgcacagac

SEQ ID NO: 4287 - DNA, 4774 bp, Homo sapiens; identical to SEQ ID NO: 808

SEQ ID NO: 4288 - DNA, 2959 bp, Homo sapiens; identical to SEQ ID NO: 709

SEQ ID NO: 4289 - DNA, 3039 bp, Homo sapiens; identical to SEQ ID NO: 671

SEQ ID NO: 4290 - DNA, 3633 bp, Homo sapiens
acttactgtcattaaaccagtatgatgatggagtggggaatgcctcagtttctcccaccgccgagggcctataggactacagttcccagggccccgtgctgcaggctagcggcctcccgccaatgctggccagtaacctgagcatccctctccaaaaggtcacttcagggctccttgagggacagcaacagggggagcctagagctgctcagcttcggtgggggtggagtgagggctgtggccctgcctcacacaacctccctcacaccacccctgcaatgcagggtcgtgggcccctttctcaaagacatccagtggcctctgctagttgcacctcttccgtcaggggacactgacttggctcctgcaccacagcctgcagggggtcctggttccttttgccacaacacatggcctcccatcctggttcagccactgacagacagctccccaatccagcactctgcctgctccttcttgtatccaaccctccaaaaggcagggacaagggacagaagaccatgtgcaaggcctggaggaagtgggtcagcacaggcctgtgaacaagccaggccagtcttggcggcccaagtggagctcacctctccctcccctctcctctcctccccttgccctcaaaatagctccctgagctgccaggccaagaccctcccattgcaggggaggcggggcgtgctgcccagagccaggctttaaatccccttgaggctggggagctccactccttggctggaggcagtgctgaggccgccgtcccctctaccatcagtccagtccggcccgccctcctgcagccatgtcccggcccctgtcagaccaagagaaaagaaagcaaatcagtgtgcgtggcctggccggcgtggagaacgtgactgagctgaaaaagaacttcaaccggcacctgcatttcacactcgtaaaggaccgcaatgtggccaccccacgagactactactttgctctggcccataccgtgcgcgaccacctcgtggggcgctggatccgcacgcagcagcactactatgagaaggaccccaagaggatctactacctgtctttagagttctatatgggacggacgctacagaacaccatggtgaacctggccttagagaatgcctgtgacgaggccacctaccagctgggcctggacatggaggagctggaggaaattgaggaggatgcggggctgggcaacgggggcctgggccggctggcagcctgctttcttgactccatggcaacactgggcctggccgcctatggctacgggattcgctatgagtttgggatttttaaccagaagatctccgggggctggcagatggaggaggccgatgactggcttcgctacggcaacccctgggagaaggcccggcccgagttcacgctacctgtgcacttctacggccatgtggagcacaccagccagggtgccaagtgggtggacacacaggtggtactggccatgccctacgatacgcccgtgcctggctatcgcaacaatgttgtcaacaccatgcgcctctggtctgccaaggctcccaatgacttcaacctcaaggacttcaatgtcggtggctacatccaggctgtgttggaccgaaacctggcggagaacatctctcgtgtcctgtaccccaatgataatttcttcgaagggaaggagctgcggctgaagcaggagtatttcgtggtggctgccaccctccaggacatcatccgtcgcttcaagtcttccaagttcggctgccgtgatcccgtgcgcacgaacttcgatgccttcccagataaggtggccatccagctcaatgacacccacccctccctggccatccccgagctgatgaggatcctggtggacctggaacggatggactgggacaaggcgtgggatgtgacagtgaggacctgtgcctacaccaaccacacggtgctgcccgaggccctggagcgctggccggtgcacctcttggagacgctgctgccgcggcacctccagatcatctacgagatcaaccagcgcttcctcaaccgggtggcggccgcattcccaggggacgtagaccggctgcggcgcatgtcgctggtggaggagggcgcagtgaagcgcatcaacatggcacacctgtgcatcgcggggtcgcacgccgtcaacggcgtggcgcgcatccactccgagatcctcaagaagaccatcttcaaagacttctatgagctggagcctcataagttccagaataagaccaacggcatcacccctcggcgctggctggttctgtgtaaccccgggctggcagaggtcattgctgagcgcatcggggaggacttcatctctgacctggaccagctgcgcaaactgctctcctttgtggatgatgaagctttcattcgggatgtggccaaagtgaagcaggaaaacaagttgaagtttgctgcctacctagagagggaatacaaagtccacatcaaccccaactcactcttcgacatccaggtgaagcggattcacgaatataaacgacagctcctcaactgcctccatgtcatcaccctgtacaaccgcatcaagagggagcccaataagttttttgtgcctcggactgtgatgattggagggaaggctgcacctgggtaccacatggccaagatgatcatcagactcgtcacagccatcggggatgtggtcaaccatgacccggcagtgggtgaccgcctccgtgtcatcttcctggagaactaccgagtctcactggccgagaaagtgatcccagctgcagacctctctgagcagatctccactgcgggcactgaagcctcaggcaccggcaacatgaagttcatgctcaacggggctctgaccattggcaccatggacggggccaatgtggagatggcagaagaggcgggagaggaaaacttcttcatctttggcatgcgggtggaggatgtggataagcttgaccaaagagggtacaatgcccaggagtactacgatcgcattcctgagcttcggcaggtcattgagcagctgagcagtggcttcttctcccccaaacagcccgacctgttcaaggacattgtcaatatgctcatgcaccatgaccggtttaaagtcttcgcagattatgaagactacattaaatgccaggagaaagtcagcgccttgtacaagaacccaagagagtggacgcggatggtgatccggaacatagccacctctggcaagttctccagtgaccgcaccattgcccagtatgcccgggagatctggggtgtggagccttcccgccagcgcctgccagccccggatgaggccatctgagcctccagaccagaccccaaaccagcccttgagtctgtcacactctcttgggccagccccagcacctcatgcagagggtggggtactggagttagatctctaagcccctcctggaaccctcattttccccactctcaatgtcccagtgtccagcgtgactaaggacacgggcccccttccgtcctcgggctcccggtcccctcctatttatggggtctgaccaactgcacccactccctaataaattcattctccttgggagcctccttaaaaaaaaaaaaaaaaaa

SEQ ID NO: 4291 - DNA, 889 bp, Homo sapiens
gcttgaaccgctggagcccccgagggacgcgggggttcagagagcaagaggaaggaaccagactgacagggtcgccagaggcagtcccagcacaaaggttctccttactatgacaatgtccgccccctctcttaccctgattcggatgctgtgctgatttgctttgacatcagtagaccagagaccctggacagtgtcctcaaaaagtggaaaggtgaaatccaggaattttgtccaaataccaaaatgctcttggtcggctgcaagtctgatctgcggacagatgttagtacattagtagagctctccaatcacaggcagacgccagtgtcctatgaccagggggcaaatatggccaaacagattggagcagctacttatatcgaatgctcagctttacagtcggaaaatagcgtcagagacatttttcacgttgccaccttggcatgtgtaaataagacaaataaaaacgttaagcggaacaaatcacagagagccacaaagcggatttcacacatgcctagcagaccagaactctcggcagttgctacggacttacgaaaggacaaagcgaagagctgcactgtgatgtgaatctttcattatctttaatgaagacaaaggaatctagtgtaaaaaacaacagcaaacaaaaaggtgaagtctaaatgaagtgcacagccaaagtcatgtataccagaggcttaggaggcgtttgagaggatactcatctttttggaatcctgaccttaggttcggcatgtagaccaagtgatgagaagtgaatacatggaagagtttttaagtgtgacttgaaaaatatgccaaaaaatgagagatacaaatgagctagaggaagatgaggggggatgcgagtacctccaagaag

SEQ ID NO: 4292 - DNA, 1278 bp, Homo sapiens
actccgggaccgtccctgcgcgctctgggcgcaccatggcccgcggggctgcgctggcgctgctgctcttcggcctgctgggtgttctggtcgccgccccggatggtggtttcgatttatccgatgcccttcctggtgagtatcaacatcattttttaaaatcccgtcaatattttatgttaacatagtatatacaggcatatcccagccatttccagctaggttctagaccaccgcaataacaggagtcatagcaatttttggcttcccagtacatataaatgttatgtttactctcaactgtagtctattaagtatgcaatagcattacctctaaaaacagtatactccaattgaaaataccttattgctaaaaaatgcagatacagagacaggaagtggggcacgtgctgttggaaaaaatgatgccgagagtctggcttgccacagggttgctgcagaccttccgtttgtaaaacacacagtatttgcaaagcaccttaagacaaagtgcagtgaaggaggtccgcctgtatgtgtccacctgccttattataaaaactagactcatagatgacgaggaaaagcaagatgcccttgttaagataaatgaaccaccctggtggaataattcacagtcctgtgatggtcagaggccgagcaaaaacttgccaggtccttggggaggggtctagaggaggtgagcaaatggaggtccccaggagagaggggcatccagtgctggcgtcctccctctcgaaatcggcacccgctctctccatggggccactccttccttcttctgcagctcttcctgtctcccgctcctcacccagagccctcggtgaagggcatgggaaaaggaattgaaggaattccgtcttatcactctatcagcttctgggtcttgtcatccctttgtatttgttttccagggctgccataaaaaggtgccaccaactgggggcttaaaccacagggatttatcatcttccagacctggacaacagaagtctgagatcaaggtgtagacagacccatgctccctctaggggctctaggggagggtccttcctgcctcttgcggcttccgggagctccaggtgtccctggacttgtggccgcatcactccagtctctgcctccttctccgtggggcctcctcctctgtgtctgtgtctccttttctttgtcttacaaggatacttgtcattgggtttagggccactctactccaggattatctgatctcaagatccttctgttaagcacatctgc

SEQ ID NO: 4293 - DNA, 1116 bp, Homo sapiens
aacagacacgcgaggtcaggaagaagccgcttataaattaccgcttccttcgcgccgccgccaacgccgagccccgaggaccgcaagcccagaggacaagctgcgccaagagggagtgcggagcgttcacccagcgggtcagagagcgagcgggcaggcagcccccggccggcggaacccggcacagccgagcagagcgcgggcggcgccgcagccaccccagatccagaaccagaaccacagcccttctgaggagctcccaaacaaagcaaggagatggccaccaaggagaagctgcagtgtctgaaagatttccacaaggacatcctgaagccctcaccagggaagagcccaggcacgcggcctgaggacgaggctgagggaaaacctccgcagagggagaagtggtctagcaagatcgactttgtgctctctgtggctggcggcttcgtgggcttgggcaacgtctggcgcttcccgtacctctgctacaagaatggtggaggtctcaggcccctttgggactgtgatgagtgtcctagacgctccccagaacaaagcacatacactagacccaagttgcccacagtttcaaagggtttatggacccgctgaagccattagtggacaccaggtgcgtttctcataccgtattttattttcctgtttgggagcggcctgcctgtgtttttcttggagatcatcataggccagtacacctctgaagggggcatcacctgctgggaaaagatctgccccttgttctctggtatcggctatgcctccgttgtaattgtgtccctcctgaatgtctactacatcgtcatcctggcctgggccacatactacctgttccagtccttccagaaggagctgccctgggcacactgcaaccacagctggaacacacctcactgcatggaggacaccatgcgcaagaacaagagtgtctggatcaccatcagctccaccaacttcacctcccctgtcatcgagttctgggagcgcaacgtgctgagcttgtcccctggaatcgaccacccaggctctctgaaatgggacctcgctctctgccttcttttagtctggctagtgtgtttcttctgcatctggaag

SEQ ID NO: 4294 - DNA, 2760 bp, Homo sapiens
aaaacacagcctgccaatcctggagaatgcctggtgggggtgctgggggaagaagtccaatttcagctgggaaaatgggacaggagccttgggagtgggtttacacctcaaattcccttatggccacagtccattggcccctagcctcctccccactttacagatgaagagactgaggtttagagagaggaacagccggcttggcagaggcaactgctgaggcagttgaggaaagtgaattttgaagattgcaccggtcgacaaaggacagcctatttttccctcgacacccgattcaaagtgggcacagatggtgtgattacagtcaaaaggcctctacggtttcataacccacagatccatttcttggtctacgcctgggactccacctacagaaagttttccaccaaagtcacgctgaatacagtggggcaccaccaccgccccccgccccatcaggcctccgtttctggaatccaagcagaattgctcacatttcccaactcctctcctggcctcagaagacagaagagagactgggttattcctcccatcagctgcccagaaaatgaaaaaggcccatttcctaaaaacctggttcagatcaaatccaacaaagacaaagaaggcaaggttttctacagcatcactggccaaggagctgacacaccccctgttggtgtctttattattgaaagagaaacaggatggctgaaggtgacagagcctctggatagagaacgcattgccacatacactctcttctctcacgctgtgtcatccaacgggaatgcagttgaggatccaatggagattttgatcacggtaaccgatcagaatgacaacaagcccgaattcacccaggaggtctttaaggggtctgtcatggaaggtgctcttccaggaacctctgtgatggaggtcacagccacagacgcggacgatgatgtgaacacctacaatgccgccatcgcttacaccatcctcagccaagatcctgagctccctgacaaaaatatgttcaccattaacaggaacacaggagtcatcagtgtggtcaccactgggctggaccgagagagtttccctacgtataccctggtggtccaagctgctgaccttcaaggtgaggggttaagcacaacagcaacagctgtgatcacagtcactgacaccaacgataatcctccgatcttcaatcccaccacgtacaagggtcaggtgcctgagaacgaggctaacgtcgtaatcaccacactgaaagtgactgatgctgatgcccccaataccccagcgtgggaggctgtatacaccatattgaatgatgatggtggacaatttgtcgtcaccacaaatccagtgaacaacgatggcattttgaaaacagcaaagggcttggattttgaggccaagcagcagtacattctacacgtagcagtgacgaatgtggtaccttttgaggtctctctcaccacctccacagccaccgtcaccgtggatgtgctggatgtgaatgaagcccccatctttgtgcctcctgaaaagagagtggaagtgtccgaggactttggcgtgggccaggaaatcacatcctacactgcccaggagccagacacatttatggaacagaaaataacatatcggatttggagagacactgccaactggctggagattaatccggacactggtgccatttccactcgggctgagctggacagggaggattttgagcacgtgaagaacagcacgtacacagccctaatcatagctacagacaatggttctccagttgctactggaacagggacacttctgctgatcctgtctgatgtgaatgacaacgcccccataccagaacctcgaactatattcttctgtgagaggaatccaaagcctcaggtcataaacatcattgatgcagaccttcctcccaatacatctcccttcacagcagaactaacacacggggcgagtgccaactggaccattcagtacaacgacccaacccaagaatctatcattttgaagccaaagatggccttagaggtgggtgactacaaaatcaatctcaagctcatggataaccagaataaagaccaagtgaccaccttagaggtcagcctgtgtgactgtgaaggggccgctggcgtctgtaggaaggcacagcctgtcgaagcaggattgcaaattcctgccattctggggattcttggaggaattcttgctttgctaattctgattctgctgctcttgctgtttcttcggaggagagcggtggtcaaagagcccttactgcccccagaggatgacacccgggacaacgtttattactatgatgaagaaggaggcggagaagaggaccaggactttgacttgagccagctgcacaggggcctggacgctcggcctgaagtgactcgtaacgacgttgcaccaaccctcatgagtgtcccccggtatcttccccgccctgccaatcccgatgaaattggaaattttattgatgaaaatctgaaagcggctgatactgaccccacagccccgccttatgattctctgctcgtgtttgactatgaaggaagcggttccgaagctgctagtctgagctccctgaactcctcagagtcagacaaagaccaggactatgactacttgaacgaatggggcaatcgcttcaagaagctggctgacatgtacggaggcggcgaggacgactaggggactcgagagaggcgggccccagacccatgtgctggg

SEQ ID NO: 4295 - DNA, 2446 bp, Homo sapiens
ttaaacaagttaaaatctaggcaacagactccctgaagtgttgactgcccaacttaatcatgactgtgattcaaaaatgttaataaataaaccaaggtgtagatcatggggaattcatatgctgggcaactgaaatctgctcgatttgaggaagctctccacaactccatagaagcctccctcagatgtagtagtgtggtaccacggccaattttttcccagctatacctggaccctgaccagcatcctttctcatctgcagatgtcaaacccaaggtggaggatctggacaaagatttggtaaaccgctacactcaaaatggaagtctggatttttctaacaatctaacagttaatgaaatggaagatgatgaagacgatgaagaaatgtctgattcaaacagcccaccaattccctattcacaaaaacctgccccagaaggatcttgcactacagatggtttttgtcaagcaggaaaggatttgcgtttggtatcactgtgtatggaacaaattgacatcccagcaggattcctcctggtgggggccaagtctcccaatctgcctgaacacatcctagtttgtgctgtggacaagcgatttctaccagatgatcatggaaaaaatgcacttttagggttttctggaaattgtatcggctgtggagaaagaggatttcgatatttcacggaattttccaaccacattaacttgaagctcaccactcagccaaagaagcagaagcacttaaagtactacctagtcagaagctcccagggtgtactgtctaaaggacctcttatctgctggaaagaatgtagaagccgacaatcctctgcttcttgccactctattaagccaagctcttcagtgtcgtcaactgtgaccccagaaaatgggacaactaatggatacaaatcaggattcactcagacagatgctgctaatggaaacagtagccatggagggaagggcagtgcatccagctccactccagcccacacagggaattactctttgtcaccacgacctagctatgcatcaggagatcaagctaccatgttcatttctgggccaccaaagaaacgacaccggggatggtatcctgggtcacctctcccccaacctggcttagttgtacctgtccctacagttcgccctctttcaagaacggagccccttttatctgccccagttccacagaccccactaactggaattttacaacccaggcccattcctgcaggggaaactgtaattgttcctgaaaacctgctgagtaactcaggagttagaccagtaattctgataggctatggcactttaccctatttctatggaaatgttggtgacattgttgtgagtcctctgctggtgaattgctacaagattccacagttggaaaacaaagatttggaaaaattagggttgaccggcagccaatttctgagcgtggaaaacatgattcttctgacgatacagtatcttgtgcggctgggtcctgatcaggtacctctcagggaagaatttgagcaaattatgctgaaagctatgcaagaatttactctgagagaaagagccctgcagataggtgctcagtgtgtccctgtgtcaccaggacaactcccctggcttgctagattaattgccagcgtatctcaagacttggttcatgtggttgtgacccagaactctttggcggagggcatttcagagaccttaaggactctcagtgaaatgagacactatcaaaggctgccagattatgtggtggtaatttgtgcatcgaaaatcagaggaaatgaattttgtgtggtagtgttaggtcagcaccagtcccgagctctggcagagagcatgctcaccacaagtgagtttttgaaagaaattagttatgagcttatcacaggaaaggtcagtttcctggcatcacatttcaaaaccacatcattaggcgatgacctagacaagctgctggaaaaaatgcaacaaagaagaggagacagtgtggttacccctttcgatggagaccttaatgaatgtgtgtcaccccaggaggctgctgctatgattcccacacaaaacctggatttagataatgaaaccttccacatttatcaaccgcagctaacagttgccagaaaactcttatcccaggtgtgtgctatagcggacagtggcagccagagcctggacctcggtcacttcagcaaagtagacttcatcatcattgttcccagatcggaggtgttggttcagcaaactcttcagcggattcgacaatcaggttccagtccaggttcacacattgcattcagttatgtcctcttcatctcctgcaatctatgacatttcttcagtctttcctggcttttcatgaccttaagtgaatactaatcaattgttttgtgtagggaatgtttgagttttctcacaattaaattga

SEQ ID NO: 4296 - DNA, 2318 bp, Homo sapiens
cttttttcttaagcggcggcggcagcagcagcagcaagaggaggagaagcagccccagctatgactgccgcatgttaatagctgccgctgggtccctcggctgctgctggagacagagcctgactccgaagttgtgcaactgtggactgggagagacatttgaaccctcttttcttttcgctccccttttgcccccttggggtgtgtgaagcgaggaacgtaaaggaaggcgaacatttggctctctttttccttcccctttctccgtggctgtgtagcggaagaaagggaagagagactttttgttgttgtttccttgactggggtctccaccctcctgctgctttctctgcgcttcgattctcgttatttgccgcgtgtggttgggggtgtctgcacaggggccggccggtcttttgccccgggctcaatggctggattgtggaaactgcacccgccttcaggttgttgagcaactgatgggacgatctcagggaccggcgtttacgaaagaaatgtttaatttggtaaattggaggaaaaaaacatggatttttagcaattgaagagcaaattaaggtttcagatttgggatattggtgtttctgttttggagaaattattctttttctttttaatttgaagaaaaatcatcagtcttggaatacagaagagaaactagaaatatacgtattttgtttcacatttgaacagtcattcttgaggaatactccatacctgagtagacagccatgtggccatcgcagctactaattttcatgatgctcttagctccaataattcatggtggcaagcacagtgaacgacatcctgcccttgctgctccattgcgacacgctgagcgcagcccaggaggcgctcttccacccagacatctgcttcagcagccagctgcagagcgcaccgctgctcatcgtggacaagggccccgtggagctaccagaggagttcgcggtccaggtgcccaaggagcacagattgcagcgcaagctttcagccgtgccccaattccaatggctgtggtccgcagagagctatcctgtgagagctatcctatagagcttcgctgtccaggaacagacgtcatcatgatagaaagtgccaactatggcaggactgatgacaaaatttgtgactctgaccctgctcagatggagaatatccgatgttatctgccagatgcctataagattatgtctcaaagatgcaataacagaacccagtgtgcagtggtggcaggtcctgatgtttttccagacccgtgtccaggaacctataaataccttgaagtgcagtatgaatgtgtcccttacaaagtggaacaaaaagtttttctttgtcctggactactaaaaggagtataccagagtgaacatttgtttgagtccgaccaccaatctggggcgtggtgcaaagaccctctgcaggcatctgacaagatttattatatgccctggactccctacagaactgataccctgactgagtattcatccaaggatgacttcattgctggaagaccaactacaacctacaagctccctcacagggtggatggcacaggatttgtagtgtatgatggagctttgttcttcaacaaagagcgcaccaggaacatagtaaagtttgatttgcggactagtataaagagtggagaggctatcatagcaaatgccaattaccatgatacctccccttaccgatggggaggcaaatctgacatagacctggcagtagatgagaatgggctatgggtaatctatgcaacagaacaaaacaatggtaaaattgtcattagtcaattgaacccttacaccctacggatcgaaggaacatgggatactgcatatgataaaaggtcagcttccaatgcctttatgatttgtggaattctgtatgtggtcaaatctgtatatgaggatgatgacaatgaggctactggaaataagattgactacatttacaacactgaccaaagcaaggatagtttggtggatgtaccctttcctaattcataccagtacattgcagctgtggattacaaccccagccccttggaacttggaagacccgtgtttcctggaccgcgaatcagtgtgttgggcatcagtgttttctgcaagggttgtgacctgaaactttttaaaaaccacccacctttggggaagcatttctgaatttatccatcaccaaccatttcttcttggataccatcaagtaacagctattatttgccaagtggagctgtcatttaatttgatgcacctctggattcagatgaaacattaaattgtctt

SEQ ID NO: 4297 - DNA, 970 bp, Homo sapiens
aaagtgtgctaaaggaaaccaacagcggcctaggggtgaaaggacagccagggttagatgttctgaggaggcgggagcaaccgagagagcacgtgagcatctgtcctttctacccgttcctctttatctttagtgttcagtagcagcggggatagcccggggcccggtgtatggccacggagttacagtgtccggactccatgccctgtcacaaccagcaagtaaactctgcctcaaccccaagtcccgagcagctgcgacctggcgatctgatcctggaccacgcagggggaaacagagcctccagggccaaggtgattctcctcacggggtacgcccattctagcctgccggccgagctggactctggggcctgcggcggctccagcctcaactcagagggcaacagtggtagtggtgacagtagcagctatgacgcaccagctggcaactccttcctagaggactgcgaactctcccggcagatcggggcgcagcttaagctgctgcctatgaatgatcagatacgggagctacagaccatcatccgggacaagacagccagtagaggtgacttcatgttttctgcggatcgtttgatcagacttgttgtggaagagggattgaatcagctgccatataaagaatgcatggtgaccactccaacagggtacaagtatgaaggagtgaaatttgagaagggaaattgtggggtcagcataatgagaagcggtaggttcacgtgtgtgtgatttttgtctctttgtatgcatagaaatggttgctgttttccagaagagaggcaggcttgtctgtcataattgcagcctgcctttagttaaatctcactacctgtgttatctagcctcatggtgctgtggagtcatggcctgtgtgaggctaggtttggctaattttaactacagagcgtattccctaatagagtgctcccatgggcaagccagctttc

SEQ ID NO: 4298 - DNA, 983 bp, Homo sapiens
agagcgcttggagccagcgctgcagggagatagcagcgcgcagcccgcagaggcgctgcggcccgtgcagccccggaggcccctcgcggagaaggcggcggcggaggagaggccgccgccgccactgccccccctccccgcggcgccgcatcttgaatggaaacatggcggtgccggctcggacctgcggcgcctctcggcccggcccagcgcggactgcgcgcccctggcccggctgcggcccccaccctggccccggcacccggcgcccgacgtccgggcccccgcgcccgctgtggctgctgctgccgcttctaccgctgctcgccgcccccggcgcctctgcctacagcttcccccagcagcacacgatgcagcactgggcccggcgtctggagcaggaggtcgacggcgtgatgcggatttttggaggcgtccagcagctccgtgagatttacaaggacaaccggaacctgttcgaggtacaggagaatgagcctcagaagttggtggagaaggtggcaggggacattgagagccttctggacaggaaggtgcaggccctgaagcagctcctgacattcccaactgggaagctctcagagatgggccattctccaagccccaaatgggctcagccctggccgaaggagggacaaggaagaatcagtccccaacatgacctcaagaaaatctggtgcagagtggccacctctgtaaatcagctgatgcctgcaccactgtaaccacagctgttgacaggctgcagggcagaagctaagcaggaagaggcccagagcagagggcaagtgagcacggcagtaagaagttgaaaaccattaattgtccgtccagaggaggcggatgcccacaacattctgggcaaaggagatggtgtgtgcaaaagcacggaggtgtgagaatatagcatagtagacattcatcattcctttctcatgcactggagtgtctgtgcagccagg

SEQ ID NO: 4299 - DNA, 1182 bp, Homo sapiens
aaaaaaagttacctgtggccgcccaagtccgccactttctgctctgtgtctgcccattgccacgatccaggaggactccgcgccgcccggccgcctccgagctcgggccccatgtgaggggcccccccttatcccacctttccggctaggtgagggcgcgagcgggcgagcgagcgagagtggtgaggggggacggaaaagcagaattacctgtagctcttgttctgccatctcgggcgctctcacacaccttcacctgcacagacttgaaagtccagtttcaccagaggctgaggctccaggaaaaggggagcaagttcattggatcaaacatgtcacaagagtcggacaataataaaagactagtggccttagtgcccatgcccagtgaccctccattcaatacccgaagagcctacaccagtgaggatgaagcctggaagtcatacttggagaatcccctgacagcagccaccaaggccatgatgagcattaatggtgatgaggacagtgctgctgccctcggcctgctctatgactactacaaggtaggtccccagcctccacttttctcttcttcctgctccaggacaaccctttgctggtgggaagaaggaacagattgtttgtcccaggccagggaactaatagcatttccaaagtcaatatagaattcagcctcttcctgttctccttgctccctgcttccccatctacaaagctcaactttatcacccatccagaggaagtactcattttgggataatattttttgtgttccttgttcacatgcataaatattatttgcatattattcttaccatattacaaatacttccttgttgctatgtttactttaggattattatttttgctgaatgaagtatattacattgagtggctttattagtccattttcacactgctgataaagacatactggagactgagaagaaaaagaggtttaactggacttacagttccacatggctggggaggcctcagaatcatggcaggaagcaaaaggcactccttacacggcagtggaaacagaaaatgaagaagatgcaaaagtggaaacccctgataaaaccatcagatcttgtgagacttattcgctatcacgagaacagtatgggggaaactgctcccacaattcaaattatctgccacagtgtccct

SEQ ID NO: 4300 - DNA, 988 bp, Homo sapiens
agacaacagacacgcgaggtcaggaagaagccgcttataaattaccgcttccttcgcgccgccgccaacgccgagccccgaggaccgcaagcccagaggacaagctgcgccaagagggagtgcggagcgttcacccagcgggtcagagagcgagcgggcaggcagcccccggccggcggaacccggcacagccgagcagagcgcgggcggcgccgcagccaccccagatccagaaccagaaccacagcccttctgaggagctcccaaacaaagcaaggagatggccaccaaggagaagctgcagtgtctgaaagatttccacaaggacatcctgaagccctcaccagggaagagcccaggcacgcggcctgaggacgaggctgagggaaaacctccgcagagggagaagtggtctagcaagatcgactttgtgctctctgtggctggcggcttcgtgggcttgggcaacgtctggcgcttcccgtacctctgctacaagaatggtggaggtgagcttgggccgggccacaggggagcccatccagtacaaagccgccttagagctggaggctgggaccagagcgtgggtggcctctctttccctgctttccctggcccccccccttgacctccatgaggtcagcctgccatgctcctgccaaccccacccttagagacaggggataagcccgactgagaatcagagtactgttctgcagggcctttctgtgttaccttgagcaggtccctcagcctctctggtcctccagtttgccacctccaaagaggcaggacaaggccaggcttgtgtctcccaagccccagacattcacacacctccttatctgtccgccatatctacttgcctctgactctttatctttcctttaatattcatgtttgcttttctaactttaccaaatgtactccagaaagcaaattctgttacccgctgtagatggaaaactggtatcatttgtcatgctcc

SEQ ID NO: 4301 - DNA, 1974 bp, Homo sapiens
acatgagccagcagttgctgccctcccgaagtggtcctcggaggcagcgcaccccttcattttggcgaaccgaggaggaagggaggaaccgtgtgggggaaatctagaacttctggttccccaaggacccagcagactgtgttctggctacaaggtgatcactgccaccaggtcagtgcaggattcctccaatgtagatgggccgggagccacaacttgcgcggagcagcagcctcgccgaccactcagagagaagccgcgcgacagccaggcttggcccggacggcgcccccaccctgcgcgcgcgatccaaggttctcacctggagcgctcaggggttccttcaggagtcacaagtactattgggttggaaaatctgggagaataatagtttacttactgatgaaactgctgtattatcattcattaagctggagcagatcacagtttgagggtactaccattaaagataccttcttctcagcaaatctatgataaaaaatataagtaacagaagaagaaataactgttatttgtcaagtgacaagcttttaatgtcagaatggctcacctaaagcgactagtaaaattacacattaaaagacattaccataaaaagttctggaagcttggtgcagtaatttttttctttataatagttttggttttaatgcaaagagaagtaagtgttcaatattccaaagaggaatcaaggatggaaaggaacatgaaaaacaaaaacaagatgttggatttaatgctagaagctgtaaacaatattaaggatgccatgccaaaaatgcaaataggagcacctgtcaggcaaaacattgatgctggtgagagaccttgtttgcaaggatattatacagcagcagaattgaagcctgtccttgaccgtccacctcaggattcaaatgcacctggtgcttctggtaaagcattcaagacaaccaatttaagtgttgaagagcaaaaggaaaaggaacgtggggaagctaaacactgctttaatgctttcgcaagtgacaggatttctttgcaccgagatcttggaccagacactcgacctcctgaatgtattgaacaaaaatttaagcgctgccctcccctgcccaccaccagtgtcataatagtttttcataatgaagcgtggtccacgttgcttagaactgtccacagtgtgctctattcttcacctgcaatactgctgaaggaaatcattttggtggatgatgctagtgtagatgagtacttacatgataaactagatgaatatgtaaaacaattttctatagtaaaaatagtcagacaaagagaaagaaaaggtctgatcactgctcggttgctaggagcaacagtcgcaacagctgaaacgctcacatttttagatgctcactgtgagtgtttctatggttggctagaacctctgttggccagaatagctgagaactacacggctgtcgtaagtccagatattgcatccatagatctgaacacgtttgaattcaacaaaccttctccttatggaagtaaccataaccgtggaaattttgactggagtctttcatttggctgggagtcgcttcctgatcatgagaagcaaagaaggaaagatgaaacctacccaattaaaacacccacttttgcaggaggacttttttccatatcaaaagaatattttgagtatattggaagctatgatgaagaaatggaaatctggggaggtgaaaatatagaaatgtctttcagagtatggcaatgtggtgggcagttggagattatgccttgctctgttgttggacatgtttttcgcagcaaaagccctcatagctttccaaaaggcactcaggtgattgctagaaaccaagttcgccttgcagaagtctggatggatgaatacaaggaaatattttataggagaaatacagatgcagcaaaaattgttaaacaaaaagcatttggtgatctttc

SEQ ID NO: 4302 - DNA, 2452 bp, Homo sapiens
agaatggcttttgctgagtgcatagcaccagcgtgtgtcatgtcttggctgcgtttctggggcccatggcccctccttacgtggcaactattgtctttactagtcaaggaggctcagcctctggtgtgggtcaaggacccgctccagctgacctctaaccccctggggccacctgagccctggtcttcccgctcctcccatctcccatgggaatctccccatgcacctgctcccccagcagccccgggggactttgattacctggggccctctgcttcttcgcagatgtcagccctgcctcaggaaccaactgaaaatttggctccattcctgaaggaattggattcagctggagagctgcccctggggccagagccgttcttggctgcacatcaggacttaaatgacaagcggactccagaagaaaggctcccagaggtggttccgcttctcaaccgggatcagaaccaggccctagttcagcttcctcgcctcaagtgggttcaaactacagatctagatcgggctgcaggtcatcaggcagatgaaatacttgttccactagacagtaaggtttcaagaccaaccaaatttgttgtttcgcccaagaacctgaagaaagatctagctgaacgttggagccttcctgagattgttgggattccacaccaattatccaaacctcagcgtcagaaacagactttgccagatgattatttgagtatggacacactgtatcccggcagcctacctccagaactccgggtgaacgcagatgagcctccagggcctcctgagcaagttggactttctcaattccatctagagcccaaaagtcaaaatccagagacccttgaagacatccagtcctcttcactccaggaagaagccccagcgcagcttctacagctccctcaggaggtagaaccttcaacccagcaggaggccccagctctgcctccagagtcctctatggagagtctagctcaaactccactgaatcatgaagtgacagttcaacctccaggtgaggatcaagctcattataatttgcccaagtttacagtcaaacctgcagatgtggaggttaccatgacttcagagcctaaaaatgagacagaatctacccaagcccagcaggaggccccaattcagcctcccgaggaggcggaaccttcttctacagccctgaggactacagatcctcctccagaacaccctgaggtgacacttccaccttcagacaagggtcaggctcagcattcacacctgactgaagccacagttcaacctctggacctggagcttagcataactacagagcctactacagaggttaaaccgtctccaaccacggaggaaacctcagctcagcctccagacccggggcttgccataactccagaacccactacagagattggacattccacagccctggagaagactagagctcctcatccagaccaggttcagactctgcatcgaagcctgactgaagtcacaggtccacctacaaagttagaatcttcgcaggattcattggtgcagtctgaaactgcaccagaggaacagaaggcctccacaagcaccaacatatgtgagctctgcacctgcggagatgagactctgtcatgtgttggtctcagcccaaagcagaggctccgccaagtgcctgtgccagagcccgacacctacaatggcatcttcaccaccttaaatttccaaggaaactatatttcataccttgatggaaatgtatggaaagcatacagttggaccgagaaactaattctcagtgaaaattatttgactgaattacctaaggattcatttgaaggcctgctatacctccagtatttagatttatcctgcaataaaatacgatatattgaaagacaaacatttgaatcactaccatttttgcagtatataaatctgggctgcaatttaattacaaaactgagccttggaacatttcaggcctggcacggaatgcagtttttacacaacttgagctgatagcccaggagactgacaagtagacaggtggttacatgcagtgtaacgaaggctgtgatgtcatacaggaagacaagtgggaaattctcaatcgcaatcctctgactactgtcgaagatccatatctctttgaactgccggcattaaaatatctagacatgggaacaacacacatcacacttacaacacttaagaacattctcacgatgactgttgaactggaaaaactgtaagttattttttcttagatttatttttacttagttggttttttaggtttgttttattattttcttaagtcaggtttattgagatttaattttcatataacattcaccctttataagtgtatagtttgatgagttttgacaaatgtatagttacataaccaccaccacattcccaatataaagcatttctgtcacctcag

SEQ ID NO: 4303 - DNA, 2674 bp, Homo sapiens
gtttaactcggggccgaaacttgccagcggcgagtgactccaccgcccggagcagcggtgcaggacgcgcgtctccgccgcccgcggtgacttctgcctgcgctccttctctgaacgctcacttccgaggagacgccgacgatgaagacaccgtggaaggttcttctgggactgctgggtgctgctgcgcttgtcaccatcatcaccgtgcccgtggttctgctgaacaaaggcaatgatgctacagctgacagtcgcaaaacttacactctaactgattacttaaaaaatacttatagactgaagttatactccttaagatggatttcagatcatgaatatctctacaaacaagaaaataatatcttggtattcaatgctgaatatggaaacagctcagttttcttggagaacagtacatttgatgagtttggacattctatcaatgattattcaatatctcctgatgggcagtttattctcttagaatacaactacgtgaagcaatggaggcattcctacacagcttcatatgacatttatgatttaaataaaaggcagctgattacagaagagaggattccaaacaacacacagtgggtcacatggtcaccagtgggtcataaattggttagcatatgtttggaacaatgacatttatgttaaaattgaaccaaatttaccaagttacagaatcacatggacggggaaagaagatataatatataatggaataactgactgggtttatgaagaggaagtcttcagtgcctactctgctctgtggtggtctccaaacggcacttttttagcatatgcccaatttaacgacacagaagtcccacttattgaatactccttctactctgatgagtcactgcagtacccaaagactgtacgggttccatatccaaaggcaggagctgtgaatccaactgtaaagttctttgttgtaaatacagactctctcagctcagtcaccaatgcaacttccatacaaatcactgctcctgcttctatgttgataggataagaaaatgaggcctacagattaagaaaatgaccaagtacgaatctatattcaaacctgactttctggcttgaacgaacaagctattagatactgcttcgtgtctccctctgtgtgattacagctggtgccctcagattcctgaaggcaccatcacagcagtacggaagcatccattttctctggagttgcattaagtacatcaggaaggctgtgggctgtgctccgtgggatcactacttgtgtgatgtgacatgggcaacacaagaaagaatttctttgcagtggctcaggaggattcagaactattcggtcatggatatttgtgactatgatgaatccagtggaagatggaactgcttagtggcacggcaacacattgaaatgagtactactggctgggttggaagatttaggccttcagaacctcattttacccttgatggtaatagcttctacaagatcatcagcaatgaagaaggttacagacacatttgctatttccaaatagataaaaaagactgcacatttattacaaaaggcacctgggaagtcatcgggatagaagctctaaccagtgattatctatactacattagtaatgaatataaaggaatgccaggaggaaggaatctttataaaatccaacttagtgactatacaaaagtgacatgcctcagttgtgagctgaatccggaaaggtgtcagtactattctgtgtcattcagtaaagaggcgaagtattatcagctgagatgttccggtcctggtctgcccctctatactctacacagcagcgtgaatgataaagggctgagagtcctggaagacaattcagctttggataaaatgctgcagaatgtccagatgccctccaaaaaactggacttcattattttgaatgaaacaaaattttggtatcagatgatcttgcctcctcattttgataaatccaagaaatatcctctactattagatgtgtatgcaggcccatgtagtcaaaaagcagacactgtcttcagactgaactgggccacttaccttgcaagcacagaaaacattatagtagctagctttgatggcagaggaagtggttaccaaggagataagatcatgcatgcaatcaacagaagactgggaacatttgaagttgaagatcaaattgaagcagccagacaattttcaaaaatgggatttgtggacaacaaacgaattgcaatttggggctggtcatatggagggtacgtaacctcaatggtcctgggatcgggaagtggcgtgttcaagtgtggaatagccgtggcgcctgtatcccggtgggagtactatgactcagtgtacacagaacgttacatgggtctcccaactccagaagacaaccttgaccattacagaaattcaacagtcatgagcagagctgaaaattttaaacaagttgagtacctccttattcatggaacagcagatgataacgttcactttcagcagtcagctcagatctccaaagccctggtcgatgttggagtggatttccaggcaatgtggtatactgatgaagaccatggaatagctagcagcacagcacaccaacatatatatacccacatgagccacttcataaaacaatgtttctctttaccttag

SEQ ID NO: 4304 - DNA, 987 bp, Homo sapiens
agcagtcggctcggaattggacttgggaggcgcggtgaggagtcaggcttaaaacttgttggaggggagtaaccagcctgctcctctcgctctcctcctcgtctgcgccgcgtttcagaggttgcccatcagccttgtgatttatttttatatctgctttttataaagagagaaatatatatatatatatatatattttttttttcttcttaagagaaaattcctgttccaagagaaaataaggcaacatcaatgaaggagagaagagccagccagaaattatccagcaaatctatcatggatcctaatcagaacgtgaaatgcaagatagttgtggtgggagacagtcagtgtggaaaaactgcgctgctccatgtcttcgccaaggactgcttccccgagaattacgttcctacagtgtttgagaattacacggccagttttgaaatcgacacacaaagaatagagttgagcctgtgggacacttcgggttctccttactatgacaatgtccgccccctctcttaccctgattcggatgctgtgctgatttgctttgacatcagtagaccagagaccctggacagtgtcctcaaaaagtggaaaggtgaaatccaggaattttgtccaaataccaaaatgctcttggtcggctgcaagtctgatctgcggacagatgttagtacattagtagagctctccaatcacaggcagacgccagtgtcctatgaccagggggcaaatatggccaaacagattggagcagctacttatatcgaatgctcagctttacagtcggaaaatagcgtcagagacatttttcacgttgccaccttggcatgtgtaagtaagacaaataaaaacgttaagcggaacaaatcacagagagccacaaagcggatttcacacatgcctagcagaccagaactctcggcagttgctacggacttacgaaaggacaaagcgaagagctgcactgtgatgtga

SEQ ID NO: 4305 - DNA, 1367 bp, Homo sapiens
ttagtcggtgccaggtcccaaagacgcagctgcgcgggtgtgccgggaggagccccggaatccacaggctgcgagccagcacaggccagccagaagatgacactgagactacaggtttggaaggcggcgttgccatgccaggtgccgaagatgatgtggtgactccaggaaccagcgaagaccgctataagtctggcttgacaactctggtggcaacaagtgtcaacagtgtaacaggcattcgcatcgaggatctgccaacttcagaaagcacagtccacgcgcaagaacaaagtccaagcgccacagcctcaaacgtggccaccagtcactccacggagaaagtggatggagacacacagacaacagttgagaaagatggtttgtcaacagtgaccctggttggaatcatagttggggtcttactagccatcggcttcattggtggaatcatcgttgtggttatgcgaaaaatgtcgggaaggtactcgccctaaagagctgaagggttacgccctgctgccaacgtgcttaaaaaaagaccgtttctgactctgtgccctgtccctgagctcgtgggagaagatgacccgtggaacacttgcctggcccactcagaatccacggtgacctctccgcttgccaaaataaccgaaggaaagaccgttcaccagacttggctcctctaaacatttgctgttcaaacatgtttttgaatatacattctataaaagattatttgaaagacaaaattcatagaaaatggagcaaaactgtataaactgatttgtaactaacactggaccattggatcgatattacatgctgtaaccatgtgtctccgtctgaccattcttgttattgttaaaatgcagaggaatctggaaatatttatatccacggagtccttggatccagtgctacgtcagtaaatagcaccagcattttgcaattgctgatctgctgaaatgtacacattctgtctagtttggtctatcttttaaagcctgatctggtgtgaataatcaactaggaaatctaaacttggataacacgtggtgaacaactgcctttagctggtccagattaatcatttcaaagacatccattttagatcacaagcaggaagtcgatagtctcaaaggcactttgtttctcccaagtaggccaccaggcagcctctagagttgctttacccaaatccttctccagccatgacttggtgactctaagcttgctcccacctgccccctccacttccctcagatgatgaggagccagggctaagggggcagccttctctcttcccagtgatgcacatccttcacattggctgctttgttctggaatatggatatctcagcctg

SEQ ID NO: 4306 - DNA, 1305 bp, Homo sapiens
gtcggtgccaggtcccaaagacgcagctgcgcgggtgtgccgggaggagccccggaatccacaggctgcaaggggaaggcgtttaacaactcgggggtgaagcctggtggacagcggcagggacatcataaatacagaagataattttaaagaagtgttccggccgggtgcagtggctcacaactgtaatcccaggactttgggaggctgaggcgggcggatcacctgagccagcacaggccagccagaagatgacactgagactacaggtttggaaggcggcgttgccatgccaggtgccgaagatgatgtggtggctccaggaaccagcgaagaccgctataagtctggcttgacaactctggtggcaacaagtgtcaacagtgtaacaggcattcgcatcgaggatctgccaacttcagaaagcacagtccacgcgcaagaacaaagtccaagcgccacagcctcaaacgtggccaccagtcactccacggagaaagtggatggagacacacagacaacagttgagaaagatggtttgtcaacagtgaccctggttggaatcatagttggggtcttactagccatcggcttcattggtggaatcatcgttgtggttatgcgaaaaatgtcgggaaggtactcgccctaaagagctgaagggttacgccctgctgccaacgtgcttaaagaaagaccgtttctgactctgtgccctgtccctgagctcgtgggagaagatgacccgtggaacacttgcctggcccactcagaatccacggtgacctctccgcttgccaaaataaccgaaggaaagaccgttcaccagacttggctcctctaaacatttgctgttcaaacatgtttttgaatatacattctataaaagattatttgaaagacaaaattcatagaaaatggagcaaaactgtataaactgatttgtaactaacactggaccattggatcgatattatatgctgtaaccatgtgtctccgtctgaccattcttgttattgttaaaatgcagaggaatctggaaatatttatatccacggagtccttggatccagtgctacgtcagtaaatagcaccagcattttgcaattgctgatctgctgaaatgtacacattctggtctagtttggtctatcttttaaagcctgatctggtgtgaataatcaactaggaaatctaaacttggataacacgtggtgaacaactgcctttagctggtccagattaatcatttcaaagacatccattttagatcacaagcaggaagtcgatagtctcaaaggcact

SEQ ID NO: 4307 - DNA, 1537 bp, Homo sapiens
gaccatttcagcttgaatttgacggcgaagtgttgtagagaccgtctccttgaatcattgcaaagggaccggggaaagatgagggggctccctctgtggatttatcttgctgagggatatagacctgcagctaactggatttgatttataagagagaaatctgcagtcaatgcccactcttgccacactgctaatatggaaaacagaatgttcaataggatatggtctgataaatagtgatgattgaagatgctgctccaatacatgtgaaatcaatgggagatatctgctgtccgaagatctttcagagcttttctcgacaagctcccctgtaagaaatcggaggtatattctaccattatacagtctttctcaagtggatataaatacgtttgcctcactgtaaccagacaactagacaactaatgtgggaccatggcactgcccagatgcacgtggccaaattatgtttggagagcagtgatggcatgcttggtacaccggggattgggtgccccattgactctctgtatgttgggatgtttgcttcaggctggccatgtgctatcacaaaaattggatgatgtggacccactggtggctaccaactttggaaagataagagggattaagaaggaactcaataatgaaattttggggcctgttattcaatttcttagggttccatatgcagccccaccaacaggggaacgtcgttttcagcctccagaaccaccatctccctggtcagatatcagaaatgccactcaatttgctcctgtgtgtccccagaatatcattgatggcagattgccagaagtcatgcttcctgtgtggtttactaataacttggatgtggtttcatcatatgtgcaagaccagagcgaagactgcctatatttaaatatatatgtcccgactgaggatgtaaaaagaatatccaaggaatgtgccagaaagcccggcaagaaaatatgtagaaaaggaggtccccttacaaagaaacagacagatgatttaggtgataatgacggtgctgaagatgaagatattcgggacagtgggggtcccaaaccagtgatggtgtatatccatggtggctcatatatggaaggtactggaaatttatatgatggaagtgtcttggcaagttatggcaatgtgatcgtcatcacagtcaactatcgacttggagtactcggtttcttgagtacaggcgatcaggctgcaaaggggaactatggactccttgatctcatacaagctttaagatggactagtgaaaacattggattctttggtggtgaccccttaagaatcactgtttttggatctggtgctgggggttcatgtgtcaacctgctgactttatcccattattctgaaggtaaccgttggagcaattcaaccaaaggactttttcaacgagcaatagctcaaagtggaacagccctttccagctgggctgttagttttcaacctgcaaaaatatgctagaatgttggccacaaaagttggttgcaatgtttcagataca

SEQ ID NO: 4308 - DNA, 1032 bp, Homo sapiens
acacagtactcggccacaccatggggcgcccactgcacctcgtcctgctcagtgcctccctggctggcctcctgctgctcggggaaagtctgttcatccgcagggagcaggccaacaacatcctggcgagggtcacgagggccaattcctttcttgaagagatgaagaaaggacacctcgaaagagagtgcatggaagagacctgctcatacgaagaggcccgcgaggtctttgaggacagcgacaagacgcccgcgtcctgccttggcctccgtagtcgctgagagccacagcctagagcgccagcgcgcaggcgcacaactgacgccaggccacgaacccagtactgcgcctgcacagcagaagcactagcactgaggccgggccgcgaacccggcactgcgcctgcgcagcaaaaggacacgcactgaggccaggccgcgaacccagcacggtgcctgcgcagcaggaagaccggcatccacaccggacgacgaacccagcatcgcgcctgcgcagtaggaggagagcaatgccaccaggccgcgattgcgcagccgcagcagccccgcgcggaagacgctaccctcttctcccccgaagaggcggggcttcgaacgaacctggaaatggccgaggggtctcgacttcctcaccccaggcatcaggaaaggtgcctgcaggacagggctctgaagtggaagtgggcggtggtgatgccgaactgacaagaatgagctgaagagaagaaagtagccgagaagggggccaagccggagctcagtgagcaacagctaggccagccgcggctggtgccatcagccacaccactaactgtggacccaaatggaaactttgaggccccttacaggtcccccagcgcaggccaccgccgaaggttactggggaagacccctgcagcttccatgtggacattactcgcttgcttcatcccggagtgcagtcacctgcagcctgggaccacctgactgatgtcaccctggagatccatgccaaaagagctggggaaag

SEQ ID NO: 4309 - DNA, 1211 bp, Homo sapiens
acagtactcggccacaccatggggcgcccactgcacctcgtcctgctcagtgcctccctggctggcctcctgctgctcggggaaagtctgttcatccgcagggagcaggccaacaacatcctggcgagggtcacgagggccaattcctttcttgaagagatgaagaaaggacacctcgaaagagagtgcatggaagagacctgctcatacgaagaggcccgcgaggtctttgaggacagcgacaagacgaatgaattctggaataaatacaaagatggcgaccagtgtgagaccagtccttgccagaaccagggcaaatgtaaagacggcctcggggaatacacctgcacctgtttagaaggattcgaaggcaaaaactgtgaattatgcatgttgatctttgcactgtgattactttttcatcaaaagccacacagagggatgtggagtgaccgtaatgtgagtgctgctggggcagggggtaccggccatcccggaggtgtgaggggcaggtacctggagcctggcttctggctacaccgggcgctgcaccatgagctccccgtgacccgtgaggttgcccttcaaggcaagtgtacctgtcgcctggctctggccctttgctcaacccaatggccgctttgtggctgacaggcaagtggatgtagctggcacccttgggccagcccagcctccatttctccagctgtccccagagccaacgtgcctctcctttgcagccacacggaagctctgcagcctggacaacggggactgtgaccagttctgccacgaggaacagaactctgtggtgtgctcctgcgcccgcgggtacaccctggctgacaacggcaaggcctgcattcccacagggccctacccctgtgggaaacagaccctggaacgcaggaagaggtcagtggcccaggccaccagcagcagcggggaggcccctgacagcatcacatggaagccatatgatgcagccgacctggaccccaccgagaaccccttcgacctgcttgacttcaaccagacgcagcctgagaggggcgacaacaacctcaccaggatcgtgggaggccaggaatgcaaggacggggagtgtccctggcaggccctgctcatcaatgaggaaaacgagggtttctgtggtggaactattctgagcgagttctacatcctaacggcagcccactgtctctaccaag

SEQ ID NO: 4310 - DNA, 3292 bp, Homo sapiens
aatgcgttactgtgtggactgagttcccatgactcgggctccccaggacaatgtctctttcttcaccaagctgatggtaaatatctggttagcttcatctatttaaaaccagccaagcaggaatcctagtgctggagagaggattctttttttttttgtttggtgaagtagagaaataaagtctccccgctgaactactatgaggtcagaagccttgctgctatatttcacactgctacactttgctggggctggtttcccagaagattctgagccaatcagtatttcgcatggcaactatacaaaacagtatccggtgtttgtgggccacaagccaggacggaacaccacacagaggcacaggctggacatccagatgattatgatcatgaacggaaccctctacattgctgctagggaccatatttatactgttgatatagacacatcacacacggaagaaatttattgtagcaaaaaactgacatggaaatctagacaggccgatgtagacacatgcagaatgaagggaaaacataaggatgagtgccacaactttattaaagttcttctaaagaaaaacgatgatgcattgtttgtctgtggaactaatgccttcaacccttcctgcagaaactataagatggatacattggaaccattcggggatgaattcagcggaatggccagatgcccatatgataccaaacatgccaacgttgcactgtttgcagatggaaaactatactcagccacagtgactgacttccttgccattgacgcagtcatttaccggagtcttggagaaagccctaccctgcggaccgtcaagcacgattcaaaatggttgaaagaaccatactttgttcaagccgtggattacggagattatatctacttcttcttcagggaaatagcagtggagtataacaccatgggaaaggtagttttcccaagagtggctcaggtttgtaagaatgatatgggaggatctcaaagagtcctggagaaacagtggacgtcgttcctgaaggcgcgcttgaactgctcagttcctggagactctcatttttatttcaacattctccaggcagttacagatgtgattcgtatcaacgggcgtgatgttgtcctggcgacgttttctacaccttataacagcatccctgggtctgcagtctgtgcctatgacatgcttgacattgccagtgtttttactgggagattcaaggaacagaagtctcctgattccacctggacaccagttcctgatgaacgagttcctaagcccaggccaggttgctgtgctggctcatcctccttagaaagatatgcaacctccaatgagttccctgatgataccctgaacttcatcaagacgcacccgctcatggatgaggcagtgccctccatcttcaacaggccatggttcctgagaacaatggtcagataccgccttaccaaaattgcagtggacacagctgctgggccatatcagaatcacactgtggtttttctgggatcagagaagggaatcatcttgaagtttttggccagaataggaaatagtggttttctaaatgacagccttttcctggaggagatgagtgtttacaactctgaaaaatgcagctatgatggagtcgaagacaaaaggatcatgggcatgcagctggacagagcaagcagctctctgtatgttgcgttctctacctgtgtgataaaggttccccttggccggtgtgaacgacatgggaagtgtaaaaaaacctgtattgcctccagagacccatattgtggatggataaaggaaggtggtgcctgcagccatttatcacccaacagcagactgacttttgagcaggacatagagcgtggcaatacagatggtctgggggactgtcacaattcctttgtggcactgaatgggcattccagttccctcttgcccagcacaaccacatcagattcgacggctcaagaggggtatgagtctaggggaggaatgctggactggaagcatctgcttgactcacctgacagcacagaccctttgggggcagtgtcttcccataatcaccaagacaagaagggagtgattcggggaagttacctcaaaggccacgaccagctggttcccgtcaccctcttggccattgcagtcatcctggctttcgtcatgggggccgtcttctcgggcatcaccgtctactgcgtctgtgatcatcggcgcaaagacgtggctgtggtgcagcgcaaggagaaggagctcacccactcgcgccggggctccatgagcagcgtcaccaagctcagcggcctctttggggacactcaatccaaagacccaaagccggaggccatcctcacgccactcatgcacaacggcaagctcgccactcccggcaacacggccaagatgctcattaaagcagaccagcaccacctggacctgacggccctccccaccccagagtcaaccccaacgctgcagcagaagcggaagcccagccgcggcagccgcgagtgggagaggaaccagaacctcatcaatgcctgcacaaaggacatgccccccatgggctcccctgtgattcccacggacctgcccctgcgggcctcccccagccacatccccagcgtggtggtcctgcccatcacgcagcagggctaccagcatgagtacgtggaccagcccaaaatgagcgaggtggcccagatggcgctggaggaccaggccgccacactggagtataagaccatcaaggaacatctcagcagcaagagtcccaaccatggggtgaaccttgtggagaacctggacagcctgccccccaaagttccacagcgggaggcctccctgggtcccccgggagcctccctgtctcagaccggtctaagcaagcggctggaaatgcaccactcctcttcctacggggttgactataagaggagctaccccacgaactcgctcacgagaagccaccaggccaccactctcaaaagaaacaacactaactcctccaattcctctcacctctccagaaaccagagctttggcaggggagacaacccgccgcccgccccgcagagggtggactccatccaggtgcacagctcccagccatctggccaggccgtgactgtctcgaggcagcccagcctcaacgcctacaactcactgacaaggtcggggctgaagcgtacgccctcgctaaagccggacgtaccccccaaaccatcctttgctcccctctccacatccatgaagcccaatgatgcgtgtacataa

SEQ ID NO: 4311 - DNA, 1514 bp, Homo sapiens
atcatttagtagagcttaaaagtattgccgtagtggttggactttctctttcctttcttaagggaaaaaaaaaaattctactggaactatttaagggaaccagtgtgggggagcatgtgtgtgagtgagatcgagcctgcgtgctgccgaagcagggcgccgagtccatgcgaactgccatctgatccgctcttatcaatgaagcagccgatcatggcggatggcccccggtgcaagaggcgcaaacaagccaatcccaggaggaaaaacgtggtgaactatgacaatgtagtggacacaggttctgaaacagatgaggaagacaagcttcatattgctgaggatgacggtattgccaaccctctggaccaggagacgagtccagctagtgtgcccaaccatgagtcctccccacacgtgagccaagctctgttgccaagagaggaagaggaagatgaaataagggagggtggagtggaacacccctggcacaacaacgagattctacaagcctctgtagatggtccagaagaaatgaaggaagactatgacactatggggccagaagccacgatccagaccgcaattaacaatggtacagtgaagaatgcaaattgcacatcagattttgaggaatactttgccaaaagaaaactggaggaacgcgatggtcatgcagtcagcatcgaggagtaccttcagcgcagtgacacagccattatttacccagaagcccctgaggagctgtctcgccttggcacgccagaggccaatgggcaagaagaaaatgacctgccacctggaactccagatgcttttgcccaactgctgacctgcccctactgcgaccggggctacaagcgcttgacatcactgaaggagcacaccaagtaccgccacgagaagaatgaagagaacttttcctgccctctctgtagctacacgtttgcctatcgcacccagctcgagcggcatatggtgacacacaagccagggacagatcagcaccaaatgctaacccaaggagcaggtaatcgcaagttcaaatgcacagagtgtggcaaggccttcaaatataaacaccatctgaaagaacacctgcgaattcacagtggtgaaaaaccttacgagtgcccaaactgcaagaaacgtttctcccattctggttcctacagttcgcacatcagcagcaagaaatgtattggtttaatctctgtaaatggccgaatgagaaacaatatcaagacgggttcttcccctaattctgtttcttcttctcctactaattcagccattacccagttaagaaacaagttggagaatggaaaccacttagtatgtctgaacagacaggcttacttaaaattaaaacagaaccactagacttcaatgactataaagttcttatggctacacacgggtttagtggcactagtccctttatgaatggtgggcttggagccaccagccctttaggagttcatccatctgctcagagtccaatgcagcactta

SEQ ID NO: 4312 - DNA, 957 bp, Homo sapiens
actcagctcctgtggggaaactcatttgtggagaccagccctctggcttggtgggtgaatctggtttacaccggctcctgccctgccttcactcttctcccctgattcaagactcctctgctttggactgaagcactgcaggagtttgtgaccaagaacttcaagagtcaagacagaaggaagccaagggagcagtgcaatggatttctcagtaaaggtagacatagagaaggaggtgacctgccccatctgcctggagctcctgacagaacctctgagcctagattgtggccacagcttctgccaagcctgcatcactgcaaagatcaaggagtcagtgatcatctcaagaggggaaagcagctgtcctgtgtgtcagaccagattccagcctgggaacctccgacctaatcggcaccatggaaaaaaactccagatcttctgaaaagctgcaggtagccctgcagaggctgataaaggaggatcaagaggctgagaagctggaagatgacatcagacaagagagaaccgcctggaaggcaggaggagacacctcctaagggataattagacaggaatctgggcaggaccctgggctctatcacaaggagaccccttcctctttgctgtgctagaattaacaagcatagaagtcatttgattaggtctcaatttaactccttccctgttggagtttaggggctggagagtagacatatcataaatcaacactatatttggaagtgaaggcatggagggaaatatctgtgaaaacgcttcctgtgaatcctgtgttccatttgtgtcatcaggtttgaggctccaatccttccagtaaacaccctggagaaagacccaggattccctgtttagggggtttcagtagggggatttttttgtttgtttgtttgttttttgagacagagtctctctctgtcatacaggctggagtgtagt

SEQ ID NO: 4313 - DNA, 1203 bp, Homo sapiens
attccagtagttttgtttctggaaaagagggcacccagcccttccccctccctcatcctcccatcccagtaaaccctgccaaattggaatcctggacttaatttaggagaaaggccctgtaaccaagccacccctcgccaacgctaccaagctgcaagaatctactatatcatggcagaagaagtagagtgggactattgccctgaccggagctgggaacgggaatggcacaaccagtctgagaaggacagttatggttacattttcctgagcaacaaggatgggctcctgggttccagatacaagaaagctgtattcagggaatacactgatggtacattcaggatccctcggccaaggactggaccagaagaacacttgggaatcttgggtccacttaccaaaggtgaagttggtgatatcctgactgtggtattcaagaataatgccagccgcccctactctgtgcatgctcatggagtgctagaatctactactgtctggccactggctgctgagcctggtgaggtggtcacttatcagtggaacatcccagagaggtctggccctgggcccaatgactctgcttgtgtttcctggatctattattctgcagtggatcccatcaaggacatgtatagtggcctggtggggcccttggctatctgccaaaagggcatcctggagccccatggaggacggagtgacatggatcgggaatttgcattgttgttcttgatttttgatgaaaataagtcgtggtatttggaggaaaatgtggcaacccatgggtcccaggatccaggcagtattaacctacaggatgaaactttcttggagagcaataaaatgcatggtcagtagtaaaaaacctactcttgttccaaagcagtccctactggttacatggggatatttaataggcctattgctacctaagggaacataatcccagagaggacacgaacatgggaaggtgaaatggggatgagttagaagaagcatttcctattattgtacatttacatatacaaaggcagatatgtggtccaggttagattgggtgcccagaaagcaggaagttgactctgtaaattgccatggcgataccagaaaattttaacatattagagaaggcaaaatggacatgtatgaccttcaatgtacttgtcaagctggctgcttagtgcccctctattttaa

SEQ ID NO: 4314 - DNA, 848 bp, Homo sapiens
cttgaatgcagttgatcaagttgctgttagcatgtaaaataagtttctttgttttgctgatagtctagttctccaaagagctttttcaatctttatcaatctttaaagttaaatagctttcctaatagtcctttgaaaggatgattgtatttatatgttaatgaagctcaggtacctgacaatgatgagcagtttgtaccagactatcaggctgaaagtttggcttttcatggcctgccactgaaaatcaagaaagaaccccacagtccatgttcagaaatcagctctgcctgcagtcaagaacagccctttaaattcagctatggagaaaagtgcctgtacaatgtcagtgcctatgatcagaagccacaagtgggaatgaggccctccgacccccccacaccatccagcacgccagtgtccccactgcatcatgcatctccaaactcaactcatacaccgaaacctgaccgggccttcccagctcacctccctccatcgcagtccataccagatagcagctaccccatggaccacagatttcgccgccagctttctgaaccctgtaactcctttcctcctttgccgacgatgccaagggaaggacgtcctatgtaccaacgccagatgtctgagccaaacatccccttcccaccacaaggctttaagcaggagtaccacgacccagtgtatgaacacaacaccatggttggcagtgcggccagccaaagctttccccctcctctgatgattaaacaggaacccagagattttgcatatgactcagaagtgcctagctgccactccatttatatgaggcaagaaggcttcctggctcatcccagcag

SEQ ID NO: 4315 - DNA, 972 bp, Homo sapiens
cacttttaggttgggccaactgagaattttggggactttccttgctgtgaatgtggaattaaattgcttttttatttttattttttatttttcgagatggagtctcgctctgtcgccaggtacagtggcgtgatctcggctcactgcaacctctgcctcctgggttcaagcgatttgcctgcctcagcctcctgagtagctgggactacaggcaactgccaccacacctggctaatttttgtatttttggtagagacagggtttctccatgttggccaggatggtctcgatctcctgacctcatgatccgtccgcctcggcctcccaaagtgctgggattgcaggcgtgagccactgcgcctggctgctttttaatttttttggaaaggtaggggggatttggtctatgattaatccatctggagtttggtaacggatccagcagtgaattttgaagattgcaccggtcgacaaaggacagcctatttttccctcgacacccgattcaaagtgggcacagatggtgtgattacagtcaaaaggcctctacggtttcataacccacagatccatttcttggtctacgcctgggactccacctacagaaagttttccaccaaagtcacgctgaatacagtggggcaccaccaccgccccccgccccatcaggcctccgtttctggaatccaagcagaattgctcacatttcccaactcctctcctggcctcagaagacagaagagagactgggttattcctcccatcagctgcccagaaaatgaaaaaggcccatttcctaaaaacctggttcagatcaaatccaacaaagacaaagaaggcaaggttttctacagcatcactggccaaggagctgacacaccccctgttggtgtctttattattgaaagagaaacaggatggctgaaggtgacagagcctctggatagagaacgcattgccacatacactctc

SEQ ID NO: 4316 - DNA, 1218 bp, Homo sapiens
tctgctctaaaagctgcggaattcctcgacactgttggcctactggagcgatggacggagacggtgacccaggtagccgacgcctggaccgctcgctgcggcggggaggggagatggggtcggcgggcgagcgctgcacagaggggcgtcagagagcgaggggacccggagacctggcgcggcaaactttcacgccagcgaagccctagaggcggtctccaaagagcacgtctctctgctatcttggtctggcgggaggccttgagaggcgactggcaaggagagagaactcctgggtcccatttagccaggaagtagcaccagaggacccccacattcccgcctcccagcttcctgaggccctgaaaattccagctctcgcagcccttgctcccaatccacggccttctggccacaccctctgtagggctccagaactggctcctgctttttcccagggatcagctataccctggactctggggcccactccagagagcgtgggccagcccgaggaggcaagcccggaggagcagccagaggaggcgagtgctgaggaggagcggccggaggaccagcaggaggaggaggcggcggccgccgccgcgtacctggacgagctgcccgagccgctgctgctgcgcgtgctggccgcactgccggccgccgagctggtgcaggcctgccgcctggtgtgcctgcgctggaaggagctggtggacggcgccccgctgtggctgctcaagtgccagcaggaggggctggtgcccgagggcggcgtggaggaggagcgcgaccactggcagcagttctacttcctgagcaagcggcgccgcaaccttctgcgtaacccgtgtggggaagaggacttggaaggctggtgtgacgtggagcatggtggggacggctggagggtggaggagctgcctggagacagtggggtggagttcacccacgatgagagcgtcaagaagtacttcgcctcctcctttgagtggtgtcgcaaagcacaggtcattgacctgcaggctgagggctactgggaggagctgctggacacgactcagccggccatcgtggtgaaggactggtactcgggccgcagcgacgctggttgcctctacgagctcaccgttaagctactgtccgagcacgagaacgtgctggctgagttcagcagcgggcaggtggcagtgccccaagacagtgacggcgggg

SEQ ID NO: 4317 - DNA, 1299 bp, Homo sapiens
ctcgggcggtcacctgggcacgggcgctgcaggtgtcggggcctcaaccttgcggagccgacagccatcgatcctcgggtggcctcgaggtggtggcagggccgccccctgcagtccggagacgaacgcacggaccgggcctccggaggcaggttcggctggaaggaaccgctctcgcttcgtcctacacttgcgcaaatgtctccggcttgctccacttatcgggctcaccaaatacagctgcagtatgaattccatcttctacacaacagtaaaccagaatgttcatgttcacagcgttcatctcccatcctgttgtctaacgcacatggtttttttaaacttttctaagattacatgagattctgcaacacaactgattataaaaacacttgaagtttttacctttttttttactttccaactctcgtgaatgtacagagaactttccagaagctacatgatgtgtgatatttcagctgatgaaatgtagatgtataggtaatcggtcagagtggtgggagaaactgttgggaaaggagcaggccttctgaaaggtcggaaggcttcaggggagaataagctgaacgcagctgttctctgaccttgaggcagagggcaaggagtaggtacaaggacgtgtaggagaatttatcttaaataggcttgttcacttgtgttgtccagaaacgacttttgatcatcagcgcgcatgactgctccctgaaaggaagaacaataatgttaattacccgcagactgtgtttgctccaggctttcggcattatgtctgtactgaataaaagcaagcagctccagctgttcgaggctgctctcttcttcagccattagtgccgggcagcccactagctgctgttacactgcatatctgtgtctgagtactcctttcttcagttgcttggccagggtctgtgggacagacccagcagctggtgccctgtgtgaggaacgctgcaatggatcgcgacggaaccctcgaaaacgaagagcttactcacatagcatattggtatatcaaaatgaaatgcaaggaaccaaaaataacataattgaaggcagtaaaagtgaaattaaataggaagatcatcagtcaaggaagacccactggagaggacagaaaatgaagcagtgttttatcatgtgtatttcagcaggtcttcttgaaatttaactaaaaatatgactgctctctcttcagagaactgctcttttcagtaccagttacgtcaaacaaaccagcccctagatgttaactatctgctattcttgatcatactt

SEQ ID NO: 4318 - DNA, 1143 bp, Homo sapiens
agtcggctcggaattggacttgggaggcgcggtgaggagtcaggcttaaaacttgctggaggggagtaaccagcctgctcctctcgctctcctcctcgtctgcgccgcgtttcagaggttgcccatcagccttgtgatttatttttatatctgctttttataaagagagaaatatatatatatatatatatttttttttcttcttaagagaaaattcctgttccaagagaaaataaggcaacatcaatgaaggagagaagagccagctacttatatcgaatgctcagctttacagtcggaaaatagcgtcagagacatttttcacgttgccaccttggcatgtgtaaataagacaaataaaaacgttaagcggaacaaatcacagagagccacaaagcggatttcacacatgcctagcagaccagaactctcggcagttgctacggacttacgaaaggacaaagcgaagagctgcactgtgatgtgaatctttcattatctttaatgaagacaaaggaatctagtgtaaaaaacaacagcaaacaaaaaggtgaagtctaaatgaagtgcacagccaaagtcatgtataccagaggcttaggaggcgtttgagaggatactcatctttttggaatcctgaccttaggttcggcatgtagaccaagtgatgagaagtgaatacatggaagagtttttaagtgtgacttgaaaaatatgccaaaaaatgagagatacaaatgagctagaggaagatgaggggggatgcgagtacctccaagaagaaaaatcacactctgaatggtgcttgcatttttgggtttttttttttttgttataatctattcatggatctccactttgatttaatttttaaatgttttaatctcctttacaaaaagtatacgttaatataccgtcctcaagggggaactggcactgtgaccttagcatttagttttctagaggatgtgatctaatttctttctagctcatcattaaaaaggaaattgtatcaggacccatgggatatatccagaggcaaactttatgaggctttgaaatcttgccttcctgaagatagctgagtaggatggttctaaggaaagcctttgcaatcttgcaagatttgtagaccagcactac

SEQ ID NO: 4319 - DNA, 1310 bp, Homo sapiens
aacatttcagccggtgggtggcggggattaggcgtgaagcggttcagcaggcagaggttctcggacgccctccggcgaagccacctgttgatgcttttgactttctgtccttgttcctcgtcccatctggagcatttccaattctggttttgcggagcagcaggtctgagcttgtccggcgagggtgggagttggtcccggcggagatccagtgggaagagccggcggctgcccgggcaactcccccactggaaaggattctgaaagaaatgaagtcagccctcagaaatgaagttgactgcctgctggctttctgttgactggcccggagctgtactgcaagacccttgtgagcttccctagtctaagagtaggatgtctgctgaagtcatccatcaggttgaagaagcacttgatacagatgagaaggagatgctgctctttttgtgccgggatgttgctatagatgtggttccacctaatgtcagggaccttctggatattttacgggaaagaggtaagctgtctgtcggggacttggctgaactgctctacagagtgaggcgatttgacctgctcaaacgtatcttgaagatggacagaaaagctgtggagacccacctgctcaggaaccctcaccttgtttcggactatagagtgctgatggcagagattggtgaggatttggataaatctgatgtgtcctcattaattttcctcatgaaggattacatgggccgaggcaagataagcaaggagaagagtttcttggaccttgtggttgagttggagaaactaaatctggttgccccagatcaactggatttattagaaaaatgcctaaagaacatccacagaatagacctgaagacaaaaatccagaagtacaagcagtctgttcaaggagcagggacaagttacaggaatgttctccaagcagcaatccaaaagagtctcaaggatccttcaaataacttcagggctggagtgcaatggcgcgatcttggctcaccgcaacctccgcctcccgggttcaagcgattctcccacctcagcctcccaagtagctgggattacaggaatgtgccaccacgcccggctccataatgggagaagtaaagaacaaagacttaaggaacagcttggcgctcaacaagaaccagtgaagaaatccattcaggaatcagaagcttttttgcctcagagcatacctgaagagagatacaagatgaagagcaagcccctaggaatctgcctgataatcgattgcattggcaatgagacagagcttcttcgagacaccttcactt

SEQ ID NO: 4320 - DNA, 1377 bp, Homo sapiens
attcaagactcctctgctttggactgaagcactgcaggagtttgtgaccaagaacttcaagagtcaagacagaaggaagccaagggagcagtgcaatggatttctcagtaaaggtagacatagagaaggaggtgacctgccccatctgcctggagctcctgacagaacctctgagcctagattgtggccacagcttctgccaagcctgcatcactgcaaagatcaaggagtcagtgatcatctcaagaggggaaagcagctgtcctgtgtgtcagaccagattccagcctgggaacctccgacctaatcggcatctggccaacatagttgagagagtcaaagaggtcaagatgagcccacaggaggggcagaagagagatgtctgtgagcaccatggagaaaaactccagatcttctgtaaggaggatggaaaagtcatttgctgggtttgtgaactgtctcaggaacaccaaggtcaccaaacattccgcataaacgaggtggtcaaggaatgtcagaattatatccagatcgagagacagaagattctgaaagggttcaatgaaatgagagtcatcttggacaatgaggagcagagagagctgcaaaagctggaggaaggtgaggtgaatgtgctggataacctggcagcagctacagaccagctggtccagcagaggcaggatgccagcacgctcatctcagatctccagcggaggttgaggggatcgtcagtagagatgctgcaggatgtgattgacgtcatgaaaaggagtgaaagctggacattgaagaagccaaaatctgtttccaagaaactaaagagtgtattccgagtaccagatctgagtgggatgctgcaagttcttaaagagctgacagatgtccagtactactgggctatctgctctggaataaagctacacaccaccatattgttaataattgaagactcaccctgggctgaagctctatggcatagagcttattttatgtgtttcggtaagcgagctggctcactgaaaaagaaaaaaggatctacatttgtggggattctgtccatcgtagctgcttgtgctagaagaaagatgtaccattacatcatattactgtttaccgttttctcctctccatagactgcattcattctacaaacccaaggacaactttattggcacaaaaactagcatgttttgtaattggtgagcatcatgaatggagccaacagctccagcctgacaccaagatatttcattctcagtggcgttcctgggctggaagctgcacacatctggatctccctgcctttctgcttcctgtacatcattgttgttttggggaactgtggacttatatacctcattagccatgaggagg

SEQ ID NO: 4321 - DNA, 3828 bp, Homo sapiens
agctccagggggctggaagtggaagcgcagcggcagaaggagagggagagagaaagagagagaggctaattaaaaaaggatactccgagggaagagagcaagggcggtgcgccgccaaggaccaactagcggcggagcttcgatcttgcctaggcgcggagagctcccaacctgggctggaaccttgcccagcacaggtggctgctacaccccatgtaaaaagcggaaaataaaatgaagattttccagcgcaagatgcggtactggttgcttccaccttttttggcaattgtttatttctgcaccattgtccaaggtcaagtggctccacccacaaggttaagatataatgtaatatctcatgacagtatacagatttcatggaaggctccaagagggaaatttggtggttacaaacttcttgtgactccaacttcaggtggaaaaactaaccagctgaatctgcagaacactgcaactaaagcaattattcaaggccttatgccagaccagaattacacagttcaaattattgcatacaataaagataaagaaagcaagccagctcaaggccaattcagaattaaagatttagaaaaaagaaaggatccaaagcccagagtcaaagttgtggacagaggaaatgggagtagaccatcttcaccagaagaagtgaaatttgtctgtcaaactccagcaattgctgacattgtaatcctggtcgatggttcatggagtattggaagattcaacttcagactggttcggcatttcttggaaaacctggttacagcattcgatgtgggctcagagaagacacgaattggtcttgcacagtatagtggcgaccccagaatagaatggcacttgaatgcatttagcacaaaagatgaagtgattgaagctgtccgaaacctcccatataaaggaggaaatacactaacaggtcttgctttgaactacatttttgaaaatagcttcaaaccagaagcaggatcaaggactggagtatccaaaattggcattttaatcacagatggaaaatcccaagatgacattattccaccatctagaaatcttcgtgagtctggtgtagaactgtttgccataggggtgaaaaacgcggatgtgaatgagctgcaggagatcgcctccgaaccagacagcactcatgtgtacaatgttgccgaattcgatctgatgcacacagttgtggagagtctgaccaggactctctgctctagagtggaagaacaggacagagaaattaaagcctcagcccatgccatcactgggccgcctacggagttgattacttctgaagtcactgccagaagctttatggttaactggactcatgccccaggaaatgtggaaaaatacagagttgtgtattatcctaccaggggtggaaaaccagacgaggtggtggtagatggaactgtatcttccacagtgttgaaaaacttgatgtctttaactgaatatcagatagcagtctttgcaatctatgcccacactgctagtgaaggcctacggggaactgaaactacacttgctttaccgatggcttctgaccttctactgtacgacgtgactgagaacagcatgcgagtcaaatgggatgcagtgcctggggcctcaggttacctgatcctttatgctcctctaacagagggcctggctggggacgaaaaagagatgaaaattggagagacccacacagatattgaattgagtgggttgttgcccaatacagaatacacagtcacagtttatgccatgtttggagaagaggccagtgatcctgttacgggacaagaaacaacattggctttaagtccaccaagaaacctgagaatctccaatgttggctctaacagtgctcgattaacctgggacccaacttcaagacagatccatggttatcgaattgtatataacaatgcagatgggactgaaatcaatgaggttgaagtcgatcctattactaccttccctctgaagggcttgacacctctcacagagtatactattgctattttctccatctatgatgaaggacagtcagagcctctgactggagtttttaccaccgaggaagttccagcccagcaatacttagaaattgatgaggtgacgacagacagttttagggtgacctggcatcccctctcagctgatgaagggctacacaaattgatgtggattccagtctatggggggaagactgaggaggttgtcctgaaagaagagcaggactcacatgttattgaaggcctggagcccggtacggagtatgaagtttcactattggccgtacttgatgatggaagcgagagtgaggtggtgactgctgtcgggaccacacttgacagtttttggacagaaccagctacaaccatagtgcctaccacatctgtgacttcagttttccagacgggaatcagaaacctagttgtaggtgatgaaactacttctagcctgcgggtaaaatgggacatttctgacagcgatgtgcagcagtttagggtgacctacatgacagctcaaggggaccctgaggaagaagtcataggaacggttatggtgcctggaagccagaacaacctcctcctgaagcctctgcttcctgatactgaatacaaagtcacagtgactcccatctacacggatggcgaaggcgtcagcgtctccgctcctggaaaaaccttaccatcctcagggccccagaacttgcgggtgtccgaggaatggtataaccggttgcgcattacgtgggaccccccatcttccccggtgaaaggctatagaattgtctacaaacctgtcagtgttcctggtccaacactggaaacgtttgtgggagctgacattaacaccatccttatcacaaacctcctcagcggaatggactacaatgtgaagatatttgcctcccaggcctcaggcttcagcgacgccctgacaggcatggtgaaaacattgttcttgggtgttaccaatctccaagccaaacatgttgaaatgaccagcttgtgtgcccactggcaggtacatcgccatgccacagcctatagggttgttatagaatccctccaggataggcaaaagcaagaatccactgtgggtggagggacaaccaggcattgcttctatggacttcagcctgattctgaatataaaatcagtgtttatacaaagctccaggagattgaaggacctagtgtgagcataatggaaaaaacacaatcacttcctacacgaccaccaacttttcctccaaccattccaccagcaaaagaagtatgtaaggcggccaaggctgacctggtatttatggtggatggatcctggagcattggagatgaaaatttcaataagatcatcagctttctatacagcactgttggagccctgaacaagattggcacagatggaacccaacactattcacagtaacaaacatggaatgcccatcaatggtggactgcgtaaagaaaatgtggtgaacatacagcaagaaatactacgcagccataaaaaagaacaaaatcatgttctttgcagcaacacgggtgcctctggaagccattatcttgtgcaaattaacacagaaacatgaaaccaaatactgcatgctctcacttagaagtgggagctaaacatcgagtacacacggacgtaaagacgggaacaatagacactaggggctactagtagggggagaatagaaggaggctgaaggttgaaaaactgcctattgggaactatgctcactacctgggggacagaatcatttgtacaccacctctcagtgacatgccg

SEQ ID NO: 4322 - DNA, 1106 bp, Homo sapiens
tccttcatagtggttatctgaacactgtaggatcgtgatggaaattgtcttttgattattaaggcctaggctcagactgtcccttaggaatctgtctgtgtgcatgttgcttctatggatttgcacattggaggatgcgtagaaaacatatttttttaaaaatcccactggcatttttaacatgccaggttgttttgtgttctgcaccaggttttcttcacaaaacctttctttttcaggaagcgttgtacataagtgaaagaaattatgtctgagctgtaatcactctttatattgattgttatactcacatgatcataaatattagccatgtttggtgctgtggagaaatgaaggccatcgaagacggcaatttggaggaaatggaagaggaagtacggcttaagaagcgaaaaagacgaagaaatgtggataaagatcctgcaaaagaagatgtggaaaaagctaagaagagaagaggccgccctcccgctgagaaactgtcaccaaatccccccaaactgacaaagcagatgaacgctatcatcgatactgtgataaactacaaagatagttcagggcgacagctcagtgaagtcttcattcagttaccttcaaggaaagaattaccagaatactatgaattaattaggaagccagtggatttcaaaaaaataaaggaaaggattcgtaatcataagtaccggagcctaggcgacctggagaaggatgtcatgcttctctgtcacaacgctcagacgttcaacctggagggatcccagatctatgaagactccatcgtcttacagtcagtgtttaagagtgcccggcagaaaattgccaaagaggaagagagtgaggatgaaagcaatgaagaggaggaagaggaagatgaagaagagtcagagtccgaggcaaaatcagtcaaggtgaaaattaagctcaataaaaaagatgacaaaggccgggacaaagggaaaggcaagaaaaggccaaatcgaggaaaagccaaacctgtagtgagcgattttgacagcgatgaggagcaggatgaacgtgaacagtcagaaggaagtgggacggatgatgagtgatcagtatggacc

SEQ ID NO: 4323 - DNA, 1593 bp, Homo sapiens
agcaaaaccctcggagtccgtggctgtgcagcttgggtgtcctgtgctcggcttaggggcacaggcttgcgggcggacctagggacggcggaggcatcgtgtccttcctgcaggaaggaaggagcttccggcgctttcctgggaggctcgctggggccgcggagataacctgaggtcctgcaacaggctgggggcccaaggaccatcccaggccttggaacagttggtatctttcagtcgccgccctggagaggcaggtgtttgacttcctgggctaccagtgggcgcccatcctggccaactttgtccacatcatcatcgtcatcctgggactcttcggcaccatccagtaccggctgcgctacgtcatggtgtacacgctgtgggcagccgtctgggtcacctggaacgtcttcatcatctgcttctacctggaagtcggtggcctcttacaggacagcgagctactgaccttcagcctctcccggcatcgctcctggtggcgtgagcgctggccaggctgtctgcatgaggaggtgccagcagtgggcctcggggccccccatggccaggccctggtgtcaggtgctggctgtgccctggagcccagctatgtggaggccctacacagtggcctgcagatcctgatcgcggtgagcgtggggaagggggcccccgggtggggatgggttgatgggggaggggacatggagctgggggctcatctccctgaggcggggccagctgacctggcctcaggcgtgtctctgccttcctcatcccccacccttgctggagaggttaaggtatcacgggtgggtcccatgtggctggcacctcagtgcctcctctgcaaaccacctcccccaggcggggccaacccaggcgctttctcaagttgagcgtggtgtttgctgtggggagtgggaaggactcggatcaggccgagataccccgcctctggctttgacggccccaaggaggaggggcatgcatcttcctgacaaacccatccatgcgtgtcccgcctgttccctcggctgccccgagcccatgccggtcacaggaagtggacagagcctgaggctgggctggcaagaagcccctcagccttgtcgggaaccctggcgtatgcacctggcaaggctggcaccacgtgacccaggtctgaccggacagggattctgtggccccgggtggcgctgaggagcagctgttgcttgtgcgggaacgggactctgccgtcctctccggccctgcacgggttggtagagaacaggggctacgatgctgctcctggtatggccacacggccacttccccgctgtgccgcctctgtgagcctaacaacctccgtgtgcctcagctcccgcctctgtaaaatgcagatggtgtcagtgccttcctcgaagtgctcagaaagaggcaaaagctgaggcgggtgtgtggagggtgctcggtcagcgtttcacctcaagagctccgggggcagggccaatgcgactgcagcacggctggtgccgtcgctggaggaacttctgaccgatctcgaggctccctggcttttcctggtgcgcacggtggtgtcgacgc

SEQ ID NO: 4324 - DNA, 1412 bp, Homo sapiens
agaacaagttaggctcctgttccttcacccacctttcttcttgtctagctccctactcctgtgagttagcatgtctgaagggtggggcagggagagtaggtccctggttctccaggtcccagggatccatgccttccagtatgtcatctatggaactgcctctttcttcttcctttatggggccctcctgctggctgagggcttctacaccaccggcgcagtcaggcagatctttggcgactacaagaccaccatctgcggcaagggcctgagcgcaacggtaacagggggccagaaggggaggggttccagaggccaacatcaagctcattctttggagcgggtgtgtcattgtttgggaaaatggctaggacatcccgacaagtttgtgggcatcacctatgccctgaccgttgtgtggctcctggtgtttgcctgctctgctgtgcctgtgtacatttacttcaacacctggaccacctgccagtctattgccttccccagcaagacctctgccagtataggcagtctctgtgctgatgccagaatgtatggtgttctcccatggaatgctttccctggcaaggtttgtggctccaaccttctgtccatctgcaaaacagctgagttccaaatgaccttccacctgtttattgctgcatttgtgggggctgcagctacactggtttccctgctcaccttcatgattgctgccacttacaactttgccgtccttaaactcatgggccgaggcaccaagttctgatcccccgtagaaatccccctttctctaatagcgaggctctaaccacacagcctacaatgctgcgtctcccatcttaactctttgcctttgccaccaactggccctcttcttacttgatgagtgtaacaagaaaggagagtcttgcagtgattaaggtctctctttggactctcccctcttatgtacctcttttagtcattttgcttcatagctggttcctgctagaaatgggaaatgcctaagaagatgacttcccaactgcaagtcacaaaggaatggaggctctaattgaattttcaagcatctcctgaggatcagaaagtaatttcttctcaaagggtacttccactgatggaaacaaagtggaaggaaagatgctcaggtacagagaaggaatgtctttggtcctcttgccatctataggggccaaatatattctctttggtgtacaaaatggaattcattctggtctctctattaccactgaagatagaagaaaaaagaatgtcagaaaaacaataagagcgtttgcccaaatctgcctattgcagctgggagaagggggtcaaagcaaggatctttcacccacagaaagagagcactgaccccgatggcgatggactactgaagccctaactcagccaac

SEQ ID NO: 4325 - DNA, 1613 bp, Homo sapiens
agcggaccgggagcgacgcagcttgagggaagcatccctagctgttggcgcagaggggcgaggctgaagccgagtggcccgaggtgtctgaggggctggggcaaaggtgaaagagtttcagaacaagcttcctggaacccatgacccatgaagtcttgtcgacatttataccgtctgagggtagcagctcgaaagtagaagtggagtgttgccagggacggcagtatctctttgtgtgaccctggcggcttatgggacgttggcttcagacctttgtgatacaccatgctgcgtgggacgatgacggcgtggagaggaatgaggcctgaggtcacactggcttgccccctcctagccacagcaggctgctttgctgacttgaacgaggtccctcaggtcaccgtccagcctgcgtccaccgtccagaagcccggaggcactgtgatcttgggctgcgtggtggaacctccaaggatgaatgtaacctggcgcctgaatggaaaggagctgaatggctcggatgatgctctgggtgtcctcatcacccacgggaccctcgtcatcactgcccttaacaaccacactgtgggacggtaccagtgtgtggcccggatgcctgcgggggctgtggccagcgtgccagccactgtgacactagccaatctccaggacttcaagttagatgtgcagcacgtgattgaagtggatgagggaaacacagcagtcattgcctgccacctgcctgagagccaccccaaagcccaggtccggtacagcgtcaaacaagagtggctggaggcctccagaggtaactacctgatcatgccctcagggaacctccagattgtgaatgccagccaggaggacgagggcatgtacaagtgtgcagcctacaacccagtgacccaggaagtgaaaacctccggctccagcgacaggctacgtgtgcgccgtaaggcccgggcccacctgctgggggatgggggatcactgatggaagggctcacaaagatggaaagggaggtagatacctggaggtgccacatccaagctccagttctgtgtgcactggctttggccagggggacagccaggggttctcagccagggattctctcccctctggccggcctcagggccagcatctcacagcacacagcaccaggcgactgcctgctgccacacctgcctgatgggaggtttccttcacggttactttgcgattgggatgggtcagaatgtgtgtgctgggacaggacggtgggtcttgtctcaagctcagcagcggacacagcatgtgcctagaacagatggccacgtgggaggcctccaggctgctgttctgccctatatgaggtccctgggcctgcactctctgcactgatgaggtgtgccctgcaccaccctctggtgagcttccgggaggcccgcatgctctcaatgcacaggaaaacagcagctacctttctgtgcgcttgcctggatccctgccaattcaaaggagtgacatcttacacggagttaggcttagagttggcaccagagatggaatcactgtgaagctaatgaagttaaacttccatcgtctttcactcactgacagaagcctcaca

SEQ ID NO: 4326 - DNA, 1104 bp, Homo sapiens
ggcctactgagtgtggggaaactcatttgtggagaccagccctctggcttggtgagtgaatctggtttacaccggctcctgccctgccttcactcttctcccctgattcaagactcctctgctttggactgaagcactgcaggagtttgtgaccaagaacttcaagagtcaagacagaaggaagccaagggagcagtgcaatggatttctcagtaaaggtagacatagagaaggaggtgacctgccccatctgcctggagctcctgagaagctggaagatgacatcagacaagagagaaccgcctggaaggcaggaggagacacctcctaagggataattagacaggaatctgggcaggaccctgggctctatcacaaggagaccccttcctctttgctgtgctagaattaacaagcatagaagtcatttgattaggtctcaatttaattccttccctgttggagtttaggggctggaaagtagacatatcataaatcaacactatatttggaagtgaaggcatggagggaaatatctgtgaaaacgcttcctatgaatcctgtgttccatttgtgtcatcaggtttgaggctccaatccttccagtaaacaccctggagaaagacccaggattccctgtttagggggtttcagtagggggatttttttgtttgtttgtttgtttgttttttgagacagagtctctctctgtcatccaggctggagtgtagtggcgcgatcttggctcactgcaacctctgcctccctggttcaaacgattctcctgcctcagcctcccgagtagctgggactacaggcatgtgccaccatgcccagctaattttttgtatttttagtagagatggggtttcatcatgttagccaggatggtctcaatctcctgaccttgtgatccacccatctcagcctcccaaagtgctgggattacaggcatgagccactgtgccaggccaggtagagggatttaagacacagaaaggcaaagttgttcaggacaggtgtctacaatccaagcctcacccaggcatcacattttgtctcagattaggcctcaataaaactgacttgagtgtattgctttgg

SEQ ID NO: 4327 - DNA, 1858 bp, Homo sapiens
attggcagctcttcacttgtatcttttcatatcaaaaatgggaggtgacacccagtttaaggaaaattccaaggcatttgtctcgactaatgtgaaagatgattacagtggccagaggactgccaaggctccttctcaagctgcttgagtcaatgagggtagacgcaccctctgaagatggtgactccctcctgagaagctggaccccttggtaaaagacaaggccttctccaagaagaatatgaaagtgttactcagacttatttgtttcatagctctactgatttcttctctggaggctgataaatgcaaggaacgtgaagaaaaaataattttagtgtcatctgcaaatgaaattgatgttcgtccctgtcctcttaacccaaatgaacacaaaggcactataactcggtataaagatgacagcaagacacctgtatctacagaacaagcctccaggattcatcaacacaaagagaaactttggtttgttcctgctaaggtggaggattcaggacattactattgcgtggtaagaaattcatcttactgcctcagaattaagataagtgcaaaatttgtggagaatgagcctaacttatgttataatgcacaagccatatttaagcagaaactacccgttgcaggagacggaggacttgtgtgcccttatatggagttttttaaaaatgaaaataatgagttacctaaattacagtggtataaggattgcaaacctctacttcttgacaatatacactttagtggagtcaaagataggctcatcgtgatgaatgtggctgaaaagcatagagggaactatacttgtcatgcatcctacacatacttgggcaagcaatatcctattacccgggtaatagaatttattactctagaggaaaacaaacccacaaggcctgtgattgtgagcccagctaatgagacaatggaagtagacttgggatcccagatacaattgatctgtaatgtcaccggccagttgagtgacattgcttactggaagtggaatgggtcagtaattgatgaagatgacccagtgctaggggaagactattacagtgtggaaaatcctgcaaacaaaagaaggagtaccctcatcacagtgcttaatatatcggaaattgaaagtagattttataaacatccatttacctgttttgccaagaatacacatggtatagatgcagcatatatccagttaatatatccagtcactaatttccagaagcacatgattggtatatgtgtcacgttgacagtcataattgtgtgttctgttttcatctataaaatcttcaagattgacattgtgctttggtacagggattcctgctatgattttctcccaataaaagtcttgcctgaggtcttggaaaaacagtgtggatataagctgttcatttatggaagggatgactacgttggggaagacattgttgaggtcattaatgaaaacgtaaagaaaagcagaagactgattatcattttagtcagagaaacatcaggcttcagctggctgggtggttcatctgaagagcaaatagccatgtataatgctcttgttcaggatggaattaaagttgtcctgcttgagctggagaaaatccaagactatgagaaaatgccagaatcgattaaattcattaagcagaaacatggggctatccgctggtcaggggactttacacagggaccacagtctgcaaagacaaggttctggaagaatgtcaggtaccacatgccagtccagcgacggtcaccttcatctaaacaccagttactgtcaccagccactaaggagaaactgcaaagagaggctcacgtgcctctcgggtag

SEQ ID NO: 4328 - DNA, 1296 bp, Homo sapiens
atgtaaaataagtttctttgttttgctgatagtctagttctccaaagagctttttcaatctttatcaatctttaaagttaaatagctttcctaatagtcctttgaaaggatgattgtatttatatgttaatgaagctcaggtacctgacaatgatgagcagtttgtaccagactatcaggctgaaagtttggcttttcatggcctgccactgaaaatcaagaaagaaccccacagtccatgttcagaaatcggctctgcctgcagtcaagaacagccctttaaattcagctatggagaaaagtgcctgtacaatgtcagtgcctatgatcagaagccacaagtgggaatgaggccctccaacccccccacaccatccagcacgccagtgtccccactgcatcatgcatctccaaactcaactcatacaccgaaacctgaccgggccttcccagctcacctccctccatcgcagtccataccagatagcagctaccccatggaccacagatttcgccgccagctttctgaaccctgtaactcctttcctcctttgccgacgatgccaagggaaggacgtcctatgtaccaacgccagatgtctgagccaaacatccccttcccaccacaaggctttaagcaggagtaccacgacccagtgtatgaacacaacaccatggttggcagtgcggccagccaaagctttccccctcctctgatgattaaacaggaacccagagattttgcatatgactcagaagtgcctagctgccactccatttatatgaggcaagaaggcttcctggctcatcccagcagaacagaaggctgtatgtttgaaaagggccccaggcagttttatgatgacacctgtgttgtcccagaaaaattcgatggagacatcaaacaagagccaggaatgtatcgggaaggacccacataccaacggcgaggatcacttcagctctggcagtttttggtagctcttctggatgacccttcaaattctcattttattgcctggactggtcgaggcatggaatttaaactgattgagcctgaagaggttagtttaatagattttaattaggacactcagacatgttataacataaagaaactgacacatttgattaatataccaaaaatgtattcttaatcatttcaagactttagggaaactttctgaattaaaaagcatgcaaagataaaacatgtctacctttaaaatcaccaatgtattgcgtgttccttccggttgtatacaatcctacaaaattgatgttggagaaaattaa

SEQ ID NO: 4329 - DNA, 1175 bp, Homo sapiens
agattcacactgaatttccatcatggagctggtccttgaggcgggcccagggcatgggaaaggagggagggagggttgggagctcttggtgcctgcttaaagagacagcatcaggatcaacacagtcccttgatgaacctggatctgtgcttgttagagtgctgtgcaagatgtctggtaggggccccctttgcttccctggtggccactggattgtgtttctttggggtggcactgttctgtggctgtggacatgaagccctcactggcacagaaaagctaattgagacctatttctccaaaaactaccaagactatgagtatctcatcaatgtgatccatgccttccagtatgtcatctatggaactgcctctttcttcttcctttatggggccctcctgctggctgagggcttctacaccaccggcgcagtcaggcagatctttggcgactacaagaccaccatctgcggcaagggcctgagcgcaacggtaacagggggccagaaggggaggggttccagaggccaacatcaagctcattctttggagcgggtgtgtcattgtttgggaaaatggctaggacatcccgacaaggtgatcatcctcaggattttgtggcaataacaaggggtgggggaaaattgggcgcgagtctgtggcctcgtccccacccaaggctgggtcctctctaggggcctggcatttgagtgaggaagcgatggctgcagccgaacgagaaggtcaggaagaacgtggtgcccagctggcttagcctcacctttcaaaggttccctaagcaaatttcttctcaaaacagaaagcatgagttttgtgggatgctttgtacaatcagaccatttctaagccatctgttggtatccctttgttcccttcctagtaggtaccacaagagtggatctaactggacaagagtctaaaatgctgctcatgtgattgagacttgggcacctgatctgagagggaggatggataataaaaattaaataattaactccaaggtgaaatttacaatgttctgggatcctgcacagttcgaggtcccagagggaattggagtagatctgcatgttgaatgttttattgcctgagggttatccatgctttgagtgaggtacacatttgttttcagtctctggagttaaagatccttt

SEQ ID NO: 4330 - DNA, 5239 bp, Homo sapiens; identical to SEQ ID NO: 1776

SEQ ID NO: 4331 - DNA, 16114 bp, Homo sapiens; identical to SEQ ID NO: 206

SEQ ID NO: 4332 - DNA, 6945 bp, Homo sapiens; identical to SEQ ID NO: 127

SEQ ID NO: 4333 - DNA, 3980 bp, Homo sapiens; identical to SEQ ID NO: 675

SEQ ID NO: 4334 - DNA, 3775 bp, Homo sapiens
ctgacttccgtttccgggggcggcttccggcggcgtgacctgaccgcaagaggccaatggagtgtgggagctgaaagggtcttcgctggcggccggacagtactgcttttaaagagacagtgttagggatcttggaagcacagccaacatgtgtgacattgaagaagccactaaccaactcctagatgtgaaccttcatgagaaccagaagtctgtacaagtgacagaaagtgacctcggaagtgaatctgagcttctagtcactattggagccactgtacctactggctttgagcaaacagctgcagatgaagtcagagagaaacttgggtcatcatgcaaaatcagcagagaccgtggcaagatatattttgtcatttcagtggaaagtctggcacaggttcattgtctgagatcagttgataacttatttgtggtggttcaggagtttcaagattaccagttcaaacaaacaaaggaagaagttctaaaggattttgaagacttggctggaaaactcccatggtcaaaccccttaaaagtgtggaaaattaatgccagttttaaaaagaaaaaagcaaagcgcaaaaagataaatcagaattcaagtaaagagaagattaataatggacaagaagtcaaaatcgatcagagaaatgttaaaaaagagttcactagccatgctttagattctcatatcttagattattatgaaaatccagccatcaaagaggatgtatcaacattaataggtgatgatttggcatcttgcaaagatgagactgatgaaagctcaaaagaagaaactgagcctcaagtgctgaagtttagagtcacatgcaacagggcaggagagaaacattgctttacctcaaatgaggctgcaagagattttgggggtgctgttcaagattattttaagtggaaggccgacatgaccaactttgatgtggaggttcttttgaacatccatgataatgaagtcattgtgggcattgcattgactgaagagagtctccaccgaagaaatataacacattttggacctacaactcttagatcaactcttgcctatgggatgctcaggctctgtgatcctctaccttatgatataatagtcgatccaatgtgtggaactggggcaataccaatagagggggccactgaatggtctgactgtttccatattgctggtgataataatccactggctgtgaatagagcagcaaataacattgcatctttattgaccaagagccaaattaaagaaggcaaaccctcctggggcttgcccatagatgctgttcagtgggatatctgcaatctgccattgagaactggctctgtggatattattgtaacagatttgccatttggaaaaaggatgggatccaagaagagaaactggaacctttatccagcttgcctacgggagatgagccgtgtctgcacacctaccacaggccgagctgtactacttactcaagacacaaaatgctttaccaaggcgttatctggaatgcgacacgtatggcgaaaggtggatacagtctgggtgaacgttggtggtcttcgtgctgcagtttacgttctgatacgtacacctcaagcttttgttcatccttcagaacaagacggagaaagaggaactctttggcaatgcaaagaatgaagatgactaatagtacttgtacttcccaccactggaaatgttagcataaaagaacttggagaggaaaaaagtattaacaaaactgcagtctgcactctttaaacctgtttaaggctcttcatcctggttagcaaaaggtgtgaatgtaatgtgatggaatttaaaagttttatgagaccaggcacagtggctcacgactgtaattccagcagtttaggaagccgaagtgtgcagatcacctgaggtccggagaccagcctggccaacatggtgaaaccctgtctctactagaaatacaaaaattagccaggtgtggtggcgggcgcctgtaatcccaactactcaggaggctgaggctagagaatcacttgaacccagcaggcggaggttgcggtgagtcgagatcacgccattgcactccagcctgtgcgacaagagcgaaactctgtctcaaaaagattttataagaaagcagagcttttccttgaagctcttttgaagtggtagcttaattagtattttgttgaaaatactttaaagatgcctagtgaaaagcctactaaagtgctgtgagattggggtttagaacattttattttcaggctttatggcctattttccattgtgtcaagtgcaaaactaccctggcccaaaggaagggcagagaacataattacatcttaggccacatttcattctttgcagctttgctaatccagttgctcaagttctttacctcaacctgaaggaatgaagcattattacattttgtgaatggtgttcagcctataagacgaagtctcacaagacctataggaaagtttaccatctgccttaaatattaaaatatccatctgttattcacattaatacacagaatgaaaatagaggtctaggaattatcaaaggtactgcaaaaatactgtatagaacttatttgtaaatagcacatacattgatagatggggtgtgggaccaacaaaccaaattaaaagaaattgtttttctttcagtacactaaggtgtgtgttttcaaaaccaaacacaaacctgtcaagagtatttgttggctagtttcttaaaaggccaagagaaaaaaaatgatatatctttggaaaacttttaatttgggagttatgtgagttgttactttctcctggatcacgattcacatttaattgcttttccagttgcaacaagtccttcttgagagttttgtggaaaatggtgcttccctggaacaaagagtagttgaggtttttttgtggaactcatcatagtattgtttattttggagcctctggctgcaatcagtatagattttcagtatcctattagtattataatagtactcctcttaatactttctgatgtctccattgagaataaaaggacacaatacttttgaaagaagagttcacattagcagcacagccagcaatcctcatctggtttctctgatctcctaccccacacttcataatgaatgggaaataagatgtttatgaaggttttatatcctagactggcctttttaccactatcagaattcacagctgctttgtttatgggccgaacacaaaacttttcacctgatgggagaaaccatttaaacctcaaattaagcaacccacagaaccaggaagttcaaggaccatgtctgttttcaccacgatgtctttccccacccccccaccccccactccaccccccactaagggcagggtattgtatctgccagactgggtatttgttgaacaagcgagtattttcgcctattagcttagtttttaaggaaatcattttttacttgattcatcatagctttaattctattacatactacaataaaaatttgacaagactgatacaaatatgtagtgggcaatagtttgccgtcttcttccctagtatggtgtttttcaatctggtgactagaataggcagtgggctataagcaggattcataaggcctggagctgagttatatgtgacactgccacctattcattgtgtgaccttggttttaaccttcaaagtgggtctcctggactaaaagaatgtgaaaagatggggaaataaatctgtaatctgaacatggaa

SEQ ID NO: 4335 - DNA, 4345 bp, Homo sapiens
cggatgcctcgcgggccggtggctatggaggcggcggcggttgatggttgaccgttggctccggggtgggggtcgccgttcgagtgatctgctcagacccgaccagagggcgcgggctgctgatgcttggcttggagcccgtgggggagacctagttcggctccgccatgccggccgccgggagtaacgagccggacggcgtcctcagctatcagagaccagatgaagaagctgtggtggatcagggtgggaccagtacaattctcaacattcactatgaaaaagaagagctggaaggtcacagaactctgtatgtgggagttcggatgccgcttggccggcagagccatcggcatcaccgcactcatggccagaagcaccggagacgagggcggggcaaaggagccagccagggggaggaaggcctggaagccctggcccacgacacaccatctcagcgtgttcagttcattcttggcaccgaggaagatgaagagcatgtgcctcatgagctgtttacagagctggatgagatctgtatgaaagagggagaagatgctgagtggaaggaaacagccaggtggctgaagtttgaagaagatgttgaagatgggggagaacgctggagcaagccttatgtggcaaccctttcattgcacagcctgtttgagctaaggagctgccttattaatggaacagtcctcctggatatgcatgcaaatagcatagaagaaatttcagacctgatcctggatcagcaagaactgtccagtgacctgaatgacagcatgagggttaaagtgcgggaagcccttctcaaaaagcatcatcatcagaatgaaaagaagagaaacaacctcattcccattgttcgctcctttgctgaggttggcaagaagcagtctgatcctcatttgatggataaacatggtcaaaccgtgtctcctcagtctgttccaactacaaatcttgaagtaaaaaatggagtgaattgtgaacatagtcctgtggatttaagcaaggtagaccttcatttcatgaaaaaaattcctactggggccgaggcctccaatgtcctggttggagaggtggatattttggaccgtcccattgttgcctttgtgaggctgtctccagctgttcttctctcaggcctaacagaagtgccaatcccaacaagatttttgtttatcttattgggtccagtagggaaaggtcagcagtaccatgagattggcagatccatggccaccatcatgacagatgagatttttcatgacgtagcatataaggcaaaagagcgagatgatctcctggcggggattgatgagttcctagaccaggtgacggtgctccctccaggagagtgggatccctccattagaattgagccacccaaaaatgtcccttcccaggagaaaaggaaaatgcctggagttccaaatggaaatgtttgccacatagaacaggaaccacatgggggtcacagtgggccagaacttcagcgcactgggcggctatttgggggcttggtgctggacatcaagcggaaggccccctggtactggagcgactaccgagatgcactcagcttacagtgtttggcttcctttctgttcctgtactgtgcctgcatgtcacctgtcatcacctttgggggactgcttggagaagccactgagggacgcataagtgcaattgaatccttgtttggagcttccatgactgggattgcttattccttgtttgcgggacaggctctcaccatcctgggaagtactggaccagtgcttgtgtttgaaaagattttgttcaaattctgcaaagactatgctctttcatacctctccctgcgagcttgtattggactgtggaccgctttcctgtgtattgtccttgtggcaactgatgccagttcccttgtctgctacattacccgtttcactgaagaagcatttgcctccctaatttgcattattttcatctatgaagcaatagaaaaactgattcacctggcagagacctaccccatccacatgcacagccagctggaccaccttagcctctattactgcaggtgtactctgccagagaatccaaacaatcacaccctccagtactggaaggaccacaacatcgtgacagcagaagtccactgggctaacctgactgtcagtgaatgccaggagatgcatggagagttcatgggatctgcgtgcggccatcatggaccctacactcctgatgtcctcttttggtcctgtattctctttttcaccaccttcatcctctcaagcaccttaaagacgtttaagacgagccgttatttcccaaccagagtacgctccatggtgagtgactttgctgttttcctcactatcttcacaatggtgattattgattttttgattggagtcccatcaccaaagcttcaagttcccagtgtgttcaagccaacaagggatgatcgcggatggattattaatcccattggccccaatccctggtggactgtgatagctgcaattatcccagctcttctctgtactatcttgatattcatggatcagcagatcacagccgtcattattaacaggaaggaacataagctcaagaaaggctgtggctaccacctggacctactgatggtggccatcatgctgggtgtctgctccatcatgggcctgccctggtttgtagctgcaactgtcttgtccatcacacatgtgaacagcctcaagctagaatctgaatgctctgctcctggagaacagcccaagttcctgggcatccgagaacagagagtgacaggccttatgatctttgtgctgatgggctgctcagtcttcatgacggctatcttaaagtttattccaatgccagtactctacggagttttcctttacatgggagtttcttcactacagggaattcagttctttgatcgtctaaagctctttgggatgcccgcaaagcaccagccagatttcatctacctgcggcatgtgccgctgcgcaaagtgcacctcttcaccctcatccagttgacctgtctcgtcctgctctgggtcatcaaggcatctccagctgccattgttttcccaatgatggttttggccttggtctttgtcaggaaagtcatggatctctgtttctctaagcgagagctgagctggctagatgatctcatgcctgaaagcaaaaagaagaagttggatgatgccaaaaagaaggccaaggaggaagaggaggctgagaaaatgttagaaattgggggagacaagtttcccttagagagcaggaagttactaagtagtcctggaaagaacatcagttgcagatgtgacccctctgagattaatatatctgatgaaatgcctaaaactacagtttggaaagctctcagtatgaattctggaaatgcaaaggaaaagagtctcttcaactaagagtctttgctgggatggaagatttgggccgtgtggtgcctcagggaagttctggttacagagaaaatggcgagtctctcagagaagaagcaagaccaagtctggccctgtccttggtcatctcaaagccatgccgaagcattcagttattcttggtgtgcattggaaggcatccagctatccccataccagcagccagtcaccagatgtgaatgtggaagcagaagaccacctcctgttggttcttctcctcttccttctttttctctttagaacggccaccattgaagacctagcttcccattttccagacgttttctctgaaattctctgctggcctgccaagccatatggattcattctgccactgaggagtccttcagtgaggtccctcttcctaaaggacagagtggggagtaggaggggaacagagaggacatcctctctggctctccagtgctcttagtgtctacaggctcctaggcagccctgggccttggtttgattacctcccctgggggatgctggtcagacccagaggttgtcaggaggtcagctaccaggaagatccatgatctgggcattggcagtgcctgccaccacagccaggaagatgcctctgacctgggtgcatctccatcactccttagcagcagcctgcataactggcaagaatcttggatgatacaagagccaagaagggacatttgagttgtgtcgcttagataggaaagggatccagggaaaatcaacagtaagtgaggatgagcagcgtctcttggttttcattgaggatagagtaagagattgagtttagattgcaacagaaggaattagtttagataccaggaagaacttcctagcctgaagatttgtcatagtgtctgctttctaga

SEQ ID NO: 4336 - DNA, 5825 bp, Homo sapiens
cgcccaggcccgcagcgcggcgctgcagcgcgaggggcggagaggcagagagcccgaaaggaccagacgcccaggtcgcccgcatcccgctgccgcaggagagagacagcgcgccccggccctgctccccaggcttcgcccgggcgccctcaactctgtccccagagactgagcacctgtcctccgcctcggcctctgctgagagccctctcctctggagcacacaccacccctgcagcccaagaagagtcccagccccacgccggctaccaccatggcggagaccaacaacgaatgtagcatcaaggtgctctgccgattccggcccctgaaccaggctgagattctgcggggagacaagttcatccccattttccaaggggacgacagcgtcgttattggggggaagccatatgtttttgaccgtgtattccccccaaacacgactcaagagcaagtttatcatgcatgtgccatgcagattgtcaaagatgtccttgctggctacaatggcaccatttttgcttatggacagacatcctcagggaaaacacataccatggagggaaagctgcacgaccctcagctgatgggaatcattcctcgaattgcccgagacatcttcaaccacatctactccatggatgagaaccttgagttccacatcaaggtttcttactttgaaatttacctggacaaaattcgtgaccttctggatgtgaccaagacaaatctgtccgtgcacgaggacaagaaccgggtgccatttgtcaagggttgtactgaacgctttgtgtccagcccggaggagattctggatgtgattgatgaagggaaatcaaatcgtcatgtggctgtcaccaacatgaatgaacacagctctcggagccacagcatcttcctcatcaacatcaagcaggagaacatggaaacggagcagaagctcagtgggaagctgtatctggtggacctggcagggagtgagaaggtcagcaagactggagcagagggagccgtgctggacgaggcaaagaatatcaacaagtcactgtcagctctgggcaatgtgatctccgcactggctgagggcactaaaagctatgttccatatcgtgacagcaaaatgacaaggattctccaggactctctcgggggaaactgccggacgactatgttcatctgttgctcaccatccagttataatgatgcagagaccaagtccaccctgatgtttgggcagcgggcaaagaccattaagaacactgcctcagtaaatttggagttgactgctgagcagtggaagaagaaatatgagaaggagaaggagaagacaaaggcccagaaggagacgattgcgaagctggaggctgagctgagccggtggcgcaatggagagaatgtgcctgagacagagcgcctggctggggaggaggcagccctgggagccgagctctgtgaggagacccctgtgaatgacaactcatccatcgtggtgcgcatcgcgcccgaggagcggcagaaatacgaggaggagatccgccgtctctataagcagcttgacgacaaggatgatgaaatcaaccaacaaagccaactcatagagaagctcaagcagcaaatgctggaccaggaagagctgctggtgtccacccgaggagacaacgagaaggtccagcgggagctgagccacctgcaatcagagaacgatgccgctaaggatgaggtgaaggaagtgctgcaggtcctggaggagctggctgtgaactatgaccagaagtcccaggaggtggaggagaagagccagcagaaccagcttctggtggatgagctgtctcagaaggtggccaccatgctgtccctggagtctgagttgcagcggctacaggaggtcagtggacaccagcgaaaacgaattgctgaggtgctgaacgggctgatgaaggatctgagcgagttcagtgtcattgtgggcaacggggagattaagctgccagtggagatcagtggggccatcgaggaggagttcactgtggcccgactctacatcagcaaaatcaaatcagaagtcaagtctgtggtcaagcggtgccggcagctggagaacctccaggtggagtgtcaccgcaagatggaagtgaccgggcgggagctctcatcctgccagctcctcatctctcagcatgaggccaagatccgctcgcttacggaatacatgcagagcgtggagctaaagaagcggcacctggaagagtcctatgactccttgagcgatgagctggccaagctccaggcccaggaaactgtgcatgaagtggccctgaaggacaaggagcctgacactcaggatgcagatgaagtgaagaaggctctggagctgcagatggagagtcaccgggaggcccatcaccggcagctggcccggctccgggacgagatcaacgagaagcagaagaccattgatgagctcaaagacctaaatcagaagctccagttagagctagagaagcttcaggctgactacgagaagctgaagagcgaagaacacgagaagagcaccaagctgcaggagctgacatttctgtacgagcgacatgagcagtccaagcaggacctcaagggtctggaggagacagttgcccgggaactccagaccctccacaaccttcgcaagctgttcgttcaagacgtcacgactcgagtcaagaaaagtgcagaaatggagcccgaagacagtggggggattcactcccaaaagcagaagatttcctttcttgagaacaacctggaacagcttacaaaggttcacaaacagctggtacgtgacaatgcagatctgcgttgtgagcttcctaaattggaaaaacgacttagggctacggctgagagagttaaggccctggagggtgcactgaaggaggccaaggagggcgccatgaaggacaagcgccggtaccagcaggaggtggaccgcatcaaggaggccgttcgctacaagagctcgggcaaacggggccattctgcccagattgccaaacccgtccggcctggccactacccagcatcctcacccaccaacccctatggcacccggagccctgagtgcatcagttacaccaacagcctcttccagaactaccagaatctctacctgcaggccacacccagctccacctcagatatgtactttgcaaactcctgtaccagcagtggagccacatcttctggcggccccttggcttcctaccagaaggccaacatggacaatggaaatgccacagatatcaatgacaataggagtgacctgccgtgtggctatgaggctgaggaccaggccaagcttttccctctccaccaagagacagcagccagctaatctcccacacccacggctgcatacctgcactttcagtttctaagagggactgaggcctcttctcagcatgctgcaaacctgtggtctctgatactaactccctccccaacccctgttgttggactgtactatgtttgatgtcttctcttacttactctgtatctctttgtactctgtatctatatatcaaaagctgctgctatgtctctcttctgtcttattctcaagtatctactgatgtatttagcaatttcaaagcatagtctaccttccttatttggggcaatagggaggagggtgaatgtttcttctttctcatctactcgtctcacactgagtggtgttagtcactgagtagaggtcacagagatgacaaaaggaaaaatgggagctagagggttgtgacccttcatacacacacgcacgcacgcacacaaacatgcacacacgcatgcacacacacaaagccttaagcagaagaatgtcttagcatcatgagacagagaaatagactcttcctccctcctctttcacatatagcacaggggaaggtaaaatggaagggctgctaattgagacatataattttcttcatacacccctcaccttaatcaaaggattcaggtgttacttctgccctacaaagtctgccttttgcctccctcttcctgttttcccctggactgagaaatgggttgctcaagggaccatttccctttttcttcaagctccttttgatattccctgccccagagctcatgaccagaacccagagctgatttaaaatattttgaaaaatggaggaggcagactgctcccagcagcctgtcaatggctgctcatctgtccatggagatggttacaggcaggtgtagtcaaaatgattgattccttgggtttgggggtgaataggctgggaaatttctgagccttttttttttttgtcacagtgccctcaagttgaagtgatgagctggatttctttcttgttccatactgggcggcatgctcctcccatctccaccccttggtttgggggcttccagctcattggcaaaatctctctagttgccttcctttcaagctggagcctgacttttccccaatgtacattttttttttctccacaaagagttccttctctaatgtccccatctggtattaagtgcactttaaagaaaggggcagggtggattttcaagaggtgggaagctctaaggcttgaccgtgaggggtcttctcccagccattctcagcccatatgcagcaccctccatactgaagaggactgttgttttagtttcagacggtcctttccttccacatggtgctaaggtggttttctaggtaactgcagggatggaggtcactagccattccaaaccaggagagaaagtctggtgtcctgatatccagtcttttctaggaggaagaccaagattctccagcggcagggcagcctatcacccaacttctaagtcaggaaaggaagctgagtgggaatgccagctggtaagcgcaggctgcactggcccatgactccttcaaggaaaagaggccctgctccctttacctgctgagctccttttagcagttagggagaactgcagggggaaaaataccagtggagtgtggaataaatccaaagcagtgatttttaaatgtttttcaaaaacaaatcttacatagaaccccaatataaaaaataaagtaatgcagacctgggcagtttgcattttttttttttttttttttggtggaagaagtctcggcgtctcttaggactgactgttcaaaggctcctcagcaaatgagcccttgaacagtcctaagagaccctgaggattctgtggagtagtttgaaaaccattgttctgaggaagggggtccaatctggctcctctgcactaaagctgcaactcatggaaaagagggcaacggtggggtagacaagccatgctgtctccagacccactagggtggaaggaaggttcctgtgggcctgtggacttaggctaatatttgctgtcagcagggcacttaagaatccagggggttttatgtaatgttgccaccacatggttcttttaaaaacacataaggaaatgtgagggtgtagcgcagatgaggagagagatgacacagagggagcagccttctctttagcaagatgtaagggaaatataattcacttacataaaaaagaaacaacacacacgcaaacccttcaccagaagcttcacactacatcctcctcctcctcctgctccccaccttcaccgcatccctttcagagccagggtcactgcaaggggcacctggcctgcccactcacatctgccaaaatgttgcatgccagcgtggaagacaaaccaaactgcgcaaccccctgtgtgtatttacttggtgtacatagataactttaaaataaaataaattcaatgataactct

SEQ ID NO: 4337 - DNA, 2080 bp, Homo sapiens; identical to SEQ ID NO: 816

SEQ ID NO: 4338 - DNA, 3687 bp, Homo sapiens; identical to SEQ ID NO: 1581

SEQ ID NO: 4339 - DNA, 2551 bp, Homo sapiens; identical to SEQ ID NO: 1454

SEQ ID NO: 4340 - DNA, 1796 bp, Homo sapiens; identical to SEQ ID NO: 234

SEQ ID NO: 4341 - DNA, 3979 bp, Homo sapiens; identical to SEQ ID NO: 1756

SEQ ID NO: 4342 - DNA, 5288 bp, Homo sapiens; identical to SEQ ID NO: 1514

SEQ ID NO: 4343 - DNA, 4068 bp, Homo sapiens; identical to SEQ ID NO: 1424

SEQ ID NO: 4344 - DNA, 5270 bp, Homo sapiens; identical to SEQ ID NO: 564

SEQ ID NO: 4345 - DNA, 5267 bp, Homo sapiens
aaagtgattgattcggatactgacactgtaggatctggggagagaggaacaaaggaccgtgaaagctgctctgtaaaagctgacacagccctcccaagtgagcaggactgttcttcccactgcaatctgacagtttactgcatgcctggagagaacacagcagtaaaaaccaggtttgctactggaaaaagaggaaagagaagactttcattgacggacccagccatggcagcgtagcagccctgcgttttagacggcagcagctcgggactctggacgtgtgtttgccctcaagtttgctaagctgctggtttattactgaagaaagaatgtggcagattgttttctttactctgagctgtgatcttgtcttggccgcagcctataacaactttcggaagagcatggacagcataggaaagaagcaatatcaggtccagcatgggtcctgcagctacactttcctcctgccagagatggacaactgccgctcttcctccagcccctacgtgtccaatgctgtgcagagggacgcgccgctcgaatacgatgactcggtgcagaggctgcaagtgctggagaacatcatggaaaacaacactcagtggctaatgaagcttgagaattatatccaggacaacatgaagaaagaaatggtagagatacagcagaatgcagtacagaaccagacggctgtgatgatagaaatagggacaaacctgttgaaccaaacagcggagcaaacgcggaagttaactgatgtggaagcccaagtattaaatcagaccacgagacttgaacttcagctcttggaacactccctctcgacaaacaaattggaaaaacagattttggaccagaccagtgaaataaacaaattgcaagataagaacagtttcctagaaaagaaggtgctagctatggaagacaagcacatcatccaactacagtcaataaaagaagagaaagatcagctacaggtgttagtatccaagcaaaattccatcattgaagaactagaaaaaaaaatagtgactgccacggtgaataattcagttcttcagaagcagcaacatgatctcatggagacagttaataacttactgactatgatgtccacatcaaactctaaggaccccactgttgctaaagaagaacaaatcagcttcagagactgtgctgaagtattcaaatcaggacacaccacgaatggcatctacacgttaacattccctaattctacagaagagatcaaggcctactgtgacatggaagctggaggaggcgggtggacaattattcagcgacgtgaggatggcagcgttgattttcagaggacttggaaagaatataaagtgggatttggtaacccttcaggagaatattggctgggaaatgagtttgtttcgcaactgactaatcagcaacgctatgtgcttaaaatacaccttaaagactgggaagggaatgaggcttactcattgtatgaacatttctatctctcaagtgaagaactcaattataggattcaccttaaaggacttacagggacagccggcaaaataagcagcatcagccaaccaggaaatgattttagcacaaaggatggagacaacgacaaatgtatttgcaaatgttcacaaatgctaacaggaggctggtggtttgatgcatgtggtccttccaacttgaacggaatgtactatccacagaggcagaacacaaataagttcaacggcattaaatggtactactggaaaggctcaggctattcgctcaaggccacaaccatgatgatccgaccagcagatttctaaacatcccagtccacctgaggaactgtctcgaactattttcaaagacttaagcccagtgcactgaaagtcacggctgcgcactgtgtcctcttccaccacagagggcgtgtgctcggtgctgacgggacccacatgctccagattagagcctgtaaactttatcacttaaacttgcatcacttaacggaccaaagcaagaccctaaacatccataattgtgattagacagaacacctatgcaaagatgaacccgaggctgagaatcagactgacagtttacagacgctgctgtcacaaccaagaatgttatgtgcaagtttatcagtaaataactggaaaacagaacacttatgttatacaatacagatcatcttggaactgcattcttctgagcactgtttatacactgtgtaaatacccatatgtcctgaattcaccatcactatcacaattaaaaggaagaaaaaaactctctaagccataaaaagacatattcagggatattctgagaaggggttactagaagtttaatatttggaaaaacagttagtgcatttttactccatctcttaggtgctttaaatttttatttcaaaaacagcgtatttacatttatgttgacagcttagttataagttaatgctcaaatacgtatttcaaatttatatggtagaaacttccagaatctctgaaattatcaacagaaacgtgccattttagtttatatgcagaccgtactatttttttctgcctgattgttaaatatgaaggtatttttagtaattaaatataacttattaggggatatgcctatgtttaacttttatgataatatttacaattttataatttgtttccaaaagacctaattgtgccttgtgataaggaaacttcttacttttaatgatgaggaaaattatacatttcattctatgacaaagaaactttactatcttctcactattctaaaacagaggtctgttttctttcctagtaagatatatttttatagaactagactacaatttaatttctggttgagaaaagccttctatttaagaaatttacaaagctatatgtctcaagattcacccttaaatttacttaaggaaaaaaataattgacactagtaagtttttttatgtcaatcagcaaactgaaaaaaaaaaaagggtttcaaagtgcaaaaacaaaatctgatgttcataatatatttaaatatttaccaaaaatttgagaacacagggctgggcgcagtggctcacacctataatcccagtacattggtaggcaaggtgggcagatcacctgaggtcaggagttcaagaccagcctggacaacatggtgaaaccctgtctctactaaataatacaaaaattagccaggcgtgctggcgggcacctgtaatcccagctactcgggaggctgaggcagggagaattgcttgcaccagggaggtagaggttgcagtgagccaagatcgcaccactgcactccagccggggcaacagagcaagactccatctcaaaaaaaaaaaaaaaaaaagaaagaaaagaaaatttgagaacacagctttatactcgggactacaaaaccataaactcctggagttttaactccttttgaaattttcatagtacaattaatactaatgaacatttgtgtaaagctttataatttaaaggcaatttctcatatattcttttctgaatcatttgcaaggaagttcagagtccagtctgtaactagcatctactatatgtctgtcttcaccttacagtgttctaccattattttttctttattccatttcaaaatctaatttattttaccccaacttctccccaccacttgacgtagttttagaacacacaggtgttgctacatatttggagtcaatgatggactctggcaaagtcaaggctctgttttatttccaccaaggtgcacttttccaacaactatttaactagttaagaacctccctatcttagaactgtatctactttatatttaagaaggttttatgaattcaacaacggtatcatggccttgtatcaagttgaaaaacaactgaaaataagaaaatttcacagcctcgaaagacaacaacaagtttctaggatatctcaatgacaagagtgatggatacttaggtagggaaacgctaatgcaggaaaaactggcaacaacacaatttatatcaattctctttgtaggcaggtgataaaaaattcaaggacaaatctcattatgtcattgtgcatcatatataatctcttatgagcgagaatggggggaatttgtgtttttactttacacttcaattccttacacggtatttcaaacaaacagttttgctgagaggagcttttgtctctccttaagaaaatgtttataaagctgaaaggaaatcaaacagtaatcttaaaaatgaaaacaaaacaacccaacaacctagataactacagtgatcagggagcacagttcaactccttgttatgttttagtcatatggcctactcaaacagctaaataacaacaccagtggcagataaaaatcaccatttatctttcagctattaatcttttgaatgaataaactgtgacaaacaaattaacatttttgaacatgaaaggcaacttctgcacaatcctgtatccaagcaaactttaaattatccacttaattattacttaatcttaaaaaaaattagaacccagaacttttcaatgaagcatttgaaagttgaagtggaatttaggaaagccataaaaatataaatactgttatcacagcaccagcaagccataatctttatacctatcagttctatttctattaacagtaaaaacattaagcaagatataagactacctgcccaagaattcagtcttttttcatttttgtttttctcagttctgaggatgttaatcgtcaaattttctttggactgcattcctcactactttttgcacaatggtctcacgttctcacatttgttctcgcgaataaattgataaaaggtgttaagttctgtgaatgtctttttaattatgggcataattgtgcttgactggataaaaacttaagtccacccttatgtttataataatttcttgagaacagcaaactgcatttaccatcgtaaaacaacatctgacttacgggagctgcagggaagtggtgagacagttcgaacggctcctcagaaatccagtgacccaattctaaagaccatagcacctgcaagtgacacaacaagcagatttattatacatttattagccttagcaggcaataaaccaagaatcactttgaagacacagcaaaaagtgatacactccgcagatctgaaatagatgtgttctcagacaacaaagtcccttcagaatcttcatgttgcataaatgttatgaatattaataaaaagttgattgagaaaaa

SEQ ID NO: 4346 - DNA, 5114 bp, Homo sapiens
aaagtgattgattcggatactgacactgtaggatctggggagagaggaacaaaggaccgtgaaagctgctctgtaaaagctgacacagccctcccaagtgagcaggactgttcttcccactgcaatctgacagtttactgcatgcctggagagaacacagcagtaaaaaccaggtttgctactggaaaaagaggaaagagaagactttcattgacggacccagccatggcagcgtagcagccctgcgttttagacggcagcagctcgggactctggacgtgtgtttgccctcaagtttgctaagctgctggtttattactgaagaaagaatgtggcagattgttttctttactctgagctgtgatcttgtcttggccgcagcctataacaactttcggaagagcatggacagcataggaaagaagcaatatcaggtccagcatgggtcctgcagctacactttcctcctgccagagatggacaactgccgctcttcctccagcccctacgtgtccaatgctgtgcagagggacgcgccgctcgaatacgatgactcggtgcagaggctgcaagtgctggagaacatcatggaaaacaacactcagtggctaatgaaggtattaaatcagaccacgagacttgaacttcagctcttggaacactccctctcgacaaacaaattggaaaaacagattttggaccagaccagtgaaataaacaaattgcaagataagaacagtttcctagaaaagaaggtgctagctatggaagacaagcacatcatccaactacagtcaataaaagaagagaaagatcagctacaggtgttagtatccaagcaaaattccatcattgaagaactagaaaaaaaaatagtgactgccacggtgaataattcagttcttcagaagcagcaacatgatctcatggagacagttaataacttactgactatgatgtccacatcaaactcagctaaggaccccactgttgctaaagaagaacaaatcagcttcagagactgtgctgaagtattcaaatcaggacacaccacgaatggcatctacacgttaacattccctaattctacagaagagatcaaggcctactgtgacatggaagctggaggaggcgggtggacaattattcagcgacgtgaggatggcagcgttgattttcagaggacttggaaagaatataaagtgggatttggtaacccttcaggagaatattggctgggaaatgagtttgtttcgcaactgactaatcagcaacgctatgtgcttaaaatacaccttaaagactgggaagggaatgaggcttactcattgtatgaacatttctatctctcaagtgaagaactcaattataggattcaccttaaaggacttacagggacagccggcaaaataagcagcatcagccaaccaggaaatgattttagcacaaaggatggagacaacgacaaatgtatttgcaaatgttcacaaatgctaacaggaggctggtggtttgatgcatgtggtccttccaacttgaacggaatgtactatccacagaggcagaacacaaataagttcaacggcattaaatggtactactggaaaggctcaggctattcgctcaaggccacaaccatgatgatccgaccagcagatttctaaacatcccagtccacctgaggaactgtctcgaactattttcaaagacttaagcccagtgcactgaaagtcacggctgcgcactgtgtcctcttccaccacagagggcgtgtgctcggtgctgacgggacccacatgctccagattagagcctgtaaactttatcacttaaacttgcatcacttaacggaccaaagcaagaccctaaacatccataattgtgattagacagaacacctatgcaaagatgaacccgaggctgagaatcagactgacagtttacagacgctgctgtcacaaccaagaatgttatgtgcaagtttatcagtaaataactggaaaacagaacacttatgttatacaatacagatcatcttggaactgcattcttctgagcactgtttatacactgtgtaaatacccatatgtcctgaattcaccatcactatcacaattaaaaggaagaaaaaaactctctaagccataaaaagacatattcagggatattctgagaaggggttactagaagtttaatatttggaaaaacagttagtgcatttttactccatctcttaggtgctttaaatttttatttcaaaaacagcgtatttacatttatgttgacagcttagttataagttaatgctcaaatacgtatttcaaatttatatggtagaaacttccagaatctctgaaattatcaacagaaacgtgccattttagtttatatgcagaccgtactatttttttctgcctgattgttaaatatgaaggtatttttagtaattaaatataacttattaggggatatgcctatgtttaacttttatgataatatttacaattttataatttgtttccaaaagacctaattgtgccttgtgataaggaaacttcttacttttaatgatgaggaaaattatacatttcattctatgacaaagaaactttactatcttctcactattctaaaacagaggtctgttttctttcctagtaagatatatttttatagaactagactacaatttaatttctggttgagaaaagccttctatttaagaaatttacaaagctatatgtctcaagattcacccttaaatttacttaaggaaaaaaataattgacactagtaagtttttttatgtcaatcagcaaactgaaaaaaaaaaaagggtttcaaagtgcaaaaacaaaatctgatgttcataatatatttaaatatttaccaaaaatttgagaacacagggctgggcgcagtggctcacacctataatcccagtacattggtaggcaaggtgggcagatcacctgaggtcaggagttcaagaccagcctggacaacatggtgaaaccctgtctctactaaataatacaaaaattagccaggcgtgctggcgggcacctgtaatcccagctactcgggaggctgaggcagggagaattgcttgcaccagggaggtagaggttgcagtgagccaagatcgcaccactgcactccagccggggcaacagagcaagactccatctcaaaaaaaaaaaaaaaaaaagaaagaaaagaaaatttgagaacacagctttatactcgggactacaaaaccataaactcctggagttttaactccttttgaaattttcatagtacaattaatactaatgaacatttgtgtaaagctttataatttaaaggcaatttctcatatattcttttctgaatcatttgcaaggaagttcagagtccagtctgtaactagcatctactatatgtctgtcttcaccttacagtgttctaccattattttttctttattccatttcaaaatctaatttattttaccccaacttctccccaccacttgacgtagttttagaacacacaggtgttgctacatatttggagtcaatgatggactctggcaaagtcaaggctctgttttatttccaccaaggtgcacttttccaacaactatttaactagttaagaacctccctatcttagaactgtatctactttatatttaagaaggttttatgaattcaacaacggtatcatggccttgtatcaagttgaaaaacaactgaaaataagaaaatttcacagcctcgaaagacaacaacaagtttctaggatatctcaatgacaagagtgatggatacttaggtagggaaacgctaatgcaggaaaaactggcaacaacacaatttatatcaattctctttgtaggcaggtgataaaaaattcaaggacaaatctcattatgtcattgtgcatcatatataatctcttatgagcgagaatggggggaatttgtgtttttactttacacttcaattccttacacggtatttcaaacaaacagttttgctgagaggagcttttgtctctccttaagaaaatgtttataaagctgaaaggaaatcaaacagtaatcttaaaaatgaaaacaaaacaacccaacaacctagataactacagtgatcagggagcacagttcaactccttgttatgttttagtcatatggcctactcaaacagctaaataacaacaccagtggcagataaaaatcaccatttatctttcagctattaatcttttgaatgaataaactgtgacaaacaaattaacatttttgaacatgaaaggcaacttctgcacaatcctgtatccaagcaaactttaaattatccacttaattattacttaatcttaaaaaaaattagaacccagaacttttcaatgaagcatttgaaagttgaagtggaatttaggaaagccataaaaatataaatactgttatcacagcaccagcaagccataatctttatacctatcagttctatttctattaacagtaaaaacattaagcaagatataagactacctgcccaagaattcagtcttttttcatttttgtttttctcagttctgaggatgttaatcgtcaaattttctttggactgcattcctcactactttttgcacaatggtctcacgttctcacatttgttctcgcgaataaattgataaaaggtgttaagttctgtgaatgtctttttaattatgggcataattgtgcttgactggataaaaacttaagtccacccttatgtttataataatttcttgagaacagcaaactgcatttaccatcgtaaaacaacatctgacttacgggagctgcagggaagtggtgagacagttcgaacggctcctcagaaatccagtgacccaattctaaagaccatagcacctgcaagtgacacaacaagcagatttattatacatttattagccttagcaggcaataaaccaagaatcactttgaagacacagcaaaaagtgatacactccgcagatctgaaatagatgtgttctcagacaacaaagtcccttcagaatcttcatgttgcataaatgttatgaatattaataaaaagttgattgagaaaaa

SEQ ID NO: 4347 - DNA, 4815 bp, Homo sapiens; identical to SEQ ID NO: 218

SEQ ID NO: 4348 - DNA, 3275 bp, Homo sapiens; identical to SEQ ID NO: 568

SEQ ID NO: 4349 - DNA, 823 bp, Homo sapiens
acactctaccaccatgaatccattcctgatccttgcctttgtgggagctgctgttgctgtcccctttgacgatgatgacaagattgttgggggctacacctgtgaggagaattctctcccctaccaggtgtccctgaattctggctcccacttctgcggtggctccctcatcagcgaacagtgggtggtatcagcagctcactgctacaagacccgcatccaggtgagactgggagagcacaacatcaaagtcctggaggggaatgagcagttcatcaatgcggccaagatcatccgccaccctaaatacaacagggacactctggacaatgacatcatgctgatcaaactctcctcacctgccgtcatcaatgcccgcgtgtccaccatctctctgcccaccgcccctccagctgctggcactgagtgcctcatctccggctggggcaacactctgagctttggtgctgactacccagacgagctgaagtgcctggatgctccggtgctgacccaggctgagtgtaaagcctcctaccctggaaagattaccaacagcatgttctgtgtgggcttccttgagggaggcaaggattcctgccagcgtgactctggtggccctgtggtctgcaacggacagctccaaggagttgtctcctggggccatggctgtgcctggaagaacaggcctggagtctacaccaaggtctacaactatgtggactggattaaggacaccatcgctgccaacagctaaagcccccggtccctctgcagtctctataccaataaagtggccctgctctcaaaaaaaaaaaaaaaa

SEQ ID NO: 4350 - DNA, 1929 bp, Homo sapiens; identical to SEQ ID NO: 596

SEQ ID NO: 4351 - DNA, 1696 bp, Homo sapiens
agctgccaaattcgccaactagaggagggagaggcggagcttgggtccctgtagaagccagaggcgcagtctggactgtagtttcccgggagagacgaaagcaggaacgagagcggagcggagcacagtccgccgagcacaagctccagcatcccgtcaggggttgcaggtgtgtgggaggcttgaaactgttacaatatggctttccttggactcttctctttgctggttctgcaaagtatggctacaggggccactttccctgaggaagccattgctgacttgtcagtgaatatgtataatcgtcttagagccactggtgaagatgaaaatattctcttctctccattgagtattgctcttgcaatgggaatgatggaacttggggcccaaggatctacccagaaagaaatccgccactcaatgggatatgacagcctaaaaaatggtgaagaattttctttcttgaaggagttttcaaacatggtaactgctaaagagagccaatatgtgatgaaaattgccaattccttgtttgtgcaaaatggatttcatgtcaatgaggagtttttgcaaatgatgaaaaaatattttaatgcagcagtaaatcatgtggacttcagtcaaaatgtagccgtggccaactacatcaataagtgggtggagaataacacaaacaatctggtgaaagatttggtatccccaagggattttgatgctgccacttatctggccctcattaatgctgtctatttcaaggggaactggaagtcgcagtttaggcctgaaaatactagaaccttttctttcactaaagatgatgaaagtgaagtccaaattccaatgatgtatcagcaaggagaattttattatggggaatttagtgatggctccaatgaagctggtggtatctaccaagtcctagaaataccatatgaaggagatgaaataagcatgatgctggtgctgtccagacaggaagttcctcttgctactctggagccattagtcaaagcacagctggttgaagaatgggcaaactctgtgaagaagcaaaaagtagaagtatacctgcccaggttcacagtggaacaggaaattgatttaaaagatgttttgaaggctcttggaataactgaaattttcatcaaagatgcaaatttgacaggcctctctgataataaggagatttttctttccaaagcaattcacaagtccttcctagaggttaatgaagaaggctcagaagctgctgctgtctcaggaatgattgcaattagtaggatggctgtgctgtatcctcaagttattgtcgaccatccatttttctttcttatcagaaacaggagaactggtacaattctattcatgggacgagtcatgcatcctgaaacaatgaacacaagtggacatgatttcgaagaactttaagttactttatttgaataacaaggaaaacagtaactaagcacattatgtttgcaactggtatatatttaggatttgtgttttacagtatatcttaagataatatttaaaatagttccagataaaaacaatatatgtaaattataagtaacttgtcaaggaatgttatcagtattaagctaatggtcctgttatgtcattgtgtttgtgtgctgttgtttaaaataaaagtacctattgaacatgtgaaaaaaaaaaaaaaaaaaaa

SEQ ID NO: 4352 - DNA, 4009 bp, Homo sapiens; identical to SEQ ID NO: 778

SEQ ID NO: 4353 - DNA, 7442 bp, Homo sapiens; identical to SEQ ID NO: 754

SEQ ID NO: 4354 - DNA, 5231 bp, Homo sapiens; identical to SEQ ID NO: 795

SEQ ID NO: 4355 - DNA, 3582 bp, Homo sapiens; identical to SEQ ID NO: 543

SEQ ID NO: 4356 - DNA, 2953 bp, Homo sapiens; identical to SEQ ID NO: 1432

SEQ ID NO: 4357 - DNA, 6333 bp, Homo sapiens; identical to SEQ ID NO: 546

SEQ ID NO: 4358 - DNA, 1207 bp, Homo sapiens; identical to SEQ ID NO: 169

SEQ ID NO: 4359 - DNA, 2366 bp, Homo sapiens; identical to SEQ ID NO: 2295

SEQ ID NO: 4360 - DNA, 3419 bp, Homo sapiens; identical to SEQ ID NO: 1879

SEQ ID NO: 4361 - DNA, 5165 bp, Homo sapiens; identical to SEQ ID NO: 3253

SEQ ID NO: 4362 - DNA, 1101 bp, Homo sapiens; identical to SEQ ID NO: 2466

SEQ ID NO: 4363 - DNA, 1738 bp, Homo sapiens; identical to SEQ ID NO: 809

SEQ ID NO: 4364 - DNA, 2484 bp, Homo sapiens
tggagagaaccttacacatttcacgagtatggaaagacctttgctcaaaattcagcccttgtaatgcataaggcaattcatactggaaagaaaccttacacatgtaatgaatgtggcaaggtttttagtagaaaagcacaccttgcatgtcatcatagacttcatactgtctaaggtttctaatcaacaatcaaaccttgcacaacatcagagagtttatactggagagaaaccttacaagtgtaatgagtggggcaaagccttaagtgggaagtcgtcacttttttatcatcaagcaatccatggtgtagggaaactttgcaaatgtaatgattgtcacaaagtcttcagtaatgctacaaccattgcaaatcactggagaatccataatgaagacagatcttacaagtgtaataaatgtggtaaaattttcagacatcgatcatatcttgcagtttatcagcgaactcatactggagagaaaccttacaaatatcatgactgtggcaaggtcttcagtcaagcttcatcctatgcaaaacataggagaattcatacaggagagaaacctcacaagtgtgatgattgtggcaaagtcttgacttcacgttcacacctcattagacatcagagaatccatactggacagaaatcttacaaatgtcttaagtgtggcaaggtcttcagtctgtgggcactccatgcagaacatcagaaaattcatttttgagataactgttccaaatacagtgactatagaagatcataaagctttaattgacattagagccaaataggcattgacttgagattgagttgacttaaccttgagtttaagaattaatttacattaaagtgtttatgttaagaagattgggccaggtgggattacaggcgcgagccaccgcgcccggcccctaagttaatatttcaaacaatcgaaggtaaaacaacatattgtgttgggccacctgtactgaacgctgaatcgtttttcctcttaagttgaaaatggttttaatgcaaagcgccttttttgagcaggtagagtcacgcatccggcaggcggggcgagctcccctctgtctggggcagggtgggggagaggggcagggacctcggtaaaggggtggagtggcgcgctggttgccgcgggcactggcaattagaagggattattaaactaagcaaggtcctgggttgtttgagtggataatggaaactgaaaggtgacgtgcaaaactgcctattactcccaggagtggaggataatttcatatttcatggaaataaactcagggcccggagcggtggctcacacctgtaatcccagcactttgagaggccaaggagggaggatcgcttaagcccaggaattcgaaatcagcctaggcaacatagtaagacctcatctctactaaaaataaaaaaaaacagccaggtgtgttagtccacacctgtggtcccagctgcttgggcttcccgagtagctgggattacaggtatgaaccactatgcccggctaactttgttttttttttttagaaattaaaccttttttcagcttaatgacccaggggtgtatttttgaaggacttgggagctctctttgaaaggcaaacaacaagggaaacagtacctttatctcagtaggaaattaaataattcaaacatcaaataacttcaatttaaggctatggactttgagataattctgagccttgagaggaatgtggtcaggcaacctgagtccagtggaatgcaggtgcaacttctaagagttttcctgtaagtaattaagaagactaagtagccccagagataagacctcctcggatcattgtcccttcttatgtagtgataaagtaaccttccttgaagtgtatctatccgtaatcaatcaagttgctgcagcctatgcactggcccagaataaaaaacgtggtgattctgctaaagcttctctgtctttccctgtgtgtgaaatcttaacgtctctacttgggaacgctgatcccattcatttagagttgatgtttccacgtggctatttccaagctttgccttcaaataaattctgtacttaatcatatattctaaattttattatttactgctgacatcagtttctgtcggattgtaggagcctcaccagagagggcccctgtcgccatgttgtaaaactcacacttgccaaaagttgtgggttagggtttctccccctccctcaggatgacgctagttagctgacacagatggtcacctccattaccaagtagagtcaggatgaactatgtgtgactgttcaactatgtgtcctcttccctgaggactgattagtgtttatcttgaaaacatgtccttaatgggttgtatagaacactgaagcatctgatttcaaactcttagctcttttcctctatttcccatcacattctggtctaaggcttatttattaataaaatgatttttatttctttatta

SEQ ID NO: 4365 - DNA, 1461 bp, Homo sapiens; identical to SEQ ID NO: 561

SEQ ID NO: 4366 - DNA, 1284 bp, Homo sapiens
agatgccccacagcactgctcttccagaggcaagaccaaccaagatgagtgccctgggagctgtcattgccctcctgctctggggacagctttttgcagtggactcaggcaatgatgtcacggatatcgcagatgacggctgcccgaagccccccgagattgcacatggctatgtggagcactcggttcgctaccagtgtaagaactactacaaactgcgcacagaaggagatggagtgtacaccttaaacaatgagaagcagtggataaataaggctgttggagataaacttcctgaatgtgaagcagtatgtgggaagcccaagaatccggcaaacccagtgcagcggatcctgggtggacacctggatgccaaaggcagctttccctggcaggctaagatggtttcccaccataatctcaccacaggtgccacgctgatcaatgaacaatggctgctgaccacggctaaaaatctcttcctgaaccattcagaaaatgcaacagcgaaagacattgcccctactttaacactctatgtggggaaaaagcagcttgtagagattgagaaggttgttctacaccctaactactcccaggtagatattgggctcatcaaactcaaacagaaggtgtctgttaatgagagagtgatgcccatctgcctaccttcaaaggattatgcagaagtagggcgtgtgggttatgtttctggctgggggcgaaatgccaattttaaatttactgaccatctgaagtatgtcatgctgcctgtggctgaccaagaccaatgcataaggcattatgaaggcagcacagtccccgaaaagaagacaccgaagagccctgtaggggtgcagcccatactgaatgaacacaccttctgtgctggcatgtctaagtaccaagaagacacctgctatggcgatgcgggcagtgcctttgccgttcacgacctggaggaggacacctggtatgcgactgggatcttaagctttgataagagctgtgctgtggctgagtatggtgtgtatgtgaaggtgacttccatccaggactgggttcagaagaccatagctgagaactaatgcaaggctggccggaagcccttgcctgaaagcaagatttcagcctggaagagggcaaagtggacgggagtggacaggagtggatgcgataagatgtggtttgaagctgatgggtgccagccctgcattgctgagtcaatcaataaagagctttcttttgacccataaaaaaaaaaaaaaaaaaaaaaaaaaaaaa

SEQ ID NO: 4367 - DNA, 1017 bp, Homo sapiens
cggcgtctgcgcagctgccagcgcctttaagcccgggctcgcgctctcggaccgtgctttcgccgcctgggagccgtccggcgcagcagtttctaggtccccactgtccccgccgtcccgccccttcgcgtcccgggaaccggctggcttccgagccgcactcgccgatcctccaggcatgccccgctacgagctggctttaatcctgaaagccatgcagcggccagagactgctgctactttgaaacgtacgatagaggccctgatggacagaggagcaatagtgagggacttggaaaacctgggtgaacgagcgcttccttataggatctctgcccacagtcagcagcacaacagaggcgggtatttcttggtggatttttatgcacccaccgcagctgttgaaagcatggtggagcacttgtctcgagatatagatgtgattagagggaatattgtcaaacaccctctgacccaggaactaaaagaatgtgaagggattgtcccagtcccactcgcagaaaaattatattccacaaagaagaggaagaagtgagaagattcgccagattttagccttatatgtaattccttcacatttgggcagcatggacgagaaggaagaatttgcaagtttggcctttatataagcatgtgttgcaggtgctgtttgatttttctaaggtatttttagcccttgatcccctttgcttgcgagaggtggggaactgctcactgacagcttctctgtaacctgcagtaccagtggatcgttcttgattttgttttcattagtgtcatttctttgtcattgaggacttttccccttacaacagtaacaccattttttgaagagcaaaacttataatacctcctgggattgtgagctagtcattcagcctgtgtaaccatgtggaaataaaaattgacgaccaatgtattatatggacaacttttgctttgagtaataaacttgattgtaggaatgtgaaaaaaaaaaaaaaaaaaaaaaaaaaa

SEQ ID NO: 4368 - DNA, 3381 bp, Homo sapiens; identical to SEQ ID NO: 108

SEQ ID NO: 4369 - DNA, 348 bp, Homo sapiens
atgcacttctacagactattccttggggccacacgtaggttcttgaatcccgaatggaaaggggagattgataactggtgtgtttatgttcttacaagtcttctgccttttaaaatccagtcccaggacatcaaagctctgcagaaagaactcgagcaatttgccaagctcctgaagcagaagaggatcaccctgggatatacacaggccgatgtggggctcaccctgggggttctatttggtgggttcccctctgcagattctgaccgcatctcccctctaaggagtatccctgaacctagtggggaggggcaggggcagactaccctcacccatgaagaggagtag

SEQ ID NO: 4370 - DNA, 1189 bp, Homo sapiens; identical to SEQ ID NO: 128

SEQ ID NO: 4371 - DNA, 1194 bp, Homo sapiens
ggggccgcgcggctgcctgggaggctccgggccagccgcggtccagagcgcgcgaggttcggggagctcggccaggctgctggtacctgcgtccgcccggcgagcaggacaggctgctttggtttgtgacctccaggcaggacggccatcctctccagaatgaagatcttcttgccagtgctgctggctgcccttctgggtgtggagcgagccagctcgctgatgtgcttctcctgcttgaaccagaagagcaatctgtactgcctgaagccgaccatctgctccgaccaggacaactactgcgtgactgtgtctgctagtgccggcattgggaatctcgtgacatttggccacagcctgagcaagacctgttccccggcctgccccatcccagaaggcgtcaatgttggtgtggcttccatgggcatcagctgctgccagagctttctgtgcaatttcagtgcggccgatggcgggctgcgggcaagcgtcaccctgctgggtgccgggctgctgctgagcctgctgccggccctgctgcggtttggcccctgaccgcccagaccctgtcccccgatcccccagctcaggaaggaaagcccagccctttctggatcccacagtgtatgggagcccctgactcctcacgtgcctgatctgtgcccttggtcccaggtcaggcccaccccctgcacctccacctgccccagcccctgcctctgccccaagtggggccagctgccctcacttctggggtggatgatgtgaccttccttgggggactgcggaagggacgagggttccctggagtcttacggtccaacatcaggaccaagtcccatggacatgctgacagggtccccagggagaccgtgtcagtagggatgtgtgcctggctgtgtacgtgggtgtgcagtgcacgtgagagcacgtggcggcttctgggggccatgtttggggagggaggtgtgccagcagcctggagagcctcagtccctgtagccccctgccctggcacagctgcatgcacttcaagggcagcctttgggggttggggtttctgccacttccgggtctaggccctgccccaaatccagccagtcctgccccagcccacccccacattggagccctcctgctgctttggtgcctcaaataaatacagatgtcccccagaaaaaaaaaaaaaaaaaa

SEQ ID NO: 4372 - DNA, 3337 bp, Homo sapiens; identical to SEQ ID NO: 1704

SEQ ID NO: 4373 - DNA, 3250 bp, Homo sapiens
gaaacacaggctggaagcaagacctgacctgagggagttcttcagccttaacctaaggtctcatactcggagcactatgacatcgccccagctagagtggactctgcagacccttctggagcagctgaacgaggatgaattaaagagtttcaaatcccttttatgggcttttcccctcgaagacgtgctacagaagaccccatggtctgaggtggaagaggctgatggcaagaaactggcagaaattctggtcaacacctcctcagaaaattggataaggaatgcgactgtgaacatcttggaagagatgaatctcacggaattgtgtaagatggcaaaggctgagatgatggaggacggacaggtgcaagaaatagataatcctgagctgggagatgcagaagaagactcggagttagcaaagccaggtgaaaaggaaggatggagaaattcaatggagaaacagtctttggtctggaagaacaccttttggcaaggagacattgacaatttccatgacgacgtcactctgagaaaccaacggttcattccattcttgaatcccagaacacccaggaagctaacaccttacacggtggtgctgcacggccccgcaggcgtggggaaaaccacgctggccaaaaagtgtatgctggactggacagactgcaacctcagcccgacgctcagatacgcgttctacctcagctgcaaggagctcagccgcatgggcccctgcagttttgcagagctgatctccaaagactggcctgaattgcaggatgacattccaagcatcctagcccaagcacagagaatcctgttcgtggtcgatggccttgatgagctgaaagtcccacctggggcgctgatccaggacatctgcggggactgggagaagaagaagccggtgcccgtcctcctggggagtttgctgaagaggaagatgttacccagggcagccttgctggtcaccacgcggcccagggcactgagggacctccagctcctggcgcagcagccgatctacgtaagggtggagggcttcctggaggaggacaggagggcctatttcctgagacactttggagacgaggaccaagccatgcgtgcctttgagctaatgaggagcaacgcggccctgttccagctgggctcggcccccgcggtgtgctggattgtgtgcacgactctgaagctgcagatggagaagggggaggacccggtccccacctgcctcacccgcacggggctgttcctgcgtttcctctgcagccggttcccgcagggcgcacagctgcggggcgcgctgcggacgctgagcctcctggccgcgcagggcctgtgggcgcagatgtccgtgttccaccgagaggacctggaaaggctcggggtgcaggagtccgacctccgtctgttcctggacggagacatcctccgccaggacagagtctccaaaggctgctactccttcatccacctcagcttccagcagtttctcactgccctgttctacgccctggagaaggaggagggggaggacagggacggccacgcctgggacatcggggacgtacagaagctgctttccggagaagaaagactcaagaaccccgacctgattcaagtaggacacttcttattcggcctcgctaacgagaagagagccaaggagttggaggccacttttggctgccggatgtcaccggacatcaaacaggaattgctgcaatgcaaagcacatcttcatgcaaataagcccttatccgtgaccgacctgaaggaggtcttgggctgcctgtatgagtctcaggaggaggagctggcgaaggtggtggtggccccgttcaaggaaatttctattcacctgacaaatacttctgaagtgatgcattgttccttcagcctgaagcattgtcaagacttgcagaaactctcactgcaggtagcaaagggggtgttcctggagaattacatggattttgaactggacattgaatttgaaaggtgcacttacctaaccattccgaactgggctcggcaggatcttcgctctcttcgcctctggacagatttctgctctctcttcagctcaaacagcaacctcaagtttctggaagtgaaacaaagcttcctgagtgactcttctgtgcggattctttgtgaccacgtaacccgtagcacctgtcatctgcagaaagtggagattaaaaacgtcacccctgacaccgcgtaccgggacttctgtcttgctttcattgggaagaagaccctcacgcacctgaccctggcagggcacatcgagtgggaacgcacgatgatgctgatgctgtgtgacctgctcagaaatcataaatgcaacctgcagtacctgaggttgggaggtcactgtgccaccccggagcagtgggctgaattcttctatgtcctcaaagccaaccagtccctgaagcacctgcgtctctcagccaatgtgctcctggatgagggtgccatgttgctgtacaagaccatgacacgcccaaaacacttcctgcagatgttgtcgttggaaaactgtcgtcttacagaagccagttgcaaggaccttgctgctgtcttggttgtcagcaagaagctgacacacctgtgcttggccaagaaccccattggggatacaggggtgaagtttctgtgtgagggcttgagttaccctgattgtaaactgcagaccttggtgttacagcaatgcagcataaccaagcttggctgtagatatctctcagaggcgctccaagaagcctgcagcctcacaaacctggacttgagtatcaaccagatagctcgtggattgtggattctctgtcaggcattagagaatccaaactgtaacctaaaacacctacggttgaagacctatgaaactaatttggaaatcaagaagctgttggaggaagtgaaagaaaagaatcccaagctgactattgattgcaatgcttccggggcaacggcacctccgtgctgtgactttttttgctgagcagcctgggatcgctctacgaattacacaggaagcgggattcgggtctctaagatgtcttatgaatgcaggtcagagggtcacatgttaacactagagtctgtcgagaggtaggatttgacactggttttctcactatttttgggagattctgcacgagtcacgcacccccttcacatgacgctatgtactttctcacagggataataaagttagagcactctcgttgca

SEQ ID NO: 4374 - DNA, 3421 bp, Homo sapiens
gaaacacaggctggaagcaagacctgacctgagggagttcttcagccttaacctaaggtctcatactcggagcactatgacatcgccccagctagagtggactctgcagacccttctggagcagctgaacgaggatgaattaaagagtttcaaatcccttttatgggcttttcccctcgaagacgtgctacagaagaccccatggtctgaggtggaagaggctgatggcaagaaactggcagaaattctggtcaacacctcctcagaaaattggataaggaatgcgactgtgaacatcttggaagagatgaatctcacggaattgtgtaagatggcaaaggctgagatgatggaggacggacaggtgcaagaaatagataatcctgagctgggagatgcagaagaagactcggagttagcaaagccaggtgaaaaggaaggatggagaaattcaatggagaaacagtctttggtctggaagaacaccttttggcaaggagacattgacaatttccatgacgacgtcactctgagaaaccaacggttcattccattcttgaatcccagaacacccaggaagctaacaccttacacggtggtgctgcacggccccgcaggcgtggggaaaaccacgctggccaaaaagtgtatgctggactggacagactgcaacctcagcccgacgctcagatacgcgttctacctcagctgcaaggagctcagccgcatgggcccctgcagttttgcagagctgatctccaaagactggcctgaattgcaggatgacattccaagcatcctagcccaagcacagagaatcctgttcgtggtcgatggccttgatgagctgaaagtcccacctggggcgctgatccaggacatctgcggggactgggagaagaagaagccggtgcccgtcctcctggggagtttgctgaagaggaagatgttacccagggcagccttgctggtcaccacgcggcccagggcactgagggacctccagctcctggcgcagcagccgatctacgtaagggtggagggcttcctggaggaggacaggagggcctatttcctgagacactttggagacgaggaccaagccatgcgtgcctttgagctaatgaggagcaacgcggccctgttccagctgggctcggcccccgcggtgtgctggattgtgtgcacgactctgaagctgcagatggagaagggggaggacccggtccccacctgcctcacccgcacggggctgttcctgcgtttcctctgcagccggttcccgcagggcgcacagctgcggggcgcgctgcggacgctgagcctcctggccgcgcagggcctgtgggcgcagatgtccgtgttccaccgagaggacctggaaaggctcggggtgcaggagtccgacctccgtctgttcctggacggagacatcctccgccaggacagagtctccaaaggctgctactccttcatccacctcagcttccagcagtttctcactgccctgttctacgccctggagaaggaggagggggaggacagggacggccacgcctgggacatcggggacgtacagaagctgctttccggagaagaaagactcaagaaccccgacctgattcaagtaggacacttcttattcggcctcgctaacgagaagagagccaaggagttggaggccacttttggctgccggatgtcaccggacatcaaacaggaattgctgcaatgcaaagcacatcttcatgcaaataagcccttatccgtgaccgacctgaaggaggtcttgggctgcctgtatgagtctcaggaggaggagctggcgaaggtggtggtggccccgttcaaggaaatttctattcacctgacaaatacttctgaagtgatgcattgttccttcagcctgaagcattgtcaagacttgcagaaactctcactgcaggtagcaaagggggtgttcctggagaattacatggattttgaactggacattgaatttgaaaggtgcacttacctaaccattccgaactgggctcggcaggatcttcgctctcttcgcctctggacagatttctgctctctcttcagctcaaacagcaacctcaagtttctggaagtgaaacaaagcttcctgagtgactcttctgtgcggattctttgtgaccacgtaacccgtagcacctgtcatctgcagaaagtggagattaaaaacgtcacccctgacaccgcgtaccgggacttctgtcttgctttcattgggaagaagaccctcacgcacctgaccctggcagggcacatcgagtgggaacgcacgatgatgctgatgctgtgtgacctgctcagaaatcataaatgcaacctgcagtacctgaggttgggaggtcactgtgccaccccggagcagtgggctgaattcttctatgtcctcaaagccaaccagtccctgaagcacctgcgtctctcagccaatgtgctcctggatgagggtgccatgttgctgtacaagaccatgacacgcccaaaacacttcctgcagatgttgtcgttggaaaactgtcgtcttacagaagccagttgcaaggaccttgctgctgtcttggttgtcagcaagaagctgacacacctgtgcttggccaagaaccccattggggatacaggggtgaagtttctgtgtgagggcttgagttaccctgattgtaaactgcagaccttggtgttacagcaatgcagcataaccaagcttggctgtagatatctctcagaggcgctccaagaagcctgcagcctcacaaacctggacttgagtatcaaccagatagctcgtggattgtggattctctgtcaggcattagagaatccaaactgtaacctaaaacacctacgcctctggagctgctccctcatgcctttctattgtcagcatcttggatctgctctcctcagcaatcagaagcttgaaactctggacctgggccagaatcatttgtggaagagtggcataattaagctctttggggttctaagacaaagaactggatccttgaagatactcaggttgaagacctatgaaactaatttggaaatcaagaagctgttggaggaagtgaaagaaaagaatcccaagctgactattgattgcaatgcttccggggcaacggcacctccgtgctgtgactttttttgctgagcagcctgggatcgctctacgaattacacaggaagcgggattcgggtctctaagatgtcttatgaatgcaggtcagagggtcacatgttaacactagagtctgtcgagaggtaggatttgacactggttttctcactatttttgggagattctgcacgagtcacgcacccccttcacatgacgctatgtactttctcacagggataataaagttagagcactctcgttgca

SEQ ID NO: 4375 - DNA, 3893 bp, Homo sapiens
gcttcctggaacccatgacccatgaagtcttgtcgacatttataccgtctgagggtagcagctcgaaagtagaagaaagtgttgccagggacggcagtatctctttgtgtgaccctggcggcttatgggacgttggcttcagacctttgtgatacaccatgctgcgtgggacgatgacggcgtggagaggaatgaggcctgaggtcacactggcttgcctcctcctagccacagcaggctgctttgctgacttgaacgaggtccctcaggtcaccgtccagcctgcgtccaccgtccagaagcccggaggcactgtgatcttgggctgcgtggtggaacctccaaggatgaatgtaacctggcgcctgaatggaaaggagctgaatggctcggatgatgctctgggtgtcctcatcacccacgggaccctcgtcatcactgcccttaacaaccacactgtgggacggtaccagtgtgtggcccggatgcctgcgggggctgtggccagcgtgccagccactgtgacactagccaatctccaggacttcaagttagatgtgcagcacgtgattgaagtggatgagggaaacacagcagtcattgcctgccacctgcctgagagccaccccaaagcccaggtccggtacagcgtcaaacaagagtggctggaggcctccagaggtaactacctgatcatgccctcagggaacctccagattgtgaatgccagccaggaggacgagggcatgtacaagtgtgcagcctacaacccagtgacccaggaagtgaaaacctccggctccagcgacaggctacgtgtgcgccgctccaccgctgaggctgcccgcatcatctaccccccagaggcccaaaccatcatcgtcaccaaaggccagagtctcattctggagtgtgtggccagtggaatcccacccccacgggtcacctgggccaaggatgggtccagtgtcaccggctacaacaagacgcgcttcctgctgagcaacctcctcatcgacaccaccagcgaggaggactcaggcacctaccgctgcatggccgacaatggggttgggcagcccggggcagcggtcatcctctacaatgtccaggtgtttgaaccccctgaggtcaccatggagctatcccagctggtcatcccctggggccagagtgccaagcttacctgtgaggtgcgtgggaaccccccgccctccgtgctgtggctgaggaatgctgtgcccctcatctccagccagcgcctccggctctcccgcagggccctgcgcgtgctcagcatggggcctgaggacgaaggcgtctaccagtgcatggccgagaacgaggttgggagcgcccatgccgtagtccagctgcggacctccaggccaagcataaccccaaggctatggcaggatgctgagctggctactggcacacctcctgtatcaccctccaaacttggcaaccctgagcagatgctgagggggcaaccggcgctccccagacccccaacgtcagtggggcctgcttccccacagtgtccaggagagaaggggcagggggctcccgccgaggctcccatcatcctcagctcgccccgcacctccaagacagactcatatgaactggtgtggcggcctcggcatgagggcagtggccgggcgccaatcctctactatgtggtgaaacaccgcaaggtcacaaattcctctgacgattggaccatctctggcattccagccaaccagcaccgcctgaccctcaccagacttgaccccgggagcttgtatgaagtggagatggcagcttacaactgtgcgggagagggccagacagccatggtcaccttccgaactggacggcggcccaaacccgagatcatggccagcaaggagcagcagatccagagagacgaccctggagccagtccccagagcagcagccagccagaccacggccgcctctcccccccagaagctcccgacaggcccaccatctccacggcctccgagacctcagtgtacgtgacctggattccccgtgggaatggtgggttcccaatccagtccttccgtgtggagtacaagaagctaaagaaagtgggagactggattctggccaccagcgccatccccccatcacggctgtccgtggagatcacgggcctagagaaaggcacctcctacaagtttcgagtccgggctctgaacatgctgggggagagcgagcccagcgccccctctcggccctacgtggtgtcgggctacagcggtcgcgtgtacgagaggcccgtggcaggtccttatatcaccttcacggatgcggtcaatgagaccaccatcatgctcaagtggatgtacatcccagcaagtaacaacaacaccccaatccatggcttttatatctattatcgacccacagacagtgacaatgatagtgactacaagaaggatatggtggaaggggacaagtactggcactccatcagccacctgcagccagagacctcctacgacattaagatgcagtgcttcaatgaaggaggggagagcgagttcagcaacgtgatgatctgtgagaccaaagctcggaagtcttctggccagcctggtcgactgccacccccaactctggccccaccacagccgccccttcctgaaaccatagagcggccggtgggcactggggccatggtggctcgctccagcgacctgccctatctgattgtcggggtcgtcctgggctccatcgttctcatcatcgtcaccttcatccccttctgcttgtggagggcctggtctaagcaaaaacatacaacagacctgggttttcctcgaagtgcccttccaccctcctgcccgtatactatggtgccattgggaggactcccaggccaccaggccagtggacagccctacctcagtggcatcagtggacgggcctgtgctaatgggatccacatgaataggggctgcccctcggctgcagtgggctacccgggcatgaagccccagcagcactgcccaggcgagcttcagcagcagagtgacaccagcagcctgctgaggcagacccatcttggcaatggatatgacccccaaagtcaccagatcacgaggggtcccaagtctagcccggacgagggctctttcttatacacactgcccgacgactccactcaccagctgctgcagccccatcacgactgctgccaacgccaggagcagcctgctgctgtgggccagtcaggggtgaggagagcccccgacagtcctgtcctggaagcagtgtgggaccctccatttcactcagggcccccatgctgcttgggccttgtgccagttgaagaggtggacagtcctgactcctgccaagtgagtggaggagactggtgtccccagcaccccgtaggggcctacgtaggacaggaacctggaatgcagctctccccggggccactggtgcgtgtgtcttttgaaacaccacctctcacaatttaggcagaagctgatatcccagaaagactatatattgtttttttttttaaaaaaaaaagaagaaaaaagagacagagaaaattggtatttatttttctattatagccatatttatatatttatgcacttgtaaataaatgtatatgttttataattctggagagacataaggagtcctacccgttgaggttggagagggaaaataaagaagctgccacctaacaggagtcacccaggaaagcaccgcacaggctggcgcgggacagactcctaacctggggcctctgcagtggcaggcgaggctgcaggaggcccacagataagctggcaagaggaaggatcccaggcacatggttcatcacgagcatgagggaacagcaaggggcacggtat

SEQ ID NO: 4376 - DNA, 1116 bp, Homo sapiens
tcaccaaagagtgccgaacaagttaaaatgaatctgtttttaaacacttctcctaaaccatgagcattaacttgatttcctctgtcatagggatatgggggacaatataacatccatcacagagttcctcctactgggatttcccgttggcccaaggattcagatgctcctctttgggctcttctccctgttctacgtcttcaccctgctggggaacgggaccatactggggctcatctcactggactccagactgcacgcccccatgtacttcttcctctcacacctggcggtcgtcgacatcgcctacgcctgcaacacggtgccccggatgctggtgaacctcctgcatccagccaagcccatctcctttgcgggccgcatgatgcagacctttctgttttccacttttgctgtcacagaatgtctcctcctggtggtgatgtcctatgatctgtacgtggccatctgccaccccctccgatatttggccatcatgacctggagagtctgcatcaccctcgcggtgacttcctggaccactggagtccttttatccttgattcatcttgtgttacttctacctttacccttctgtaggccccagaaaatttatcactttttttgtgaaatcttggctgttctcaaacttgcctgtgcagatacccacatcaatgagaacatggtcttggccggagcaatttctgggctggtgggacccttgtccacaattgtagtttcatatatgtgcatcctctgtgctatccttcagatccaatcaagggaagttcagaggaaagccttctgcacctgcttctcccacctctgtgtgattggactcttttatggcacagccattatcatgtatgttggacccagatatgggaaccccaaggagcagaagaaatatctcctgctgtttcacagcctctttaatcccatgctcaatccccttatctgtagtcttaggaactcagaagtgaagaatactttgaagagagtgctgggagtagaaagggctttatgaaaaggattatggcattgtgactgacagtgacctaggaagttacatcattgagcggttcttaacccatctctgcactggtgggacctctg

SEQ ID NO: 4377 - DNA, 4522 bp, Homo sapiens
aggaggaggctgataggggggtggataaaaaaagttcttccaaaatagtgtgcccggggagcaggatgggggatttcgcagcccccgctgctgccgcgaatggcagtagtatttgcatcaacagtagcctgaacagcagcctcggcggggccgggatcggtgtgaataatactcccaatagtactcccgctgctccgagtagcaatcacccggcagccggtggatgcggcggctccgggggccccggcggcggttcggcggccgttcccaagcacagcaccgtggtggagcggctccgccagcgcatcgagggctgccgtcggcaccacgtcaactgcgagaacaggtaccagcaggctcaggtggagcagctggagctggagcgccgggacaccgtgagcctctaccagcggaccctggagcagagggccaagaaatcgggcgccggcaccggcaaacagcagcacccgagcaaaccccagcaagatgcggaggctgcctcggcggagcagaggaaccacacgctgatcatgctacaagagactgtgaaaaggaagttggaaggagctcgatcaccacttaatggagaccagcagaatggtgcttgtgatgggaatttttctccgactagcaaacgaattcgaaaggacatttctgcggggatggaagccatcaacaatttgcccagtaacatgccactgccttcagcttctcctcttcaccaacttgacctgaaaccttctttgcccttgcagaacagtggaactcacactcctgggcttctagaagatctaagtaagaatggtaggctccctgagattaaacttcctgtcaacggttgcagtgacctggaggatagcttcaccatcttgcagagcaaagacctcaaacaagaacctctcgatgaccctacttgcatagacacatcagaaacatctctttcaaatcagaacaagctgttctcagacattaatctgaatgatcaggagtggcaagaattaatagatgaattggccaacacggttcctgaggatgacatacaggacctgttcaacgaagactttgaagagaagaaggagccagaattctcgcagccagcaactgagacccctctctcccaggagagtgcgagcgtgaagagcgacccctctcactctcccttcgcacatgtctccatgggatctccccaggcgaggccttcttcttctggtcctcccttttctactgtctccacggccactagtttaccttctgttgccagcactcccgcagctccaaaccctgcaagctcaccagcaaactgtgctgtccagtcccctcaaactccaaaccaagcccacactccaggccaagctccacctcggcctggaaatggttatctcctgaatccggcagcagtgacagtggccggttcagcgtcagggcctgtggctgtgcccagctctgacatgtctccagcagaacagctcaaacagatggctgcacagcagcaacaaagggccaaactcatgcagcagaagcagcaacagcaacagcagcagcagcagcagcagcagcaacagcagcagcagcagcagcaacagcactcaaatcagacttcaaattggtctcccttaggacctccctctagtccatatggagcagcttttactgcagaaaaaccaaatagcccaatgatgtacccccaagcctttaacaaccaaaaccctatagtgcctccaatggcaaacaacctgcagaagacaacaatgaataactacctccctcagaatcacatgaatatgatcaatcagcagccaaataacttgggtacaaactccttaaacaaacagcacaatattctgacttatggcaacactaaacccctgacccacttcaatgcagacctgagtcagaggatgacaccaccagtggccaaccccaacaaaaaccccttgatgccgtatatccagcagcagcaacagcagcagcaacagcaacagcagcagcagcagcagcagcagccaccacctccacagctccaggcccccagggcacacctgagcgaagaccagaaacgcctgcttctcatgaagcagaaaggagtgatgaatcagcccatggcttacgctgcacttccatcccacggtcaggagcagcatccagttggacttccccgaaccacaggccccatgcagtcctccgtgcccccaggctcaggtggcatggtctcaggagccagtcccgcaggccccggcttcctgggcagccagccccaagcagccatcatgaagcagatgctcattgatcagcgggcccagttgatagagcagcagaagcaacagttcctgcgggagcaaaggcagcagcagcagcagcagcagcagattttggcggaacagcagttgcagcaatcacatctaccccggcagcacctccagccacagcggaatccatacccagtgcagcaggtcaatcagtttcaaggttctccccaggatatagcagccgtaagaagccaagcagccctccagagcatgcgaacgtcacggctgatggcacagaacgcaggcatgatgggaataggaccctcccagaaccctgggacgatggccaccgcagctgcgcagtcggagatgggactggccccttatagcaccacgcctaccagccaaccaggaatgtacaatatgagcacaggcatgacccaaatgttgcagcatccaaaccaaagtggcatgagcatcacacataaccaagcccagggaccgaggcaacctgcctctgggcagggggttggaatggtgagtggctttggtcagagcatgctggtgaactcagccattacccagcaacatccacagatgaaagggccagtaggccaggccttgcctaggccccaagcccctccaaggctgcagagccttatgggaacagtccagcaaggagcacaaagctggcaacagaggagcttgcagggcatgcctgggaggactagtggagaattgggaccattcaacaatggcgccagctaccctcttcaagctgggcagccgagactgaccaagcagcacttcccacagggactgagccagtcagtcgtggatgctaacacgggcacagtgaggaccctcaacccagctgccatgggtcggcagatgatgccatcgctcccggggcagcaaggcaccagccaggcgaggccaatggtcatgtctggcctgagccagggagtcccaggcatgccagcgttcagccagcccccagcacagcagcagatacccagtggcagctttgctccaagcagccagagccaagcctatgagcggaatgcccctcaggacgtgtcatacaattacagtggcgacggagctgggggttccttccctggcctcccggacggtgcagaccttgtggactccatcatcaaaggcgggccaggggacgagtggatgcaggagcttgatgaattgtttggtaacccctaatcaagagaggccccaagatccacaactcgagtggttaaagcttaaaaagtgaaaaagaaacaggatgttgacccatccttgttttttgtttttttgacccacgtaaactgagcaaaactgcagctggctgacaatggaagatccaggtgccaatccacagccccaccaggcctcatttcacctgattttcacacagcaatcgagatgagacgccatgcagatcccggctgcgagagagggagacacccggaggagcaggtgggaagatgaagccggccagagcccctctgcccagcatgccctgtgatcgcctggcccagcaggagctgcttcagccgagagggactattacccaagagaggtatcctcagcccctcctgccccaggtcgggagacagcagctttggagacacaaaagagacagagcctcagccagggagagtgagtcccccagaagaggctgggtggttgcacaggccaggtgcacaggttggaaatgcactgaactctgggtgccgagagatgtaaggctttgagacatgctactgaatttggagggcaggcacgaagaacagtgagattgtcaaaaggagacaaccacagatcctacaggactgtctgtctcctgccccatgatgaccctcaggaattgcaaaggctctgctgtcacaaggagagcaggctgagtttggagcagggtccatccggcagtcctgggacggcttccctctgctggtgcccctggtggcagtccctccaggtggggctggagcctgctggcgcccaatacaaaacccatacatccaggtgggtcacatctacttctggcggccgcagggcagggaaacccctactggaccctgtgtgtctgccagcctggagcctttgtctccagccctgcctttattcctccttgcctccacaccagcctccccttgcttctccttacagactatccaagaagtgaagcttatgtctttagggagccttgggcagagtccacataaatgcaggaagaacttagacaatgcctgaaatgcaaaggcgacactgga

SEQ ID NO: 4378 - DNA, 995 bp, Homo sapiens
agcccagttggctggaccaatggatggagagaatcactcagtggtatctgagtttttgtttctgggactcactcattcatgggagatccagctcctcctcctagtgttttcctctgtgctctatgtggcaagcattactggaaacatcctcattgtgttttctgtgaccactgaccctcacttacactcccccatgtactttctactggccagtctctccttcattgacttaggagcctgctctgtcacttctcccaagatgatttatgacctgttcagaaagcgcaaagtcatctcctttggaggctgcatcgctcaaatcttcttcatccacgtcgttggtggtgtggagatggtgctgctcatagccatggcctttgacagatatgtggccctatgtaagcccctccactatctgaccattatgagcccaagaatgtgcctttcatttctggctgttgcctggacccttggtgtcagtcactccctgttccaactggcatttcttgttaatttagccttctgtggccctaatgtgttggacagcttctactgtgaccttcctcggcttctcagactagcctgtaccgacacctacagattgcagttcatggtcactgttaacagtgggtttatctgtgtgggtactttcttcatacttctaatctcctacgtcttcatcctgtttactgtttggaaacattcctcaggtggttcatccaaggccctttccactctttcagctcacagcacagtggtccttttgttctttggtccacccatgtttgtgtatacacggccacaccctaattcacagatggacaagtttctggctatttttgatgcagttctcactccttttctgaatccagttgtctatacattcaggaataaggagatgaaggcagcaataaagagagtatgcaaacagctagtgatttacaagaggatctcataaatgatataataagcccttctcattaaacatgatatgg

SEQ ID NO: 4379 - DNA, 4522 bp, Homo sapiens; identical to SEQ ID NO: 4377

SEQ ID NO: 4380 - DNA, 2834 bp, Homo sapiens
gactctttcttcgcccggaacatcaatatgtgtcatgtcattgtcacctgtcgctcgatgctctggaccttgctgagtattgtggtggcttttgccgagctcattgccttcatgagtgcagactggctgatcgggaaagcgaggagccgcggcggcgtggagccggcgggcccgggcgggggctccccggagccctaccaccccaccctgggcatctacgcccgctgcatccggaacccaggggtgcagcacttccagcgggacacgctgtgcgggccctacgccgagagcttcggcgagatcgccagcggcttctggcaggccacagctattttcctggctgtgggaatctttattctctgcatggtggccttggtgtccgtcttcaccatgtgtgtacagagcatcatgaagaaaagcatcttcaatgtctgtgggctgttgcaaggaattgcaggtctattccttatcctcggtttgatactctaccctgctggctggggttgccagaaggccatagactactgtggacattatgcatctgcctacaaacctggagactgctccttgggctgggccttttataccgccattgggggcacagtcctcactttcatctgtgctgtcttctctgcacaagcagaaattgcaacctctagtgacaaagtacaggaagaaattgaagaggggaaaaatctgatctgcctcctttagtttggaagagacaatgccattttctcccttgagtaatcttgtgaaacagtccacagtttcatcatttgagtcaagtggagaactaacctttacctaccaaagccacgttccacggcccgaggcttaaacaggaccaatgagaggccacatccagctacgcaaagttactggacatgcggtctgcagtgcacattataaggaatggaacatgaaaatagtatataatcctagacctggagttgccaagttctgtcagactccatctcccccaggttcaatgaaggataataatctaaatcattagggcagcagtttctctggtaacggaagagaccgtccgccagatctgcaggctgtttctgctccaacactgcttgcttgtgagcatctctgcctcagaatggggttttgggttggagttcttgttttcctctgttctttcaagttgtctccaacgaacagaaaactataaacttactggggacaggatgtgtgctaaagggcacagcaagacactgtcttttgcttagctgaccaaaggggtcagcagggatggcgtggagtcatgctgtggaacttattctaggctgaatcctagggtaaggtggatcaactgaactgtcactccagagattttagaaatttgagtaaagaaacaataaggacctatacaatcatatgagaacaaaaatatgaaatcttgctagtgaagacgtattttttcttcttcccagcagccaggctagcaccagttctggcccagtctcctcttcttctggagatcacatgtttttcttctaaggttaggattgtgctttgactgcgaaaggaaacctcactgtttcctccttccagggactgagggtctccaagctagctgtggcttatgcagatgttcactgggaggacctgccagaatctcggcacttggggggagacctttactcccagtttggtgaccatgctgtagtcagctctatttccaatcccgacagtagcagaatggcattctacaacaaaaagaagctagttatgggagttaagtttttgtagttactggtgttgatcctgaaagcagactgagataacattaaattgctgcaactgaagaactgcagccaagaccttaattccaggaaagcacagaggacaaagttaattcaaaaagaggcgctagatcaaggtcacagcactgcctacacctgtttacaaaaagaatcaaataccactatgaataaggattcaggggtttttaatctactttccataaattaccaatatcactgattcaggaagatagtatctcagaatgaccagagcagcacagaaacaagctactctgacattatgggagcttcaaaattgtatcatgatacagaaacactccttagcactttaagaaagtgagatggaactgccagatttctggaaggagaaaaagtgtaggtatttgggttcattaatctgctcacttgaggactttgttttgaaaaagtaccttctgtggacaaggtattgtgctaccagctatacaaccctgacttcagagtttgcaaccttgccctgagtgaatcatgttaaagctgtctgagtctaaagcaccgtatcttggtgcagaacagataattatagagagatggaatgggacaaccgcagttttactacattctggtgtttggcctatatgagaagccatcttctcacagattaagggctaagggcaaaaggggtgggaggtgtggaactagccttaatgagtttcccattcctgaaccaaaattcaaagtgagtgagatgtaaatcctgtgattttggtgaagaaaaaaacgggtatcttcatagcagcctaggaaaccttaaccatatctctaacaccacacagaaagaggctggaggagccactggacaaagcttctgtctctgtgtgtacatttataatgttctaaccaagtctcaaaccttgatgaaaaacacaaaatttttccataaacttatcagaagactcacttttctttctttcttggatagagaaaccattttctgacactaggtttacaatctcagtgtccttacaagttaagtcctaagctcacaggatcctccgagcatgtccatcacct

SEQ ID NO: 4381 - DNA, 2833 bp, Homo sapiens
gactctttcttcgcccggaacatcaatatgtgtcatgtcattgtcacctgtcgctcgatgctctggaccttgctgagtattgtggtggcttttgccgagctcattgccttcatgagtgcagactggctgatcgggaaagcgaggagccgcggcggcgtggagccggcgggcccgggcgggggctccccggagccctaccaccccaccctgggcatctacgcccgctgcatccggaacccaggggtgcagcacttccagcgggacacgctgtgcgggccctacgccgagagcttcggcgagatcgccagcggcttctggcaggccacagctattttcctggctgtgggaatctttattctctgcatggtggccttggtgtccgtcttcaccatgtgtgtacagagcatcatgaagaaaagcatcttcaatgtctgtgggctgttgcaaggaattgcaggtctattccttatcctcggtttgatactctaccctgctggctggggttgccagaaggccatagactactgtggacattatgcatctgcctacaaacctggagactgctccttgggctgggccttttataccgccattgggggcacagtcctcactttcatctgtgctgtcttctctgcacaagcagaaattgcaacctctagtgacaaagtacaggaagaaattgaagaggggaaaaatctgatctgcctcctttagtttggaagagacaatgccattttctcccttgagtaatcttgtgaaacagtccacagtttcatcatttgagtcaagtggagaactaacctttacctaccaaagccacgttccacggcccgaggcttaaacaggaccaatgagaggccacatccagctacgcaaagttactggacatgcggtctgcagtgcacattataaggaatggaacatgaaaatagtatataatcctagacctggagttgccaagttctgtcagactccatctcccccaggttcaatgaaggataataatctaaatcattagggcagcagtttctctggtaacggaagagaccgtccgccagatctgcaggctgtttctgctccaacactgcttgcttgtgagcatctctgcctcagaatggggttttgggttggagttcttgttttcctctgttctttcaagttgtctccaacgaacagaaaactataaacttactggggacaggatgtgtgctaaagggcacagcaagacactgtcttttgcttagctgaccaaaggggtcagcagggatggcgtggagtcatgctgtggaacttattctaggctgaatcctagggtaaggtggatcaactgaactgtcactccagagattttagaaatttgagtaaagaaacaataaggacctatacaatcatatgagaacaaaaatatgaaatcttgctagtgaagacgtattttttcttcttcccagcagccaggctagcaccagttctggcccagtctcctcttcttctggagatcacatgtttttcttctaaggttaggattgtgctttgactgcgaaaggaaacctcactgtttcctccttccagggactgaggtctccaagctagctgtggcttatgcagatgttcactgggaggacctgccagaatctcggcacttggggggagacctttactcccagtttggtgaccatgctgtagtcagctctatttccaatcccgacagtagcagaatggcattctacaacaaaaagaagctagttatgggagttaagtttttgtagttactggtgttgatcctgaaagcagactgagataacattaaattgctgcaactgaagaactgcagccaagaccttaattccaggaaagcacagaggacaaagttaattcaaaaagaggcgctagatcaaggtcacagcactgcctacacctgtttacaaaaagaatcaaataccactatgaataaggattcaggggtttttaatctactttccataaattaccaatatcactgattcaggaagatagtatctcagaatgaccagagcagcacagaaacaagctactctgacattatgggagcttcaaaattgtatcatgatacagaaacactccttagcactttaagaaagtgagatggaactgccagatttctggaaggagaaaaagtgtaggtatttgggttcattaatctgctcacttgaggactttgttttgaaaaagtaccttctgtggacaaggtattgtgctaccagctatacaaccctgacttcagagtttgcaaccttgccctgagtgaatcatgttaaagctgtctgagtctaaagcaccgtatcttggtgcagaacagataattatacagagatggaatgggacaaccgcagttttactacattctggtgtttggcctatatgagaaaccatcttctcacagattaagggctaagggcaaaaggggtgggaggtgtggaactagccttaatgagtttcccattcctgaaccaaaattcaaagtgagtgagatgtaaatcctgtgattttggtgaagaaaaaaacgggtatcttcatagcagcctaggaaaccttaaccatatctctaacaccacacagaaagaggctggaggagccactggacaaagcttctgtctctgtgtgtacatttataatgttctaaccaagtctcaaaccttgatgaaaaacacaaaatttttccataaacttatcagaagactcacttttctttctttcttggatagagaaaccattttctgacactaggtttacaatctcagtgtccttacaagttaagtcctaagctcacaggatcctccgagcatgtccatcacct

SEQ ID NO: 4382 - DNA, 4522 bp, Homo sapiens
gacacgcgaggtcaggaagaagccgcttataaattaccgcttccttcgcgccgccgccaacgccgagccccgaggaccgcaagcccagaggacaagctgcgccaagagggagtgcggagcgttcacccagcgggtcagagagcgagcgggcaggcagcccccggccggcggaacccggcacagccgagcagagcgcgggcggcgccgcagccaccccagatccagaaccagaaccacagcccttctgaggagctcccaaacaaagcaaggagatggccaccaaggagaagctgcagtgtctgaaagatttccacaaggacatcctgaagccctcaccagggaagagcccaggcacgcggcctgaggacgaggctgagggaaaacctccgcagagggagaagtggtctagcaagatcgactttgtgctctctgtggctggcggcttcgtgggcttgggcaacgtctggcgcttcccgtacctctgctacaagaatggtggaggtgcgtttctcataccgtattttattttcctgtttgggagcggcctgcctgtgtttttcttggagatcatcataggccagtacacctctgaagggggcatcacctgctgggaaaagatctgccccttgttctctggtatcggctatgcctccgttgtaattgtgtccctcctgaatgtctactacatcgtcatcctggcctgggccacatactacctgttccagtccttccagaaggagctgccctgggcacactgcaaccacagctggaacacacctcactgcatggaggacaccatgcgcaagaacaagagtgtctggatcaccatcagctccaccaacttcacctcccctgtcatcgagttctgggagcgcaacgtgctgagcttgtcccctggaatcgaccacccaggctctctgaaatgggacctcgctctctgccttcttttagtctggctagtgtgtttcttctgcatctggaagggcgtcaggtccactgggaaggtcgtctacttcacagccacttttccattcgccatgctcctggtgctgctggtccgagggctgacgctgccgggcgcgggcgcaggcatcaagttctatctgtatcctgacatcacccgccttgaggacccacaggtgtggattgacgctgggactcagatattcttctcttatgccatctgcctgggggctatgacctcgctggggagctacaacaagtacaagtataactcgtacagggactgtatgctgctgggatgcctgaacagtggtaccagttttgtgtctggcttcgcaattttttccatcctgggcttcatggcacaagagcaaggggtggacattgctgatgtggctgagtcaggtcctggcctggccttcattgcctacccaaaagctgtgacaatgatgccgctgcccacattttggtccattcttttttttattatgcttctcttgcttggactggatagccagtttgttgaagttgaaggacagatcacatccttggttgatctttacccatccttcctaaggaagggttatcgtcgggaaatcttcatcgccttcgtgtgtagcatcagctacctgctggggctgacgatggtgacggagggtggcatgtatgtgtttcagctctttgactactatgcagctagcggtgtatgccttttgtgggttgcattctttgaatgttttgttattgcctggatatatggaggtgataacctttatgatggtattgaggacatgattggctatcggcccgggccctggatgaagtacagctgggctgtgatcactccagttctctgtgttggatgtttcatcttctcgctcgtcaagtacgtacccctgacctacaacaaaacatacgtgtaccccaactgggccattgggctgggctggagcctggccctttcctccatgctctgcgttcccttggtcatcgtcatccgcctctgccagactgaggggccgttccttgtgagagtcaagtacctgctgaccccaagggaacccaaccgctgggctgtggagcgcgagggagccacaccttacaactctcgcaccgtcatgaacggcgctctcgtgaaaccgacccacatcattgtggagaccatgatgtgagctctctcgggtcgacggggccggcggctttcctgctgtttactaacattagattctcataggaccaggtttacagagctttatatttgcactaggatttttttttttttgtaattgtcacagaaaatgtaattgtgggtatgtgtgcgtgcgtgtgtgtgtgtgtgtgtgtatcgtgtgtgtgtgttttgttttgatttgggggatattttgtacaaaaagaaaacccacgggaagatgtccgtggagaggcagagctttcatactgaattagatgtattttatgggaatttggtaaatttttctttgtatttttttttttacatataagtatatatacacttagagattgtcatatacttttaccacttgaattgatcttcttgccagcaatagatctcattttcaaaagcaattcttcggtgctgtgtagctggcagaaagttctgtccagtaaacgcaggatggaattttcctgggactctacacccatcttaaggtggtataccttccaaatcctggttcagatggaagaaatagcaggagagaggacccattagctggcagacccagggggaagaaaggagggctgtgaggagatacctcattaaacttggcttagtgaagaagagagatgccaaaggaatgaaccaacccttcacataaaggagactggctgaagctgaatgaggaggccctatagcagaagtctgattctaagagcagtagaaacttgtaccagaagcaaaatcccacttttaattttgagatggtgagtggatagtcagtagaccgtcagaaccactggccagagagggagctgctagagatccaagaaggctggcaggaatgaggctcacaactcagcctcgcaagaggtggcagaggcacaggaggccacagtccttcctggggcattccaggcagagaaggagcagaggctctcccggcaggagctggggtctcagggctcagatgagtctgttgcatttgaatggggtcatagcaggttctggtcattccccaagcaacatctcagcatctcttaaagttgcctgcaggaatgaagcatgacatacctgttgagggactaggggagtggtggggaggtgagtggaccaaaggatataggccccaggcatgcagatgggcccggtgtcggggaggggtgctttctttcctcatctccccactccccactctcagcctgggagactcctgccaagccctcattaaagatgccaccctgggctgccctggcacctagcaaggcacaccaagaacagcttttgagtctgtatcctccactgggggaagtgctcccagttcagaacaagggcagcccgtggtgctgacctaggatataacaaagctcttcacttcaaaacccctgcaatagctgggtttacagacatttaccacctgcggacccaaaagagaaggcctaggagagttttctagaaggttgggattgtcagggtcctggcccctcagaactggcttgatcaagggccttatgtggagcagaggttgtctctgaaccaggagagaaggtactatacctttcaaatccccagggcagacacacccccacccagcccctatttggacctaaactgtgccatttgaacagtcacttccaagctcagtctaaatgaaaccgaaacgtgaccacgcacaaaggcagtcactgcctcgaggggtgcagaccgcagaattttcacagcaggggctcttggaaccctggaaacccccttcttaaatttgggaggaggagtatgcctttggtgtccccctcccaaggggcaattctgaaccccatctttggcaggcatacatatttcactgtttccaaagctatctactctgccaaacaacacccagtcctattccaaactctcaacaattctatcttgttcctgtttttctatgtatttatggttgccatttgtgtctgatttgattttactgttttttccctgattttatggagtagcattgtgacctgttttcctttgtcttatataactttagtaaactaaccactgtcaatgattgagggcaggtggcacgtggggaagaggggacttggcacgcagtggctacctgggcatttgtggtcatttcagtttccatctccccagcgggggctccctgggtgaaaggccacagtattttgggttggtaggcaaattgcaacattctggacatggcctgaggaaggcctcttcttataagattctcagaccaaattctagaccaaagacacatgcagaccaagtccccaggccccgcctggaaggaagtcgttcctcaactctccccaaggcacctgtctccaatcagagccctctcgcccagccagccctggctctgtgtgcagagca

SEQ ID NO: 4383 - DNA, 1506 bp, Homo sapiens
cagggtagggcaggtggccgcggcgtggaggcagggagaatgcgactctccaaaaccctcgtcgacatggacatggccgactacagtgctgcactggacccagcctacaccaccctggaatttgagaatgtgcaggtgttgacgatgggcaatgacacgtccccatcagaaggcaccaacctcaacgcgcccaacagcctgggtgtcagcgccctgtgtgccatctgcggggaccgggccacgggcaaacactacggtgcctcgagctgtgacggctgcaagggcttcttccggaggagcgtgcggaagaaccacatgtactcctgcagatttagccggcagtgcgtggtggacaaagacaagaggaaccagtgccgctactgcaggctcaagaaatgcttccgggctggcatgaagaaggaagccgtccagaatgagcgggaccggatcagcactcgaaggtcaagctatgaggacagcagcctgccctccatcaatgcgctcctgcaggcggaggtcctgtcccgacagatcacctcccccgtctccgggatcaacggcgacattcgggcgaagaagattgccagcatcgcagatgtgtgtgagtccatgaaggagcagctgctggttctcgttgagtgggccaagtacatcccagctttctgcgagctccccctggacgaccaggtggccctgctcagagcccatgctggcgagcacctgctgctcggagccaccaagagatccatggtgttcaaggacgtgctgctcctaggcaatgactacattgtccctcggcactgcccggagctggcggagatgagccgggtgtccatacgcatccttgacgagctggtgctgcccttccaggagctgcagatcgatgacaatgagtatgcctacctcaaagccatcatcttctttgacccagatgccaaggggctgagcgatccagggaagatcaagcggctgcgttcccaggtgcaggtgagcttggaggactacatcaacgaccgccagtatgactcgcgtggccgctttggagagctgctgctgctgctgcccaccttgcagagcatcacctggcagatgatcgagcagatccagttcatcaagctcttcggcatggccaagattgacaacctgttgcaggagatgctgctgggaggtccgtgccaagcccaggaggggcggggttggagtggggactccccaggagacaggcctcacacagtgagctcacccctcagctccttggcttccccactgtgccgctttgggcaagttgcttaacctgtctgtgcctcagtttcctcaccagaaaaatgggaacaaggcaatggtctatttgttcaggcaccgagaacctagcacgtgccagtcactgttctaagtgctggcaattcagcaaagaacaagatctttgccctcggggaggctgtgtgtgtgtgagtatgtatggatgcgtggatatctgtgtatatgcccgtatgtgcgtgcatgtgt

SEQ ID NO: 4384 - DNA, 3016 bp, Homo sapiens
acaccgtgctcctggaatcacccagcatgttgcaaggtctcctgccagtcagtctcctcctctctgttgcagtaagtgctataaaagaactccctggggtgaagaagtatgaagtggtttatcctataagacttcatccactgcataaaagagaggccaaagagccagagcaacaggaacaatttgaaactgaattaaagtataaaatgacaattaatggaaaaattgcagtgctttatttgaaaaaaaacaagaacctccttgcaccaggctacacggaaacatattataattccactggaaaggagatcaccacaagcccacaaattatggatgattgttattatcaaggacatattcttaatgaaaaggtttctgacgctagcatcagcacatgtaggggtctaaggggctacttcagtcagggggatcaaagatactttattgaacctttaagccccatacatcgggatggacaggagcatgcactcttcaagtataaccctgatgaaaagaattatgacagcacctgtgggatggatggtgtgttgtgggcccacgatttgcagcagaacattgccctacctgccaccaaactagtaaaattgaaagacaggaaggttcaggaacatgagaaatacatagaatattatttggtcctggataatggtgagtttaaaaggtacaatgagaatcaagatgagatcagaaagagggtatttgagatggctaattatgtcaacatgctttataaaaagctcaatactcatgtggccttagttggtatggaaatctggactgacaaggataagataaagataaccccaaatgcaagcttcaccttggagaatttttctaaatggagggggagtgttctctcaagaagaaagcgtcatgatattgctcagttaatcacagcaacagaacttgctggaacgactgtgggtcttgcatttatgtctacaatgtgttctccttattctgttggcgttgttcaggaccacagcgataatcttcttagagttgcagggacaatggcacatgaaatgggccacaactttggaatgtttcatgacgactattcttgcaagtgtccttctacaatatgtgtgatggacaaagcactgagcttctatatacccacagacttcagttcctgcagccgtctcagctatgacaagttttttgaagataaattatcaaattgcctctttaatgctccattgcctacagatatcatatccactccaatttgtgggaaccagttggtggaaatgggagaggactgtgattgtgggacatctgaggaatgtaccaatatttgctgtgatgctaagacatgtaaaatcaaagcaacttttcaatgtgcattaggagaatgttgtgaaaaatgccaatttaaaaaggctgggatggtgtgcagaccagcaaaagatgagtgcgacctgcctgaaatgtgtaatggtaaatctggtaattgtcctgatgatagattccaagtcaatggcttcccttgccatcacgggaagggccactgcttgatggggacatgccccacactgcaggagcagtgcacagagctgtggggaccaggaactgaggttgcagataagtcatgttacaacaggaatgaaggtgggtcaaagtacgggtactgtcgcagagtggatgacacactcattccctgcaaagcaaatgataccatgtgtgggaagttgttctgtcaaggtgggtcggataatttgccctggaaaggacggatagtgactttcctgacatgtaaaacatttgatcctgaagacacaagtcaagaaataggcatggtggccaatggaactaagtgtggcgataacaaggtttgcattaatgcagaatgtgtggatattgagaaagcctacaaatcaaccaattgctcatctaagtgcaaaggacatgctgtgtgtgaccatgagctccagtgtcaatgtgaggaaggatggatccctcccgactgcgatgactcctcagtggtcttccacttctccattgtggttggggtgctgttcccaatggcggtcatttttgtggtggttgctatggtaatccggcaccagagctccagagaaaagcagaagaaagatcagaggccactatctaccactggcaccaggccacacaaacagaagaggaaaccccagatggtaaaggctgttcaaccccaagagatgagtcagatgaagccccatgtgtatgatctgccagtagaaggcaatgagcccccagcctcttttcataaagacacaaacgcacttccccctactgttttcaaggataatccaatgtctacacctaaggactcaaatccaaaagcatgaagcaacagctaagcaagaactaatggctaaattatcaacttggaaaactggaaaatctggatggcagagaaatatactatctcaccagtatttgctctcgactcaagaaggttaacattttctgattcatgttagactttgaagagactaaagaaaattttcaagaggaacatatgcctgagaacctttgcatgaatttaaaatttcaattatccattcttataagaaggaagatgattgtaaagaaatatctccgaagttaaaatctgtaataggaattgattcattctctaatgaaaacaaaacataaaaacatcacactaatcttggaggaataagaaaaattgtacatccattaaatgtacaattgattgcaacatcttgattgttttaaccattaacttgtcaaattacaatcacagttaagaaaatgatgtaaaattctgttttgtggatctctttcctagattagcttctgaaatcattattagctatatcatttgaggttttctacaatttggtataactaagaatttaaaaatattttatcatatatatttgtataattaattactggcatggttaaagtggttttcactttttaaatggagaaaatttcagttaaattaataggataaaccaggttgcgaactggtgacctg

SEQ ID NO: 4385 - DNA, 4520 bp, Homo sapiens
gacacgcgaggtcaggaagaagccgcttataaattaccgcttccttcgcgccgccgccaacgccgagccccgaggaccgcaagcccagaggacaagctgcgccaagagggagtgcggagcgttcacccagcgggtcagagagcgagcgggcaggcagcccccggccggcggaacccggcacagccgagcagagcgcgggcggcgccgcagccaccccagatccagaaccagaaccacagcccttctgaggagctcccaaaccaaggagatggccaccaaggagaagctgcagtgtctgaaagatttccacaaggacatcctgaagccctcaccagggaagagcccaggcacgcggcctgaggacgaggctgagggaaaacctccgcagagggagaagtggtctagcaagatcgactttgtgctctctgtggctggcggcttcgtgggcttgggcaacgtctggcgcttcccgtacctctgctacaagaatggtggaggtgcgtttctcataccgtattttattttcctgtttgggagcggcctgcctgtgtttttcttggagatcatcataggccagtacacctctgaagggggcatcacctgctgggaaaagatctgccccttgttctctggtatcggctatgcctccgttgtaattgtgtccctcctgaatgtctactacatcgtcatcctggcctgggccacatactacctgttccagtccttccagaaggagctgccctgggcacactgcaaccacagctggaacacacctcactgcatggaggacaccatgcgcaagaacaagagtgtctggatcaccatcagctccaccaacttcacctcccctgtcatcgagttctgggagcgcaacgtgctgagcttgtcccctggaatcgaccacccaggctctctgaaatgggacctcgctctctgccttcttttagtctggctagtgtgtttcttctgcatctggaagggcgtcaggtccactgggaaggtcgtctacttcacagccacttttccattcgccatgctcctggtgctgctggtccgagggctgacgctgccgggcgcgggcgcaggcatcaagttctatctgtatcctgacatcacccgccttgaggacccacaggtgtggattgacgctgggactcagatattcttctcttatgccatctgcctgggggctatgacctcgctggggagctacaacaagtacaagtataactcgtacagggactgtatgctgctgggatgcctgaacagtggtaccagttttgtgtctggcttcgcaattttttccatcctgggcttcatggcacaagagcaaggggtggacattgctgatgtggctgagtcaggtcctggcctggccttcattgcctacccaaaagctgtgacaatgatgccgctgcccacattttggtccattcttttttttattatgcttctcttgcttggactggatagccagtttgttgaagttgaaggacagatcacatccttggttgatctttacccatccttcctaaggaagggttatcgtcgggaaatcttcatcgccttcgtgtgtagcatcagctacctgctggggctgacgatggtgacggagggtggcatgtatgtgtttcagctctttgactactatgcagctagcggtgtatgccttttgtgggttgcattctttgaatgttttgttattgcctggatatatggaggtgataacctttatgatggtattgaggacatgattggctatcggcccgggccctggatgaagtacagctgggctgtgatcactccagttctctgtgttggatgtttcatcttctcgctcgtcaagtacgtacccctgacctacaacaaaacatacgtgtaccccaactgggccattgggctgggctggagcctggccctttcctccatgctctgcgttcccttggtcatcgtcatccgcctctgccagactgaggggccgttccttgtgagagtcaagtacctgctgaccccaagggaacccaaccgctgggctgtggagcgcgagggagccacaccttacaactctcgcaccgtcatgaacggcgctctcgtgaaaccgacccacatcattgtggagaccatgatgtgagctctctcgggtcgacggggccggcggctttcctgctgtttactaacattagattctcataggaccaggtttacagagctttatatttgcactaggatttttttttttttgtaattgtcacagaaaatgtaattgtgggtatgtgtgcgtgcgtgtgtgtgtgtgtgtgtgtgtatcgtgtgtgtgtgttttgttttgatttgggggatattttgtacaaaaagaaaacccacgggaagatgtccgtggagaggcagagctttcatactgaattagatgtattttatgggaatttggtaaatttttctttgtatttttttttttacatataagtatatatacacttagagattgtcatatacttttaccacttgaattgatcttcttgccagcaatagatctcattttcaaaagcaattcttcggtgctgtgtagctggcagaaagttctgtccagtaaacgcaggatggaattttcctgggactctacacccatcttaaggtggtataccttccaaatcctggttcagatggaagaaatagcaggagagaggacccattagctggcagacccagggggaagaaaggagggctgtgaggagatacctcattaaacttggcttagtgaagaagagagatgccaaaggaatgaaccaacccttcacataaaggagactggctgaagctgaatgaggaggccctatagcagaagtctgattctaagagcagtagaaacttgtaccagaagcaaaatcccacttttaattttgagatggtgagtggatagtcagtagaccgtcagaaccactggccagagagggagctgctagagatccaagaaggctggcaggaatgaggctcacaactcagcctcgcaagaggtggcagaggcacaggaggccacagtccttcctggggcattccaggcagagaaggagcagaggctctcccggcaggagctggggtctcagggctcagatgagtctgttgcatttgaatggggtcatagcaggttctggtcattccccaagcaacatctcagcatctcttaaagttgcctgcaggaatgaagcatgacatacctgttgagggactaggggagtggtggggaggtgagtggaccaaaggatataggccccaggcatgcagatgggcccggtgtcggggaggggtgctttctttcctcatctccccactccccactctcagcctgggagactcctgccaagccctcattaaagatgccaccctgggctgccctggcacctagcaaggcacaccaagaacagcttttgagtctgtatcctccactgggggaagtgctcccagttcagaacaagggcagcccgtggtgctgacctaggatataacaaagctcttcacttcaaaacccctgcaatagctgggtttacagacatttaccacctgcggacccaaaagagaaggcctaggagagttttctagaaggttgggattgtcagggtcctggcccctcagaactggcttgatcaagggccttatgtggagcagaggttgtctctgaaccaggagagaaggtactatacctttcaaatccccagggcagacacacccccacccagcccctatttggacctaaactgtgccatttgaacagtcacttccaagctcagtctaaatgaaaccgaaacgtgaccacgcacaaaggcagtcactgcctcgaggggtgcagaccgcagaattttcacagcaggggctcttggaaccctggaaacccccttcttaaatttgggaggaggagtatgcctttggtgtccccctcccaaggggcaattctgaaccccatctttggcaggcatacatatttcactgtttccaaagctatctactctgccaaacaacacccagtcctattccaaactctcaacaattctatcttgttcctgtttttctatgtatttatggttgccatttgtgtctgatttgattttactgttttttccctgattttatggagtagcattgtgacctgttttcctttgtcttatataactttagtaaactaaccactgtcaatgattgagggcaggtggcacgtggggaagaggggacttggcacgcagtggctacctgggcatttgtggtcatttcagtttccatctccccagcgggggctccctgggtgaaaggccacagtattttgggttggtaggcaaattgcaacattctggacatggcctgaggaaggcctcttcttataagattctcagaccaaattctagaccaaagacacatgcagaccaagtccccaggccccgcctggaaggaagtcgttcctcaactctccccaaggcacctgtctccaatcagagccctctcgcccagccagccctggctctgtgtgcagagca

SEQ ID NO: 4386 - DNA, 2620 bp, Homo sapiens
agctcagagcagagcaccgaaagtggccactaccagcatgaagagcccaacaattcaaactggtgaagtgagaaaaacagaatgcagctttcaaggttcgtttcaagcagttggcttgtgggactctgagagatgctgctgcccatgacatgcgggaattatcatgatcaactacccagcttggatttcacccagtggccaagagctttgtgtgggagacggcaagggttggatttttcaaaagagtaaaccaggtggatacatttgcaaagtggaatcctccaggtgcctttaaggagtttacagtctagtaggtatgaatccagccatcctcagcagtggcaccgatatcttcaaaagtgtcgtttgtctggctctctgccttctggatgggaagcctaccctgatgtctctcttcaaatctgataaatcatgaggaacctataacccttttggccacatgcaaaaaagcaagacccgtgaccaaggtgtagactaagaagtggagtcatgcttcacacggccatatcatgctggcagccattcctgggtctggctgtggtgttaatcttcatgggatccaccattggctgccccgctcgctgtgagtgctctgcccagaacaaatctgttagctgtcacagaaggcgattgatcgccatcccagagggcattcccatcgaaaccaaaatcttggacctcagtaaaaacaggctaaaaagcgtcaaccctgaagaattcatatcatatcctctgctggaagagatagacttgagtgacaacatcattgccaatgtggaaccaggagcattcaacaatctgtttaacctgcgttccctccgcctaaaaggcaatcgtctaaagctggtccctttgggagtattcacggggctgtccaatctcactaagcttgacattagtgagaataagattgtcattttactagactacatgttccaagatctacataacctgaagtctctagaagtgggggacaatgatttggtttatatatcacacagggcattcagtgggcttcttagcttggagcagctcaccctggagaaatgcaacttaacagcagtaccaacagaagccctctcccacctccgcagcctcatcagcctgcatctgaagcatctcaatatcaacaatatgcctgtgtatgcctttaaaagattgttccacctgaaacacctagagattgactattggcctttactggatatgatgcctgccaatagcctctacggtctcaacctcacatccctttcagtcaccaacaccaatctgtctactgtacccttccttgcctttaaacacctggtatacctgactcaccttaacctctcctacaatcccatcagcactattgaagcaggcatgttctctgacctgatccgccttcaggagcttcatatagtgggggcccagcttcgcaccattgagcctcactccttccaagggctccgcttcctacgcgtgctcaatgtgtctcagaacctgctggaaactttggaagagaatgtcttctcctcccctagggctctggaggtcttgagcattaacaacaaccctctggcctgtgactgccgccttctctggatcttgcagcgacagcccaccctgcagtttggtggccagcaacctatgtgtgctggcccagacaccatccgtgagaggtctttcaaggatttccatagcactgccctttctttttactttacctgcaaaaaacccaaaatccgtgaaaagaagttgcagcatctgctagtagatgaagggcagacagtccagctagaatgcagtgcagatggagacccgcagcctgtgatttcctgggtgacaccccgaaggcgtttcatcaccaccaagtccaatggaagagccaccgtgttgggtgatggcaccttggaaatccgctttgcccaggatcaagacagcgggatgtatgtttgcatcgctagcaatgctgctgggaatgataccttcacagcctccttaactgtgaaaggattcgcttcagatcgttttctttatgcgaacaggacccctatgtacatgaccgactccaatgacaccatttccaatggcaccaatgccaatactttttccctggaccttaaaacaatactggtgtctacagctatgggctgcttcacattcctgggagtggttttattttgttttcttctcctttttgtgtggagccgagggaaaggcaagcacaaaaacagcattgaccttgagtatgtgcccagaaaaaacaatggtgctgttgtggaaggggaggtagctggacccaggaggttcaacatgaaaatgatttgaaggcccacccctcacattactgtctctttgtcaatgtgggtaatcagtaagacagtatggcacagtaaattactagattaagaggcagccatgtgcagctgcccctgtatcaaaagcagggtctatggaagcaggaggacttccaatggagactctccatcgaaaggcaggcaggcaggcatgtgtcagagcccttcacacagtgggatactaagtgtttgcgttgcaaatattggcgttctggggatctcagtaatgaacctgaatatttggctcacactcacggaca

SEQ ID NO: 4387 - DNA, 1506 bp, Homo sapiens; identical to SEQ ID NO: 4383

SEQ ID NO: 4388 - DNA, 422 bp, Homo sapiens
gattaggcctggtttgcgctggagagtggtcttggttgtgagggtcataagatgggaactctcccggcacgtagacatatcccgccgtgggtgaaagttcccgaagacctgaaagatccagaggtgttccaggtccagacgcggctgctgaaagccattttcggcccggacggatctcgaatcccttacatcgagcaggtgagcaaggccatgctcgagctgaaggctctggagtcttcagacctcaccgaggtcgtggtttacggctcctatttgtacaagctccggaccaagtggatgctccagtccatggctgagtggcaccgccagcgccaggagcgagggatgctcaaacttgccgaagccatgaatgccctcgaactaggcccttggatgaagtgaaccagtttccagccaatgca

SEQ ID NO: 4389 - DNA, 6137 bp, Homo sapiens
aggtggctgctacaccccatgtaaaaagcggaaaataaaatgaagattttccagcgcaagatgcggtactggttgcttccaccttttttggcaattgtttatttctgcaccattgtccaaggtcaagtggctccacccacaaggttaagatataatgtaatatctcatgacagtatacagatttcatggaaggctccaagagggaaatttggtggttacaaacttcttgtgactccaacttcaggtggaaaaactaaccagctgaatctgcagaacactgcaactaaagcaattattcaaggccttatgccagaccagaattacacagttcaaattattgcatacaataaagataaagaaagcaagccagctcaaggccaattcagaattaaagatttagaaaaaagaaaggatccaaagcccagagtcaaagttgtggacagaggaaatgggagtagaccatcttcaccagaagaagtgaaatttgtctgtcaaactccagcaattgctgacattgtaatcctggtcgatggttcatggagtattggaagattcaacttcagactggttcggcatttcttggaaaacctggttacagcattcgatgtgggctcagagaagacacgaattggtcttgcacagtatagtggtgaccccagaatagaatggcacttgaatgcatttagcacaaaagatgaagtgattgaagctgtccgaaacctcccatataaaggaggaaatacactaacaggtcttgctttgaactacatttttgaaaatagcttcaaaccagaagcaggatcaaggactggagtatccaaaattggcattttaatcacagatggaaaatcccaagatgacattattccaccatctagaaatcttcgtgagtctggtgtagaactgtttgccataggggtgaaaaacgcggatgtgaatgagctgcaggagatcgcctctgaaccagacagcactcatgtgtacaatgttgccgaattcgatctgatgcacacagttgtggagagtctgaccaggactctctgctctagagtggaagaacaggacagagaaattaaagcctcagcccatgccatcactgggccgcctacggagttgattacttctgaagtcactgccagaagctttatggttaactggactcatgccccaggaaatgtggaaaaatacagagttgtgtattatcctaccaggggtggaaaaccagacgaggtggtggtagatggaactgtatcttccacagtgttgaaaaacttgatgtctttaactgaatatcagatagcagtctttgcaatctatgcccacactgctagtgaaggcctacggggaactgaaactacacttgctttaccgatggcttctgaccttctactgtacgacgtgactgagaacagcatgcgagtcaaatgggatgcagtgcctggggcctcaggttacctgatcctttatgctcctctaacagagggcctggctggggatgaaaaagagatgaaaattggagagacccacacagatattgaattgagtgggttgttgcccaatacagaatacacagtcacagtttatgccatgtttggagaagaggccagtgatcctgttacgggacaagaaacaacattggctttaagtccaccaagaaacctgagaatctccaatgttggctctaacagtgctcgattaacctgggacccaacttcaagacagatcaatggttatcgaattgtatataacaatgcagatgggactgaaatcaatgaggttgaagtcgatcctattactaccttccctctgaagggcttgacacctctcacagagtatactattgctattttctccatctatgatgaaggacagtcagagcctctgactggagtttttaccaccgaggaagttccagcccagcaatacttagaaattgatgaggtgacgacagacagttttagggtgacctggcatcccctctcagctgatgaagggctacacaaattgatgtggattccagtctatggggggaagactgaggaggttgtcctgaaagaagagcaggactcacatgttattgaaggcctggagcccggtacggagtatgaagtttcactattggccgtacttgatgatggaagcgagagtgaggtggtgactgctgtcgggaccacacttgacagtttttggacagaaccagctacaaccatagtgcctaccacatctgtgacttcagttttccagacgggaatcagaaacctagttgtaggtgatgaaactacttctagcctgcgggtaaaatgggacatttctgacagcgatgtgcagcagtttagggtgacctacatgacagctcaaggggaccctgaggaagaagtcataggaacggttatggtgcctggaagccagaacaacctccttctgaagcctctgcttcctgatactgaatacaaagtcacagtgactcccatctacacggatggcgaaggcgtcagcgtctccgctcctggaaaaaccttaccatcctcggggccccagaacttgcgggtgtccgaggaatggtataaccggttgcgcattacgtgggaccccccatcttccccggtgaaaggctatagaattgtctacaaacctgtcagtgttcctggtccaacactggaaacgtttgtgggagctgacattaacaccatccttatcacaaacctcctcagcggaatggactacaatgtgaagatatttgcctcccaggcctcaggcttcagcgacgccctgacaggcatggtgaaaacattgttcttgggtgttaccaatctccaagccaaacatgttgaaatgaccagcttgtgtgcccactggcaggtacatcgccatgccacagcctatagggttgttatagaatccctccaggataggcaaaagcaagaatccactgtgggtggagggacaaccaggcattgcttctatggacttcagcctgattctgaatataaaatcagtgtttatacaaagctccaggagattgaaggacctagtgtgagcataatggaaaaaacacaatcacttcctacacgaccaccaacttttcctccaaccattccaccagcaaaagaagtatgtaaggcggccaaggctgacctggtatttatggtggatggatcctggagcattggagatgaaaatttcaataagatcatcagctttctatacagcactgttggagccctgaacaagattggcacagatggaacccaagttgcaatggttcagttcactgatgatcccagaacagaatttaaactaaatgcttacaaaaccaaagagactcttcttgatgcaattaaacacatttcatacaaaggaggaaatacaaaaacaggaaaagcaattaagtatgttcgagataccttgttcactgcagagtcaggtacaagaaggggcatcccaaaggttatcgtggttataactgatggaagatcacaagatgatgtgaacaaaatctccagggagatgcaattagatggctatagcatttttgcaattggtgtggccgatgcagattactcggagttggttagcattggcagtaagcccagcgcacgccatgtcttctttgtggatgactttgacgcctttaagaaaatcgaagatgagttaattacttttgtctgcgaaacagcatcagcaacctgtccagtggtacacaaggatggcattgatcttgcaggatttaagatgatggaaatgtttggtttggttgaaaaagatttttcatcagtggaaggggtttctatggagcctggtaccttcaatgtgtttccatgttaccaactccataaagatgccctggtttcccagccaaccaggtacttgcacccagaaggattgccctccgactacacaatcagttttctattccggattcttcctgacactccacaggagccatttgctctttgggagattttaaataaaaattctgacccattggttggggttattttagacaatggtgggaaaactctaacatatttcaactatgaccagagtggggattttcaaactgttactttcgaaggacctgaaattaggaaaattttttatggaagctttcacaagctacacattgttgtcagtgagactttggtcaaagtggttattgactgcaagcaagtgggtgagaaggcaatgaacgcatcagctaatatcacgtcagatggtgtagaagtgctagggaaaatggttcgatcaagaggaccaggtggaaactctgcaccgttccagttacagatgtttgatattgtttgctccacatcatgggccaatacagacaaatgctgtgaacttccaggcctgagagatgatgagtcttgcccagaccttccccattcctgctcctgttctgaaaccaatgaagtggctctgggaccagcgggcccaccaggtggtccaggactccgaggaccaaagggccagcaaggtgaaccgggtccaaagggaccagatggccctcggggtgaaattggtctgccaggacctcagggtccacctggacctcaaggaccaagtggtctgtccattcaaggaatgcccggaatgccaggagaaaaaggagagaaaggagatactggccttccaggtccacagggtatcccaggaggcgttggttcaccaggacgtgatggctcaccaggccagaggggccttccgggaaaggatggatcctcgggacctccaggaccaccagggccaataggcattcctggcacccctggagtcccagggatcacaggaagcatgggaccgcaaggcgccctgggaccacctggtgtccctggagcaaagggggaacgaggagagcggggtgacctgcagtctcaagccatggtgagatcagtggcgcgtcaagtatgcgaacagctcatccagagtcacatggccaggtacactgccatcctcaaccagattcccagccactcctcatccatccggactgtccaagggcctcctggggagcctgggaggccaggctcacctggagcccctggtgaacaaggacccccaggcacaccaggcttccccggaaatgcaggcgtgccagggaccccaggagaacgaggtctaactggtatcaaaggagaaaaaggaaatccaggcgttggaacccaaggtccaagaggcccccctggaccagcaggaccttcaggggagagtcggcctggcagccctgggccccctggctctcctggaccaagaggcccaccaggtcatctgggggttcctggaccccaaggtccttctggccagcctggatattgtgacccctcatcatgttctgcctatggtgtgagagctccccatccagatcagccagagttcacccctgtccaagatgagctggaagccatggaactgtggggccctggagtctgatagcctcaggagaaatttgaagaccaactgcaagaactcttaaggaatcttgtttgagaaaatgttgttatgtggtttgtatgctacttttggggggcagggctcatttcagcagcctaaatctcctccttggataatgttaatattattattattattaacaaaaaatatatatttttaaaaagttcccttaatctatgacatggtagcaatgatttccctttggtgtcttaatggcatgtcagataatttgtttttccagagaagagagctcaaagaggaattgggaaaaataaattgaactctggaatcttctctctcaagtcctaaaatgaacaaacagatatgattgtgtttgagggaaatatgtccctagcaggaaaagaattcaaagaggttcaaagaatatgtcacttactcctacttgctgtaggaataaccttgctgataagaaaaaaagggacaatattggagaaactacctcttgtttaattgatctgtccaactctgagatcacttggtaactggtttcatgtgtatccaaaaatcagcatttggatttaagctttctgaatttggtagtttaagaaacagatttagtttttcagtggttttaactcatgtgaaataatgattttccaccagctctgatgcaaagagatataattttaatgaacgatttatccagcagtgtgttccaggggttg

SEQ ID NO: 4390 - DNA, 1870 bp, Homo sapiens
acaggaagccacatcaaaccctggggcctttgctgggcctctccatctgcccagttactgggaggtagatagccccaggaaggaatccagtcaggcctgggcaccaggccaggagtggataaagctagaaagagacaccacagaagagaagatgtttgaacagctgaagccaatcgaacctgtacagaagacgctcccatgggtgggcgaggtagctgccaccctgcaggaagccatgaagagagattgctggagggaggcacgggtgaagaagaagccagtcacctttgaggatgtggcagtgaatttcacccaggaagagtgggactgtctagatgccagccagagggtcctttaccaggatgttatgtcggaaacctttaagaatctaacatctgtggccagaatctttctgcataagccagagctaatcaccaagcttgagcaagaagaggaacagtggagagagtttgtccatctcccaaacacagaaggcctttcagaaggcaagaagaaagagcttcgagaacaacatcccagtctgagagatgaggggactagtgatgacaaggtcttccttgcatgcagaggggccggccagtgccccctatctgccccagctgggactatggacaggacccgggtgcttcaagcatcccaggctgggccaccctttttttgctacacctgtggcaaatgtttcagcaggcgctcctacctctatagccaccagtttgttcacaatcccaagctgactaacagctgcagtcagtgtgggaagttgtttcggagccccaagtccctcagctatcacagacgcatgcatcttggggagaggcccttctgttgcacgttctgtgacaagacctactgtgatgcttctggactaagtcgtcaccgccgcgtccatctgggttaccggccccattcatgctctgtgtgtgggaagagcttccgggaccagtctgagctcaaacgccaccagaagatacaccaaaaccaggagccagtggatggaaaccaggagtgtactttgaggattccaggcacccaggctgaattccagacacccatcgccagaagccagaggtccatccaggggcttttggatgtgaaccatgcaccagtggccaggtcccaggaacccatatttagaactgagggtcctatggcccagaaccaggcatctgtacttaagaaccaagcacctgtgaccaggacccaggcacccatcactggaaccctctgtcaggatgccagatccaactctcatccagtgaagccctcaagactcaatgtcttctgttgcccccattgttctttgacttttagcaagaaatcctatctctccagacaccagaaggcccacctcacagagccgcccaactactgcttccattgcagcaagtctttcagctcattttccaggctggtcagacaccagcagacccactggaagcagaagagctacctttgccctatctgtgacctctcctttggggagaaagagggccttatggatcactggaggggctataaaggcaaggacctgtgccagagcagccaccataaatgccgggtgatcctgggccagtggcttggcttctctcatgatgtccccactatggctggggaggaatggaagcatggaggtgatcaatctccccccaggatccatacccccaggagaagaggcctaagagagaaggcctgcaaaggagacaaaacaaaggaggcagtgagcatcttgaaacataaataaatggcctttctgactgagctctttctttgtgtttagttttcctgaggactgacctctggggtaatgaggctggagtagagggagacaggtgcgtggataaggaaggaa

SEQ ID NO: 4391 - DNA, 5341 bp, Homo sapiens
tctgcctcggctctttgttgttcgctttggatggttcttgaaagtgtctgagcctcctcggaaatcctggggccggagaagacaaaccttggaattcttcctctgcaaaagtctctgagatactgacaagcgtccggaaaggtcgacgagtaattgccctgaaaactcttggctaattgacccacgttgcttatattaagcctttgtgtgtggtgtgtggcttcatacatttggggaccctatttccactccctcctcttggcatgagactgtatacaggatccacccgaggacaatgattgcggagcccgctcacttttacctgtttggattaatatgtctctgttcaggctcccgtcttcgtcaggaagattttccacctcgcattgttgaacacccttcagacctgattgtctcaaaaggagaacctgcaactttgaactgcaaagctgaaggccgccccacacccactattgaatggtacaaagggggagagagagtggagacagacaaagatgaccctcgctcacaccgaatgttgctgccgagtggatctttatttttcttacgtatagtacatggacggaaaagtagacctgatgaaggagtctatgtctgtgtagcaaggaattaccttggagaggctgtgagccacaatgcatcgctggaagtagccatacttcgggatgacttcagacaaaacccttcggatgtcatggttgcagtaggagagcctgcagtaatggaatgccaacctccacgaggccatcctgagcccaccatttcatggaagaaagatggctctccactggatgataaagatgaaagaataactatacgaggaggaaagctcatgatcacttacacccgtaaaagtgacgctggcaaatatgtttgtgttggtaccaatatggttggggaacgtgagagtgaagtagccgagctgactgtcttagagagaccatcatttgtgaagagacccagtaacttggcagtaactgtggatgacagtgcagaatttaaatgtgaggcccgaggtgaccctgtacctacagtacgatggaggaaagatgatggagagctgcccaaatccagatatgaaatccgagatgatcataccttgaaaattaggaaggtgacagctggtgacatgggttcatacacttgtgttgcagaaaatatggtgggcaaagctgaagcatctgctactctgactgttcaagttgggtctgaacctccacattttgttgtgaaaccccgtgaccaggttgttgctttgggacggactgtaacttttcagtgtgaagcaaccggaaatcctcaaccagctattttctggaggagagaagggagtcagaatctacttttctcatatcaaccaccacagtcatccagccgattttcagtctcccagactggcgacctcacaattactaatgtccagcgatctgatgttggttattacatctgccagactttaaatgttgctggaagcatcatcacaaaggcatatttggaagttacagatgtgattgcagatcggcctcccccagttattcgacaaggtcctgtgaatcagactgtagccgtggatggcactttcgtcctcagctgtgtggccacaggcagtccagtgcccaccattctgtggagaaaggatggagtcctcgtttcaacccaagactctcgaatcaaacagttggagaatggagtactgcagatccgatatgctaagctgggtgatactggtcggtacacctgcattgcatcaacccccagtggtgaagcaacatggagtgcttacattgaagttcaagaatttggagttccagttcagcctccaagacctactgacccaaatttaatccctagtgccccatcaaaacctgaagtgacagatgtcagcagaaatacagtcacattatcatggcaaccaaatttgaattcaggagcaactccaacatcttatattatagaagccttcagccatgcatctggtagcagctggcagaccgtagcagagaatgtgaaaacagaaacatctgccattaaaggactcaaacctaatgcaatttaccttttccttgtgagggcagctaatgcatatggaattagtgatccaagccaaatatcagatccagtgaaaacacaagatgtcctaccaacaagtcagggggtggaccacaagcaggtccagagagagctgggaaatgctgttctgcacctccacaaccccaccgtcctttcttcctcttccatcgaagtgcactggacagtagatcaacagtctcagtatatacaaggatataaaattctctatcggccatctggagccaaccacggagaatcagactggttagtttttgaagtgaggacgccagccaaaaacagtgtggtaatccctgatctcagaaagggagtcaactatgaaattaaggctcgccctttttttaatgaatttcaaggagcagatagtgaaatcaagtttgccaaaaccctggaagaagcacccagtgccccaccccaaggtgtaactgtatccaagaatgatggaaacggaactgcaattctagttagttggcagccacctccagaagacactcaaaatggaatggtccaagagtataaggtttggtgtctgggcaatgaaactcgataccacatcaacaaaacagtggatggttccaccttttccgtggtcattccctttcttgttcctggaatccgatacagtgtggaagtggcagccagcactggggctgggtctggggtaaagagtgagcctcagttcatccagctggatgcccatggaaaccctgtgtcacctgaggaccaagtcagcctcgctcagcagatttcagatgtggtgaagcagccggccttcatagcaggtattggagcagcctgttggatcatcctcatggtcttcagcatctggctttatcgacaccgcaagaagagaaacggacttactagtacatacgcgggtatcagaaaagtaacttaccagagaggaggcgaagctgtcagcagtggagggaggcctggacttctcaacatcagtgaacctgccgcgcagccatggctggcagacacgtggcctaatactggcaacaaccacaatgactgctccatcagctgctgcacggcaggcaatggaaacagcgacagcaacctcactacctacagtcgcccagctgattgtatagcaaattataacaaccaactggataacaaacaaacaaatctgatgctccctgagtcaactgtttatggtgatgtggaccttagtaacaaaatcaatgagatgaaaaccttcaatagcccaaatctgaaggatgggcgttttgtcaatccatcagggcagcctactccttacgccaccactcagctcatccagtcaaacctcagcaacaacatgaacaatggcagcggggactctggcgagaagcactggaaaccactgggacagcagaaacaagaagtggcaccagttcagtacaacatcgtggagcaaaacaagctgaacaaagattatcgagcaaatgacacagttcctccaactatcccatacaaccaatcatacgaccagaacacaggaggatcctacaacagctcagaccggggcagtagtacatctgggagtcaggggcacaagaaaggggcaagaacacccaaggtaccaaaacagggtggcatgaactgggcagacctgcttcctcctcccccagcacatcctcctccacacagcaatagcgaagagtacaacatttctgtagatgaaagctatgaccaagaaatgccatgtcccgtgccaccagcaaggatgtatttgcaacaagatgaattagaagaggaggaagatgaacgaggccccactccccctgttcggggagcagcttcttctccagctgccgtgtcctatagccatcagtccactgccactctgactccctccccacaggaagaactccagcccatgttacaggattgtccagaggagactggccacatgcagcaccagcccgacaggagacggcagcctgtgagtcctcctccaccaccacggccgatctcccctccacatacctatggctacatttcaggacccctggtctcagatatggatacggatgcgccagaagaggaagaagacgaagccgacatggaggtagccaagatgcaaaccagaaggcttttgttacgtgggcttgagcagacacctgcctccagtgttggggacctggagagctctgtcacggggtccatgatcaacggctggggctcagcctcagaggaggacaacatttccagcggacgctccagtgttagttcttcggacggctcctttttcactgatgctgactttgcccaggcagtcgcagcagcggcagagtatgctggtctgaaagtagcacgacggcaaatgcaggatgctgctggccgtcgacattttcatgcgtctcagtgccctaggcccacaagtcccgtgtctacagacagcaacatgagtgccgccgtaatgcagaaaaccagaccagccaagaaactgaaacaccagccaggacatctgcgcagagaaacctacacagatgatcttccaccacctcctgtgccgccacctgctataaagtcacctactgcccaatccaagacacagctggaagtacgacctgtagtggtgccaaaactcccttctatggatgcaagaacagacagatcatcagacagaaaaggaagcagttacaaggggagagaagtgttggatggaagacaggttgttgacatgcgaacaaatccaggtgatcccagagaagcacaggaacagcaaaatgacgggaaaggacgtggaaacaaggcagcaaaacgagaccttccaccagcaaagactcatctcatccaagaggatattctaccttattgtagacctacttttccaacatcaaataatcccagagatcccagttcctcaagctcaatgtcatcaagaggatcaggaagcagacaaagagaacaagcaaatgtaggtcgaagaaatattgcagaaatgcaggtacttggaggatatgaaagaggagaagataataatgaagaattagaggaaactgaaagctgaagacaaccaagaggcttatgagatctaatgtgaaaatcatcactcaagatgcctcctgtcagatgacacatgacgccagataaaatgttcagtgcaatcagagtgtacaaattgtcgtttttattcctcttattgggatatcattttaaaaactttattgggtttttattgttgttgtttgatccctaaccctacaaagagccttcctattcccctcgctgttgg

SEQ ID NO: 4392 - DNA, 4189 bp, Homo sapiens
ggtgctgaggacgcaaatcagccccgtagctgggtggagcctccgggcctgacgtggaccttcactggagaagtgactcagggatcctcccaggatgtctgcctcaccagacgacctgagtacagggggaaggttacagaacatgacagtggatgaatgcttccagtctcggaacaccgtcctccaggggcagccctttgggggtgtccccaccgtgctgtgcctcaacatcgccctgtgggtgctcgtccttgtggtttactccttcctccggaaagctgcgtgggactatgggcgcctggctctgctgatacacaatgacagcctgacctcgctgatctatggggagcagagcgagaagacatctccctcggagacttccttggagatggaacgcagagacaagggattctgttcctggttcttcaacagcataacaatgaaggacgaggatctgattaacaagtgtggggacgacgcgcgcatctacatcgtgttccagtaccacctcatcatctttgtgctcatcatctgtatcccctccctgggcatcattttgcccatcaactatactggatctgttctggactggagcagtcactttgctcggaccaccattgtcaatgtctccacagagagcaagctcctgtggctgcatagcctgctgtccttcttctacttcatcaccaacttcatgttcatggctcatcactgcctggggtttgcgcccaggaatagccaaaaggtcacaaggacactaatgatcacctatgtgcccaaggacattgaagacccagaactcatcattaagcattttcacgaggcctatccaggcagtgtcgtgacaagagtccacttctgctacgacgtcaggaacctgatcgacttggacgatcagaggcgccatgccatgcggggccggcttttctatacagccaaggccaagaagactgggaaggtgatgatcaggatccacccctgtgcccgcctgtgcttctgcaagtgctggacctgcttcaaggaggtggatgcagagcagtattacagcgagctagaggagcagctaacggacgagttcaacgccgagctcaaccgcgtgccgctcaagcggctggacctgatctttgtcaccttccaggactccaggatggccaagcgtgtccgtaaggattacaagtatgtccagtgtggtgtgcaaccccagcagtcctcagtgaccaccatcgtcaaatcatattactggagggtcactatggccccacaccccaaagacattatttggaaacacctgtctgtccgccgcttcttttggtgggcccgctttatcgcaatcaacaccttcctcttcttcctcttcttctttctcaccacgcctgccatcatcatgaacactatcgacatgtacaacgtcacccgccccatcgagaagctgcagaacccaattgtgacccagttcttcccctctgtgatgctctggggcttcacagtgatactgcctctgattgtctacttctccgccttcctcgaggcccactggaccagatcaagtcagaatctggtcatggtgcacaagtgctacatctttctggtgttcatggtagtcattctgccctctatgggactgaccagtttggatgtctttctccgctggctctttgacatctactatctagagcaagcatccatcaggttccagtgtgtgttcctgccagacaacggcgccttctttgtcaactacgtgatcacggcagctttacttggcacaggcatggagctgctgcgtctggggtcactcttctgctacagcacccgcctcttcttctctagatcagagccagagagagtcaacatcagaaagaaccaggccatagacttccagtttgggcgtgagtatgcgtggatgatgaacgtgttcagcgtggtgatggcgtacagcatcacttgccccatcattgtgccttttgggttgctctacctgtgcatgaagcacttgacggatcgctataacatgtactactcctttgcacccaccaaactgaacgagcagatccacatggctgccgtctcccaggccatctttgcgccactcttgggtctgttctggatgctgttcttctccatcctgcggttgggttctctccacgccatcaccatcttttccctgtccaccctcctcattgccatggtgattgcctttgttggcatttttctggggaagcttcggatggttgccgactacgagcccgaggaggaggagatccagacagtgtttgacatggagccaagcagcacctcctccacgcccacctccctcctgtatgtggccaccgtgctgcaagaaccggagttgaatctgacccccgcctcctccccagccaggcacacctatggcaccatgaacaaccagccggaagagggagaagaagagagtggtctgaggggctttgcgagggagctagactcggcccagttccaggaagggctggaactggagggccagaaccagtaccactgaccgggacctgaggcctccactggcgacttgttgaggggtcaggggagggcctggcaaggggaggcaggagggtggcctggacctccccactacctcctgcagactttgagaagcccacagtggagacatccaccaccccagccatgggccatacgggggtcctgacctgctgcccggctggaactgggggtgctcggcagtgctgaaggagcctgggaagggatgggaggatacaggcaagcacatgtcttgagagaggtggctggagccccggcacagagactgaacgctggggtcccttcctgggaccaagatggagaaggtgttcctaagggaggagacagaaggaggctgccgaaggctctgtggggtcatcaccactctgcatcagctgcccttccaaggagcttctgctgctgctcctcctcccagccccggcccattcctcccctgcagtctgaggaggcaaaggtatgtgcacggggcacattgacaggacacggaggaccacctcatcacagggttccctgcatggggatctgtaaagagaaagtttctgcacccaccagagcaagagccaactgaaagcgtagacctgagaagaggtaactcagccccttcctgctcctctgccctcatcagatgtccccaggagcagcagggcagaggcccttctttctattcttacaagggtagctagagcgtgatcactcagggctcatcaaatgagactcgtgtgcatttttcagaaggaaaccttggttagtccttgctgggtaacacaaagtggggtgagacgacagaagccgaattcatggaaggggggtcttctccccaaaactctgtgtggtgggaaaccagctatacctccccaagccccagggcctaaagagaagacccccgaagccaaagatgtggccacttaaaagcgtctcctgcctcctacccaactgagtgcctgggcccccagcttggccaagatgggcagtacgttagggtaagaaccccatgcttcaaacttaaggactgaccatcacctgcgtcccaagtaggacccttcctcccttctcggggctgcccctgcaccctgccttgaagaccacccaagcggcctccagtgtgggcctggtccagacattgcagatgcttcaaccgtgatgtcgccccaggcctgccaggggtgtggtggaggggaaggccacgtgctccagggagaagccctttctggagaagcaaggctgtcctcccagggctgccactaccagagacctgggggagctgaattccgaacagtgatggtgacactcagcacctttgccacagccggggggaaccggcttctgcctctgggatgggctctcatcaggaccaccgtgcagcccagccagggaggacatgagaagggccagtgggggcctcaatgaaccagaacaagccaagctgaatggggtctgtgtgctccagggccctcttcagccccctcccccaaaggtctgggtccctgccaccaacctactgaaggccggcccccggctcacctcacctgagcacctgcaccaggccccaggcacatggctgccctgaactcagatcacctagaccttgtccctgccccacctttgccccatcctagccccagaagctccaagcttcaccgcaggtgagaaattgtgc

SEQ ID NO: 4393 - DNA, 1163 bp, Homo sapiens; identical to SEQ ID NO: 1777

SEQ ID NO: 4394 - DNA, 1196 bp, Homo sapiens
tgcccccagccgaggggcagccccggggccgggcccggcgcgcacccggccagcgcgccctcgccagctgcgctctgagttctgggccagctccccagaggcctaggcgccgccgccgcgagggcgcggggcagacaaaggaggcagacaaaggcgggcgcagcccagcagccgtgcgggcaccgggcgaggcaggcccactcctcccggtagcgggaaggatgaccacgctcacacgacaagacctcaactttggccaagtggtggccgatgtgctctgcgagttcctggaggtggctgtgcatctcatcctctacgtgcgcgaggtctaccccgtgggcatcttccagaaacgcaagaagtacaacgtgccggtccagatgtcctgccacccggagctgaatcagtatatccaggacacgctgcactgcgtcaagccactcctggagaagaatgatgtggagaaagtggtggtggtgattttggataaagagcaccgcccagtggagaaattcgtctttgagatcacccagcctccactgctgtccatcagctcagactcgctgttgtctcatgtggagcagctgctccgggccttcatcctgaagatcagcgtgtgcgatgccgtcctggaccacaaccccccaggctgtaccttcacagtcctggtgcacacgagagaagccgccactcgcaacatggagaagatccaggtcatcaaggatttcccctggatcctggcggatgagcaggatgtccacatgcatgacccccggctgataccactaaaaaccatgacgtcggacattttaaagatgcagctttacgtggaagagcgcgctcataaaggcagctgagggggcacctgccaccccactgatgcccaaactgtcagactttgggggatccccgcctagggcagtgctgcatggctgccctgattccaagtgctcttatcgcctctgtgtgtggatcgcccgccccagcccggggccgctcaggtctgcttggaggatgcctcccccaggagggcagtgagggatgccgcaacctcgacttctcagcctcctggggttccgccggccaacactgtctgtctcaaatactgtgctgtgagttgtttcaataaaggggccccaagggctgggctgaaaaaaaaaaaaaaaaaaaaaaaaaaaaaaaaaaaaaaaaaaaaa

SEQ ID NO: 4395 - DNA, 3131 bp, Homo sapiens; identical to SEQ ID NO: 2536

SEQ ID NO: 4396 - DNA, 4234 bp, Homo sapiens; identical to SEQ ID NO: 1629

SEQ ID NO: 4397 - DNA, 5051 bp, Homo sapiens; identical to SEQ ID NO: 2447

SEQ ID NO: 4398 - DNA, 5260 bp, Homo sapiens; identical to SEQ ID NO: 718

SEQ ID NO: 4399 - DNA, 2671 bp, Homo sapiens
ggacccgcctcagccaatccgctgctgccggcgtcgggtgcgctcggcctcgcccgcggccctccttccccggctcccgctcgccgctcgttcactccaccgccgccgccgccgccgccgctgccgctgccgctgccgcacctccgtagctgactcggtactctctgaagatggcagaagctcaccaagctgtggcctttcagttcacggtcactccggacgggattgacctgcggctgagccatgaagctcttagacaaatctatctctctggacttcattcctggaaaaagaagttcatcagattcaagaacggcatcatcactggcgtgtacccggcaagcccctccagttggcttatcgtggtggtgggcgtgatgacaacgatgtacgccaagatcgacccctcgttaggaataattgcaaaaatcaatcggactctggaaacggccaactgcatgtccagccagacgaagaacgtggtcagcggcgtgctgtttggcaccggcctgtgggtggccctcatcgtcaccatgcgctactccctgaaagtgctgctctcctaccacgggtggatgttcactgagcacggcaagatgagtcgtgccaccaagatctggatgggtatggtcaagatcttttcaggccgaaaacccatgttgtacagcttccagacatcgctgcctcgcctgccggtcccggctgtcaaagacactgtgaacaggtatctacagtcggtgaggcctcttatgaaggaagaagacttcaaacggatgacagcacttgctcaagattttgctgtcggtcttggaccaagattacagtggtatttgaagttaaaatcctggtgggctacaaattacgtgagcgactggtgggaggagtacatctacctccgaggacgagggccgctcatggtgaacagcaactattatgccatggatctgctgtatatccttccaactcacattcaggcagcaagagccggcaacgccatccatgccatcctgctttacaggcgcaaactggaccgggaggaaatcaaaccaattcgtcttttgggatccacgattccactctgctccgctcagtgggagcggatgtttaatacttcccggatcccaggagaggagacagacaccatccagcacatgagagacagcaagcacatcgtcgtgtaccatcgaggacgctacttcaaggtctggctctaccatgatgggcggctgctgaagccccgggagatggagcagcagatgcagaggatcctggacaatacctcggagcctcagcccggggaggccaggctggcagccctcaccgcaggagacagagttccctgggccaggtgtcgtcaggcctattttggacgtgggaaaaataagcagtctcttgatgctgtggagaaagcagcgttcttcgtgacgttagatgaaactgaagaaggatacagaagtgaagacccggatacgtcaatggacagctacgccaaatctctactacacggccgatgttacgacaggtggtttgacaagtcgttcacgtttgttgtcttcaaaaacgggaagatgggcctcaacgctgaacactcctgggcagatgcgccgatcgtggcccacctttgggagtacgtcatgtccattgacagcctccagctgggctatgcggaggatgggcactgcaaaggcgacatcaatccgaacattccgtaccccaccaggctgcagtgggacatcccgggggaatgtcaagaggttatagagacctccctgaacaccgcaaatcttctggcaaacgacgtggatttccattccttcccattcgtagcctttggtaaaggaatcatcaagaaatgtcgcacgagcccagacgcctttgtgcagctggccctccagctggcgcactacaaggacatgggcaagttttgcctcacatacgaggcctccatgacccggctcttccgagaggggaggacggagaccgtgcgctcctgcaccactgagtcatgcgacttcgtgcgggccatggtggacccggcccagacggtggaacagaggctgaagttgttcaagttggcgtctgagaagcatcagcatatgtatcgcctcgccatgaccggctctgggatcgatcgtcacctcttctgcctttacgtggtgtctaaatatctcgctgtggagtcccctttccttaaggaagttttatctgagccttggagattatcaacaagccagacccctcagcagcaagtggagctgtttgacttggagaataacccagagtacgtgtccagcggagggggctttggaccggttgctgatgacggctatggtgtgtcgtacatccttgtgggagagaacctcatcaatttccacatttcttccaagttctcttgccctgagacggggattataagtcaaggaccaagttcagatacttgagacaaagtggaaagtctcagcatatggaaacaaggccttggaggagaccatggacatcaccaagttcatgtgctgggctggaaagaaaagcctgttgattttcacttgctgtgcatttattcatccattccattgcctcaatgctgagaacagtgcctgacacataaaagatgctcaataaatatgttaaaagtaaaaaaaaaaaaaaaaaaaaaaaaaaaaaaaaaaaa

SEQ ID NO: 4400 - DNA, 6947 bp, Homo sapiens; identical to SEQ ID NO: 641

SEQ ID NO: 4401 - DNA, 6891 bp, Homo sapiens
ggtgcatttgcatgttgcggagtgattagtgggtttgaaaagggaaccgtggctcggcctcatttcccgctctggttcaggcgcaggaggaagtgttttgctggaggatgatgacagaggaatctgagaattgctctcacacaccaacccagcaacatccgtggagaaaactctcaccagcaactcctttaaaacaccgtcatttcaaaccattgtggtcttcaagcaacaacagcagcacaaaaaaccccaaccaaacaaaactcttgacagaagctgtgacaaccagaaaggatgcctcataaagggggaagactttaactaggggcgcgcagatgtgtgaggccttttattgtgagagtggacagacatccgagatttcagagccccatattcgagccccgtggaatcccgcggcccccagccagagccagcatgcagaacagtcacagcggagtgaatcagctcggtggtgtctttgtcaacgggcggccactgccggactccacccggcagaagattgtagagctagctcacagcggggcccggccgtgcgacatttcccgaattctgcagacccatgcagatgcaaaagtccaagtgctggacaatcaaaacgtgtccaacggatgtgtgagtaaaattctgggcaggtattacgagactggctccatcagacccagggcaatcggtggtagtaaaccgagagtagcgactccagaagttgtaagcaaaatagcccagtataagcgggagtgcccgtccatctttgcttgggaaatccgagacagattactgtccgagggggtctgtaccaacgataacataccaagcgtgtcatcaataaacagagttcttcgcaacctggctagcgaaaagcaacagatgggcgcagacggcatgtatgataaactaaggatgttgaacgggcagaccggaagctggggcacccgccctggttggtatccggggacttcggtgccagggcaacctacgcaagatggctgccagcaacaggaaggagggggagagaataccaactccatcagttccaacggagaagattcagatgaggctcaaatgcgacttcagctgaagcggaagctgcaaagaaatagaacatcctttacccaagagcaaattgaggccctggagaaagagtttgagagaacccattatccagatgtgtttgcccgagaaagactagcagccaaaatagatctacctgaagcaagaatacaggtatggttttctaatcgaagggccaaatggagaagagaagaaaaactgaggaatcagagaagacaggccagcaacacacctagtcatattcctatcagcagtagtttcagcaccagtgtctaccaaccaattccacaacccaccacaccggtttcctccttcacatctggctccatgttgggccgaacagacacagccctcacaaacacctacagcgctctgccgcctatgcccagcttcaccatggcaaataacctgcctatgcaacccccagtccccagccagacctcctcatactcctgcatgctgcccaccagcccttcggtgaatgggcggagttatgatacctacacccccccacatatgcagacacacatgaacagtcagccaatgggcacctcgggcaccacttcaacaggactcatttcccctggtgtgtcagttccagttcaagttcccggaagtgaacctgatatgtctcaatactggccaagattacagtaaaaaaaaaaaaaaaaaaaaaaaggaaaggaaatattgtgttaattcagtcagtgactatggggacacaacagttgagctttcaggaaagaaagaaaaatggctgttagagccgcttcagttctacaattgtgtcctgtattgtaccactggggaaggaatggacttgaaacaaggacctttgtatacagaaggcacgatatcagttggaacaaatcttcattttggtatccaaacttttattcattttggtgtattatttgtaaatgggcatttgtatgttataatgaaaaaaagaacaatgtagactggatggatgtttgatctgtgttggtcatgaagttgttttttttttttttaaaaagaaaaccatgatcaacaagctttgccacgaatttaagagttttatcaagatatatcgaatacttctacccatctgttcatagtttatggactgatgttccaagtttgtatcattcctttgcatataattaaacctggaacaacatgcactagatttatgtcagaaatatctgttggttttccaaaggttgttaacagatgaagtttatgtgcaaaaaagggtaagatataaattcaaggaagaaaaaaagttgatagctaaaaggtagagtgtgtcttcgatataatccaatttgttttatgtcaaaatgtaagtatttgtcttccctagaaatcctcagaatgatttctataataaagttaatttcatttatatttgacaagaatatagatgttttatacacattttcatgcaatcatacgtttcttttttggccagcaaaagttaattgttcttagatatagttgtattactgttcacggtccaatcattttgtgcatctagagttcattcctaatcaattaaaagtgcttgcaagagttttaaacttaagtgttttgaagttgttcacaactacatatcaaaattaaccattgttgattgtaaaaaaccatgccaaagcctttgtatttcctttattatacagttttctttttaaccttatagtgtggtgttacaaattttatttccatgttagatcaacattctaaaccaatggttactttcacacacactctgttttacatcctgatgatccttaaaaaataatccttatagataccataaatcaaaaacgtgttagaaaaaaattccacttacagcagggtgtagatctgtgcccatttatacccacaacatatatacaaaatggtaacatttcccagttagccatttaattctaaagctcaaagtctagaaataatttaaaaatgcaacaagcgattagctaggaattgttttttgaattaggactggcattttcaatctgggcagatttccattgtcagcctatttcaacaatgatttcactgaagtatattcaaaagtagatttcttaaaggagactttctgaaagctgttgcctttttcaaataggccctctcccttttctgtctccctcccctttgcacaagaggcatcatttcccattgaaccactacagctgttcccatttgaatcttgctttctgtgcggttgtggatggttggagggtggaggggggatgttgcatgtcaaggaataatgagcacagacacatcaacagacaacaacaaagcagactgtgactggccggtgggaattaaaggccttcagtcattggcagcttaagccaaacattcccaaatctatgaagcagggcccattgttggtcagttgttatttgcaatgaagcacagttctgatcatgtttaaagtggaggcacgcagggcaggagtgcttgagcccaagcaaaggatggaaaaaaataagcctttgttgggtaaaaaaggactgtctgagactttcatttgttctgtgcaacatataagtcaatacagataagtcttcctctgcaaacttcactaaaaagcctgggggttctggcagtctagattaaaatgcttgcacatgcagaaacctctggggacaaagacacacttccactgaattatactctgctttaaaaaaatccccaaaagcaaatgatcagaaatgtagaaattaatggaaggatttaaacatgaccttctcgttcaatatctactgttttttagttaaggaattacttgtgaacagataattgagattcattgctccggcatgaaatatactaataattttattccaccagagttgctgcacatttggagacaccttcctaagttgcagtttttgtatgtgtgcatgtagttttgttcagtgtcagcctgcactgcacagcagcacatttctgcaggggagtgagcacacatacgcactgttggtacaattgccggtgcagacatttctacctcctgacattttgcagcctacattccctgagggctgtgtgctgagggaactgtcagagaagggctatgtgggagtgcatgccacagctgctggctggcttacttcttccttctcgctggctgtaatttccaccacggtcaggcagccagttccggcccacggttctgttgtgtagacagcagagactttggagacccggatgtcgcacgccaggtgcaagaggtgggaatgggagaaaaggagtgacgtgggagcggagggtctgtatgtgtgcacttgggcacgtatatgtgtgctctgaaggtcaggattgccagggcaaagtagcacagtctggtatagtctgaagaagcggctgctcagctgcagaagccctctggtccggcaggatgggaacggctgccttgccttctgcccacaccctagggacatgagctgtccttccaaacagagctccaggcactctcttggggacagcatggcaggctctgtgtggtagcagtgcctgggagttggccttttactcattgttgaaataatttttgtttattatttatttaacgatacatatatttatatatttatcaatggggtatctgcagggatgttttgacaccatcttccaggatggagattatttgtgaagacttcagtagaatcccaggactaaacgtctaaattttttctccaaacttgactgacttgggaaaaccaggtgaatagaataagagctgaatgttttaagtaataaacgttcaaactgctctaagtaaaaaaatgcattttactgcaatgaatttctagaatatttttcccccaaagctatgcctcctaacccttaaatggtgaacaactggtttcttgctacagctcactgccatttcttcttactatcatcactaggtttcctaagattcactcatacagtattatttgaagattcagctttgttctgtgaatgtcatcttaggattgtgtctatattcttttgcttatttctttttactctgggcctctcatactagtaagattttaaaaagccttttcttctctgtatgtttggctcaccaaggcgaaatatatattcttctctttttcatttctcaagaataaacctcatctgcttttttgtttttctgtgttttggcttggtactgaatgactcaactgctcggttttaaagttcaaagtgtaagtacttagggttagtactgcttatttcaataatgttgacggtgactatctttggaaagcagtaacatgctgtcttagaaatgacattaataatgggcttaaacaaatgaataggggggtccccccactctccttttgtatgcctatgtgtgtctgatttgttaaaagatggacagggaattgattgcagagtgtcgcttccttctaaagtagttttattttgtctactgttagtatttaaagatcctggaggtggacataaggaataaatggaagagaaaagtagatattgtatggtggctactaaaaggaaattcaaaaagtcttagaacccgagcacctgagcaaactgcagtagtcaaaatatttatctcatgttaaagaaaggcaaatctagtgtaagaaatgagtaccatatagggttttgaagttcatatactagaaacacttaaaagatatcatttcagatattacgtttggcattgttcttaagtatttatatctttgagtcaagctgataattaaaaaaaatctgttaatggagtgtatatttcataatgtatcaaaatggtgtctatacctaaggtagcattattgaagagagatatgtttatgtagtaagttattaacataatgagtaacaaataatgtttccagaagaaaggaaaacacattttcagagtgcgtttttatcagaggaagacaaaaatacacacccctctccagtagcttatttttacaaagccggcccagtgaattagaaaaacaaagcacttggatatgatttttggaaagcccaggtacacttattattcaaaatgcacttttactgagtttgaaaagtttcttttatatttaaaataagggttcaaatatgcatattcaatttttatagtagttatctatttgcaaagcatatattaactagtaattggctgttaattttatagacatggtagccagggaagtatatcaatgacctattaagtattttgacaagcaatttacatatctgatgacctcgtatctctttttcagcaagtcaaatgctatgtaattgttccattgtgtgttgtataaaatgaatcaacacggtaagaaaaaggttagagttattaaaataataaactgactaaaatactcatttgaatttattcagaatgttcataatgctttcaaaggacatagcagagcttttgtggagtatccgcacaacattatttattatctatggactaaatcaattttttgaagttgctttaaaatttaaaagcacctttgcttaatataaagccctttaattttaactgacagatcaattctgaaactttattttgaaaagaaaatggggaagaatctgtgtctttagaattaaaagaaatgaaaaaaataaacccgacattctaaaaaaatagaataagaaacctgatttttagtactaatgaaatagcgggtgacaaaatagttgtctttttgattttgatcacaaaaaataaactggtagtgacaggatatgatggagagatttgacatcctggcaaatcactgtcattgattcaattattctaattctgaataaaagctgtatacagtaaaa

SEQ ID NO: 4402 - DNA, 6883 bp, Homo sapiens
accctcttttcttatcattgacatttaaactctggggcaggtcctcgcgtagaacgcggctgtcagatctgccacttcccctgccgagcggcggtgagaagtgtgggaaccggcgctgccaggctcacctgcctccccgccctccgctcccaggaatctgagaattgctctcacacaccaacccagcaacatccgtggagaaaactctcaccagcaactcctttaaaacaccgtcatttcaaaccattgtggtcttcaagcaacaacagcagcacaaaaaaccccaaccaaacaaaactcttgacagaagctgtgacaaccagaaaggatgcctcataaagggggaagactttaactaggggcgcgcagatgtgtgaggccttttattgtgagagtggacagacatccgagatttcagagccccatattcgagccccgtggaatcccgcggcccccagccagagccagcatgcagaacagtcacagcggagtgaatcagctcggtggtgtctttgtcaacgggcggccactgccggactccacccggcagaagattgtagagctagctcacagcggggcccggccgtgcgacatttcccgaattctgcaggtgtccaacggatgtgtgagtaaaattctgggcaggtattacgagactggctccatcagacccagggcaatcggtggtagtaaaccgagagtagcgactccagaagttgtaagcaaaatagcccagtataagcgggagtgcccgtccatctttgcttgggaaatccgagacagattactgtccgagggggtctgtaccaacgataacataccaagcgtgtcatcaataaacagagttcttcgcaacctggctagcgaaaagcaacagatgggcgcagacggcatgtatgataaactaaggatgttgaacgggcagaccggaagctggggcacccgccctggttggtatccggggacttcggtgccagggcaacctacgcaagatggctgccagcaacaggaaggagggggagagaataccaactccatcagttccaacggagaagattcagatgaggctcaaatgcgacttcagctgaagcggaagctgcaaagaaatagaacatcctttacccaagagcaaattgaggccctggagaaagagtttgagagaacccattatccagatgtgtttgcccgagaaagactagcagccaaaatagatctacctgaagcaagaatacaggtatggttttctaatcgaagggccaaatggagaagagaagaaaaactgaggaatcagagaagacaggccagcaacacacctagtcatattcctatcagcagtagtttcagcaccagtgtctaccaaccaattccacaacccaccacaccggtttcctccttcacatctggctccatgttgggccgaacagacacagccctcacaaacacctacagcgctctgccgcctatgcccagcttcaccatggcaaataacctgcctatgcaacccccagtccccagccagacctcctcatactcctgcatgctgcccaccagcccttcggtgaatgggcggagttatgatacctacacccccccacatatgcagacacacatgaacagtcagccaatgggcacctcgggcaccacttcaacaggactcatttcccctggtgtgtcagttccagttcaagttcccggaagtgaacctgatatgtctcaatactggccaagattacagtaaaaaaaaaaaaaaaaaaaaaaaggaaaggaaatattgtgttaattcagtcagtgactatggggacacaacagttgagctttcaggaaagaaagaaaaatggctgttagagccgcttcagttctacaattgtgtcctgtattgtaccactggggaaggaatggacttgaaacaaggacctttgtatacagaaggcacgatatcagttggaacaaatcttcattttggtatccaaacttttattcattttggtgtattatttgtaaatgggcatttgtatgttataatgaaaaaaagaacaatgtagactggatggatgtttgatctgtgttggtcatgaagttgttttttttttttttaaaaagaaaaccatgatcaacaagctttgccacgaatttaagagttttatcaagatatatcgaatacttctacccatctgttcatagtttatggactgatgttccaagtttgtatcattcctttgcatataattaaacctggaacaacatgcactagatttatgtcagaaatatctgttggttttccaaaggttgttaacagatgaagtttatgtgcaaaaaagggtaagatataaattcaaggaagaaaaaaagttgatagctaaaaggtagagtgtgtcttcgatataatccaatttgttttatgtcaaaatgtaagtatttgtcttccctagaaatcctcagaatgatttctataataaagttaatttcatttatatttgacaagaatatagatgttttatacacattttcatgcaatcatacgtttcttttttggccagcaaaagttaattgttcttagatatagttgtattactgttcacggtccaatcattttgtgcatctagagttcattcctaatcaattaaaagtgcttgcaagagttttaaacttaagtgttttgaagttgttcacaactacatatcaaaattaaccattgttgattgtaaaaaaccatgccaaagcctttgtatttcctttattatacagttttctttttaaccttatagtgtggtgttacaaattttatttccatgttagatcaacattctaaaccaatggttactttcacacacactctgttttacatcctgatgatccttaaaaaataatccttatagataccataaatcaaaaacgtgttagaaaaaaattccacttacagcagggtgtagatctgtgcccatttatacccacaacatatatacaaaatggtaacatttcccagttagccatttaattctaaagctcaaagtctagaaataatttaaaaatgcaacaagcgattagctaggaattgttttttgaattaggactggcattttcaatctgggcagatttccattgtcagcctatttcaacaatgatttcactgaagtatattcaaaagtagatttcttaaaggagactttctgaaagctgttgcctttttcaaataggccctctcccttttctgtctccctcccctttgcacaagaggcatcatttcccattgaaccactacagctgttcccatttgaatcttgctttctgtgcggttgtggatggttggagggtggaggggggatgttgcatgtcaaggaataatgagcacagacacatcaacagacaacaacaaagcagactgtgactggccggtgggaattaaaggccttcagtcattggcagcttaagccaaacattcccaaatctatgaagcagggcccattgttggtcagttgttatttgcaatgaagcacagttctgatcatgtttaaagtggaggcacgcagggcaggagtgcttgagcccaagcaaaggatggaaaaaaataagcctttgttgggtaaaaaaggactgtctgagactttcatttgttctgtgcaacatataagtcaatacagataagtcttcctctgcaaacttcactaaaaagcctgggggttctggcagtctagattaaaatgcttgcacatgcagaaacctctggggacaaagacacacttccactgaattatactctgctttaaaaaaatccccaaaagcaaatgatcagaaatgtagaaattaatggaaggatttaaacatgaccttctcgttcaatatctactgttttttagttaaggaattacttgtgaacagataattgagattcattgctccggcatgaaatatactaataattttattccaccagagttgctgcacatttggagacaccttcctaagttgcagtttttgtatgtgtgcatgtagttttgttcagtgtcagcctgcactgcacagcagcacatttctgcaggggagtgagcacacatacgcactgttggtacaattgccggtgcagacatttctacctcctgacattttgcagcctacattccctgagggctgtgtgctgagggaactgtcagagaagggctatgtgggagtgcatgccacagctgctggctggcttacttcttccttctcgctggctgtaatttccaccacggtcaggcagccagttccggcccacggttctgttgtgtagacagcagagactttggagacccggatgtcgcacgccaggtgcaagaggtgggaatgggagaaaaggagtgacgtgggagcggagggtctgtatgtgtgcacttgggcacgtatatgtgtgctctgaaggtcaggattgccagggcaaagtagcacagtctggtatagtctgaagaagcggctgctcagctgcagaagccctctggtccggcaggatgggaacggctgccttgccttctgcccacaccctagggacatgagctgtccttccaaacagagctccaggcactctcttggggacagcatggcaggctctgtgtggtagcagtgcctgggagttggccttttactcattgttgaaataatttttgtttattatttatttaacgatacatatatttatatatttatcaatggggtatctgcagggatgttttgacaccatcttccaggatggagattatttgtgaagacttcagtagaatcccaggactaaacgtctaaattttttctccaaacttgactgacttgggaaaaccaggtgaatagaataagagctgaatgttttaagtaataaacgttcaaactgctctaagtaaaaaaatgcattttactgcaatgaatttctagaatatttttcccccaaagctatgcctcctaacccttaaatggtgaacaactggtttcttgctacagctcactgccatttcttcttactatcatcactaggtttcctaagattcactcatacagtattatttgaagattcagctttgttctgtgaatgtcatcttaggattgtgtctatattcttttgcttatttctttttactctgggcctctcatactagtaagattttaaaaagccttttcttctctgtatgtttggctcaccaaggcgaaatatatattcttctctttttcatttctcaagaataaacctcatctgcttttttgtttttctgtgttttggcttggtactgaatgactcaactgctcggttttaaagttcaaagtgtaagtacttagggttagtactgcttatttcaataatgttgacggtgactatctttggaaagcagtaacatgctgtcttagaaatgacattaataatgggcttaaacaaatgaataggggggtccccccactctccttttgtatgcctatgtgtgtctgatttgttaaaagatggacagggaattgattgcagagtgtcgcttccttctaaagtagttttattttgtctactgttagtatttaaagatcctggaggtggacataaggaataaatggaagagaaaagtagatattgtatggtggctactaaaaggaaattcaaaaagtcttagaacccgagcacctgagcaaactgcagtagtcaaaatatttatctcatgttaaagaaaggcaaatctagtgtaagaaatgagtaccatatagggttttgaagttcatatactagaaacacttaaaagatatcatttcagatattacgtttggcattgttcttaagtatttatatctttgagtcaagctgataattaaaaaaaatctgttaatggagtgtatatttcataatgtatcaaaatggtgtctatacctaaggtagcattattgaagagagatatgtttatgtagtaagttattaacataatgagtaacaaataatgtttccagaagaaaggaaaacacattttcagagtgcgtttttatcagaggaagacaaaaatacacacccctctccagtagcttatttttacaaagccggcccagtgaattagaaaaacaaagcacttggatatgatttttggaaagcccaggtacacttattattcaaaatgcacttttactgagtttgaaaagtttcttttatatttaaaataagggttcaaatatgcatattcaatttttatagtagttatctatttgcaaagcatatattaactagtaattggctgttaattttatagacatggtagccagggaagtatatcaatgacctattaagtattttgacaagcaatttacatatctgatgacctcgtatctctttttcagcaagtcaaatgctatgtaattgttccattgtgtgttgtataaaatgaatcaacacggtaagaaaaaggttagagttattaaaataataaactgactaaaatactcatttgaatttattcagaatgttcataatgctttcaaaggacatagcagagcttttgtggagtatccgcacaacattatttattatctatggactaaatcaattttttgaagttgctttaaaatttaaaagcacctttgcttaatataaagccctttaattttaactgacagatcaattctgaaactttattttgaaaagaaaatggggaagaatctgtgtctttagaattaaaagaaatgaaaaaaataaacccgacattctaaaaaaatagaataagaaacctgatttttagtactaatgaaatagcgggtgacaaaatagttgtctttttgattttgatcacaaaaaataaactggtagtgacaggatatgatggagagatttgacatcctggcaaatcactgtcattgattcaattattctaattctgaataaaagctgtatacagtaaaa

SEQ ID NO: 4403 - DNA, 10258 bp, Homo sapiens; identical to SEQ ID NO: 123

SEQ ID NO: 4404 - DNA, 10107 bp, Homo sapiens; identical to SEQ ID NO: 2288

SEQ ID NO: 4405 - DNA, 5049 bp, Homo sapiens; identical to SEQ ID NO: 1460

SEQ ID NO: 4406 - DNA, 5211 bp, Homo sapiens; identical to SEQ ID NO: 2513

SEQ ID NO: 4407 - DNA, 5257 bp, Homo sapiens
gtgcagtcagggcttctgctgggcagggccggctgttaatctcgcctggcggagcggacaccggggcgtggtgggggagatgggccttataggtggcgtccgctggtgagaaacaccttgcgcaggtaaaagggtggcggcgagagggagttcccacccgtggctttcttagagaaatgaagtcttaagtcttaaatagacaacaaggaggggccgatcggtgtcttttggacgcgtctggagcccctccctccgccaaaggaaaagccccttggatgagaggcaggcgcttcagagaagctaagaaaagcacctctccgcgcgccccacctcctccgcctcgcgctcctcctgagcagcgggcccagactgcgctccggccgcggccctcgccccgcggagccctcctaccccggcccgacgctcggcccgcgacctgccccgagccctctccatggaggcagcccgcccctccggctcctggaacggagccctctgccggctgctcctgctgaccctcgcgatcttaatatttgccagtgatgcctgcaaaaatgtgacattacatgttccctccaaactagatgccgagaaacttgttggtagagttaacctgaaagagtgctttacagctgcaaatctaattcattcaagtgatcctgacttccaaattttggaggatggttcagtctatacaacaaatactattctattgtcctcggagaagagaagttttaccatattactttccaacactgagaaccaagaaaagaagaaaatatttgtctttttggagcatcaaacaaaggtcctaaagaaaagacatactaaagaaaaagttctaaggcgcgccaagagaagatgggctccaattccttgttcgatgctagaaaactccttgggtccttttccacttttccttcaacaggttcaatctgacacggcccaaaactataccatatactattccataagaggtcctggagttgaccaagaacctcggaatttattttatgtggagagagacactggaaacttgtattgtactcgtcctgtagatcgtgagcagtatgaatcttttgagataattgcctttgcaacaactccagatgggtatactccagaacttccactgcccctaataatcaaaatagaggatgaaaatgataactacccaatttttacagaagaaacttatacttttacaatttttgaaaattgcagagtgggcactactgtgggacaagtgtgtgctactgacaaagatgagcctgacacgatgcacacacgcctgaagtactccatcattgggcaggtgccaccatcacccaccctattttctatgcatccaactacaggcgtgatcaccacaacatcatctcagctagacagagagttaattgacaagtaccagttgaaaataaaagtacaagacatggatggtcagtattttggtctacagacaacttcaacttgtatcattaacattgatgatgtaaatgaccacttgccaacatttactcgtacttcttatgtgacatcagtggaagaaaatacagttgatgtggaaatcttacgagttactgttgaggataaggacttagtgaatactgctaactggagagctaattataccattttaaagggcaatgaaaatggcaattttaaaattgtaacagatgccaaaaccaatgaaggagttctttgtgtagttaagcctttgaattatgaagaaaagcaacagatgatcttgcaaattggtgtagttaatgaagctccattttccagagaggctagtccaagatcagccatgagcacagcaacagttactgttaatgtagaagatcaggatgagggccctgagtgtaaccctccaatacagactgttcgcatgaaagaaaatgcagaagtgggaacaacaagcaatggatataaagcatatgacccagaaacaagaagtagcagtggcataaggtataagaaattaactgatccaacagggtgggtcaccattgatgaaaatacaggatcaatcaaagttttcagaagcctggatagagaggcagagaccatcaaaaatggcatatataatattacagtccttgcatcagaccaaggagggagaacatgtacggggacactgggcattatacttcaagacgtgaatgataacagcccattcatacctaaaaagacagtgatcatctgcaaacccaccatgtcatctgcggagattgttgcggttgatcctgatgagcctatccatggcccaccctttgactttagtctggagagttctacttcagaagtacagagaatgtggagactgaaagcaattaatgatacagcagcacgtctttcctatcagaatgatcctccatttggctcatatgtagtacctataacagtgagagatagacttggcatgtctagtgtcacttcattggatgttacactgtgtgactgcattaccgaaaatgactgcacacatcgtgtagatccaaggattggcggtggaggagtacaacttggaaagtgggccatccttgcaatattgttgggcatagcattgctcttttgcatcctgtttacgctggtctgtggggcttctgggacgtctaaacaaccaaaagtaattcctgatgatttagcccagcagaacctaattgtatcaaacacagaagctcctggagatgacaaagtgtattctgcgaatggcttcacaacccaaactgtgggcgcttctgctcagggagtttgtggcaccgtgggatcaggaatcaaaaacggaggtcaggagaccatcgaaatggtgaaaggaggacaccagacctcggaatcctgccggggggctggccaccatcacaccctggactcctgcaggggaggacacacggaggtggacaactgcagatacacttactcggagtggcacagttttactcagccccgtcttggtgaagaatccattagaggacacactctgattaaaaattaaacaatgaaagaaagtgtatctgtgtaatcaagatgaaaatcacaagcatgcccaagactatgtcctgacatataactatgaaggaagaggatcggtggctgggtctgtaggttgttgcagtgaacgacaagaagaagatgggcttgaatttttggataatttggagcccaaatttaggacactagcagaagcatgcatgaagagatgagtgtgttctaataagtctctgaaagccagtggctttatgacttttaaaaaaaattacaaaccaagaattttttaaagcagaagatgctatttgtgggggtttttctctcattatttggatggaatctctttggtcaaatgcacatttacagagagacactataaacaagtacacaaatttttcaatttttacatatttttaaattacttatcttctatccaaggaggtctacagagaaattaaagtctgccttatttgttacatttgggtataatgacaacagccaatttatagtgcaataaaatgtaattaattcaagtccttattatagactatttgaagcacaacctaatggaaaattgtagagaccttgctttaacattatctccagttaattaagtgttcatgtggtgcttggaaactgttgttttcctgaacatctaaagtgtgtagactgcattcttgctattattttattcttgtaatgtgaccttttcactgtgcaaagggagatttctagccaggcattgactattacaatttcattttggtggagtttagttttaggttttattgtatataaaatcctgcactgaatctgtgtctcctctgttacctacttttgccagtgaaatttaagttttaaaatactttcagaatgtatttttactactgcaagtttttggtctttaaaatgtcaagtagcatctctctctttctctctgtctctttctgtttctctctccagttttttttttttttttaatttccatatgggctaaagaatccaaatattttaaaaatctgtctctcttttcttctctcataaagtgaattattccttttttttgttttatgtaagtgtatatattcttagtttttcttgaaatcattgtaatgttaactttgttgtttcaaatatcttggtgattgcttcattatctcttcaacaaaaaaaacctttaattttgccattgaaactgtagaactatgccatgcttttattagaagcagtgctctgtgttaacaacaagaatggtgtaattagaattgggatgtggatatttactgtatgacaacacatttacagttctgtaatgcaaggatgcagtttaaaaatgtgaagtagtgatggtttttgaaataagctttaaaatatagggatcttgaaggctccctggggtaactattttataacttagataaaatggctagtcatatctgtgtgtttgtaaagttatttttttaatattttaagattacaattttaacaaatgtagaaatgagccaaactatttaaattttaaaacagtaaaacaaaatgaaacttaatagctcacaaaattccagtccatgtttcatgacttattttagtcaatgaattttctatttatactaaacatatggacattttaaatgtgtttctaatatttttgattatctataatgtgcctgtcttcaattcacaagattgggttataacaattatttgccagattaacactagggaattatttgataaccagcttatcttatcagtagttttattgctgatcaggcaaaaatagttttccaaagttatttttaataaagtatatacaaaattcttatatattactagtcatgataaagtaaattaagcagtttttaaaacttagtgtgagtttgttcatcacaggtctgatatgagtttaagggatttcgcactccctgaatcagagaagtaagaccccttccttagattcctgttatacattttttaaaatgtagagtttgttttggagacattttcagtgcattgttattgccatatttatataatatgactattctaaaggctgtgaggccatggggtattggttaagttgcttgcttttgctttgtccattttcatcattttaaaatgggggataataacagaacttgtttcctagggccattgtaagtcacttgaataaaaaatagttttgaagcatgagagtcatacagagcggtccacctaaaaggcactcctgataataataaatgattttaaacaaaaaaaaaaaaaa

SEQ ID NO: 4408 - DNA, 348 bp, Homo sapiens; identical to SEQ ID NO: 1699

SEQ ID NO: 4409 - DNA, 3549 bp, Homo sapiens; identical to SEQ ID NO: 1500

SEQ ID NO: 4410 - DNA, 3402 bp, Homo sapiens
atgcctgccctcctgggaatgaagcacagcaggtctcagcctcatcttacccagccccccactcaagatggaggtgcctggtttgaacacctctgacaaatggaagtctgtgttgtccagaggcaatgcagtgggggcttaagaagataactctggacttagaccgcttggcttcaaatcaaagagtgcatgaaccaaccagctggcctagtgatgatgttaggcaagtgacttctcagtttcttcatctgcaaactgggaaatttcctatctcagggttaaaagagaggtaatcttaggtgcttacctagcacatgcaatacctgaacaccttctatggctgccccaaggagagctgcaacctgtttgtgctgaaggacacactaaagaagatgcagaagttctttggactgccccagacaggtgatcttgaccagaataccatcgagaccatgcggaagccacgctgcggcaacccagatgtggccaactacaacttcttccctcgcaagcccaagtgggacaagaaccagatcacatacaggatcattggctacacacctgatctggacccagagacagtggatgatgcctttgctcgtgccttccaagtctggagcgatgtgaccccactgcggttttctcgaatccatgatggagaggcagacatcatgatcaactttggccgctgggagcatggcgatggatacccctttgacggtaaggacggactcctggctcatgccttcgccccaggcactggtgttgggggagactcccattttgatgacgatgagctatggaccttgggagaaggccaagtggtccgtgtgaagtatgggaacgccgatggggagtactgcaagttccccttcttgttcaatggcaaggagtacaacagctgcactgataccggccgcagcgatggcttcctctggtgctccaccacctacaactttgagaaggatggcaagtacggcttctgtccccatgaagccctgttcaccatgggcggcaacgctgaaggacagccctgcaagtttccattccgcttccagggcacatcctatgacagctgcaccactgagggccgcacggatggctaccgctggtgcggcaccactgaggactacgaccgcgacaagaagtatggcttctgccctgagaccgccatgtccactgttggtgggaactcagaaggtgccccctgtgtcttccccttcactttcctgggcaacaaatatgagagctgcaccagcgccggccgcagtgacggaaagatgtggtgtgcgaccacagccaactacgatgatgaccgcaagtggggcttctgccctgaccaagggtacagcctgttcctcgtggcagcccacgagtttggccacgccatggggctggagcactcccaagaccctggggccctgatggcacccatttacacctacaccaagaacttccgtctgtcccaggatgacatcaagggcattcaggagctctatggggcctctcctgacattgaccttggcaccggccccacccccacgctgggccctgtcactcctgagatctgcaaacaggacattgtatttgatggcatcgctcagatccgtggtgagatcttcttcttcaaggaccggttcatttggcggactgtgacgccacgtgacaagcccatggggcccctgctggtggccacattctggcctgagctcccggaaaagattgatgcggtatacgaggccccacaggaggagaaggctgtgttctttgcagggaatgaatactggatctactcagccagcaccctggagcgagggtaccccaagccactgaccagcctgggactgccccctgatgtccagcgagtggatgccgcctttaactggagcaaaaacaagaagacatacatctttgctggagacaaattctggagatacaatgaggtgaagaagaaaatggatcctggcttccccaagctcatcgcagatgcctggaatgccatccccgataacctggatgccgtcgtggacctgcagggcggcggtcacagctacttcttcaagggtgcctattacctgaagctggagaaccaaagtctgaagagcgtgaagtttggaagcatcaaatccgactggctaggctgctgagctggccctggctcccacaggcccttcctctccactgccttcgatacaccgggcctggagaactagagaaggacccggaggggcctggcagccgtgccttcagctctacagctaatcagcattctcactcctacctggtaatttaagattccagagagtggctcctcccggtgcccaagaatagatgctgactgtactcctcccaggcgccccttccccctccaatcccaccaaccctcagagccacccctaaagagatactttgatattttcaacgcagccctgctttgggctgccctggtgctgccacacttcaggctcttctcctttcacaaccttctgtggctcacagaacccttggagccaatggagactgtctcaagagggcactggtggcccgacagcctggcacagggcagtgggacagggcatggccaggtggccactccagacccctggcttttcactgctggctgccttagaacctttcttacattagcagtttgctttgtatgcactttgtttttttctttgggtcttgttttttttttccacttagaaattgcatttcctgacagaaggactcaggttgtctgaagtcactgcacagtgcatctcagcccacatagtgatggttcccctgttcactctacttagcatgtccctaccgagtctcttctccactggatggaggaaaaccaagccgtggcttcccgctcagccctccctgcccctcccttcaaccattccccatgggaaatgtcaacaagtatgaataaagacacctactgagtggccgtgtttgccatctgttttagcagagcctagacaagggccacagacccagccagaagcggaaacttaaaaagtccgaatctctgctccctgcagggcacaggtgatggtgtctgctggaaaggtcagagcttccaaagtaaacagcaagagaacctcagggagagtaagctctagtccctctgtcctgtagaaagagccctgaagaatcagcaattttgttgctttattgtggcatctgttcgaggtttgcttcctctttaagtctgtttcttcattagcaatcatatcagttttaatgctactactaacaatgaacagtaacaataatatccccctcaattaatagagtgctttctatgtgcaaggcacttttcacgtgtcacctattttaacctttccaaccacataaataaaaaaggccattattagttgaaaaaaaaaaaaaaaaaaaaaaaaa

SEQ ID NO: 4411 - DNA, 5253 bp, Homo sapiens; identical to SEQ ID NO: 610

SEQ ID NO: 4412 - DNA, 2336 bp, Homo sapiens; identical to SEQ ID NO: 42

SEQ ID NO: 4413 - DNA, 9849 bp, Homo sapiens
gtcacatgagccgcgcgcccgcttcgctccccctcctccccggctgggctgtgtgaatgaagctctgccggctacgtggggcgctcactcaacttggtgtcctggacgccagagccgaccgagcgcgctgcccaccggcggcggacacgggctccgccgctccggacctcggcgacagagcaaatcagttgcctggagttcccagtgaagttgtacctgtgcccgtgcgataacgtcagtggaagctgccccgagtttggggctttagccccttggagaaaacagggccacatagctgcctttctatcaagtctccctacaaaactgagaggctctgggaaactcagcctgtgaccccagcgtgggtgaagataggatcaagatggccatgtggcagggtgccatggataacagaggctttcagcaggggagttttagtagcttccagaacagctccagtgatgaagacctgatggacattccagcaaccgctatggatttctccatgagagatgatgttcctcccttagaccgagaagtaggagaggacaagtcgtacaatggtggaggaataggttcttcaaataggatcatggacttcttggaggagccaatccctggtgtagggacctatgatgatttcaatacaattgattgggtgagagagaagtctcgagaccgggataggcaccgagagattaccaataaaagcaaagagtcaacatgggccttaattcacagtgtgagtgatgctttttccggctggttgttgatgctccttattgggcttttatcaggttcgttagctggtttgatagacatctctgctcattggatgacagacttaaaagaaggtatatgcacagggggattctggtttaaccatgaacattgttgctggaactctgagcatgtcacctttgaagagagagacaaatgtccagagtggaatagttggtcccagcttatcatcagcacagatgagggagcctttgcctacatagtcaattatttcatgtacgtcctctgggctctcctatttgccttccttgccgtatctcttgtcaaggtgtttgcgccttatgcctgtggctctggaatccctgagataaaaactatcttgagtggtttcattattaggggctatttgggtaagtggactctggttatcaaaaccatcaccttggtgctggcagtgtcgtctggcttgagcctgggcaaagagggccctctagtgcacgtggcttgctgctgtgggaacatcctgtgccactgcttcaacaaatacaggaagaatgaagccaagcgcagagaggtcttgtcggctgcagcagcagctggtgtatctgtagcctttggagcacctataggtggagtattattcagccttgaagaggtcagctactattttcccctcaaaacattgtggcgttcattctttgctgccttggtggcagcattcactctacgctccatcaatccatttgggaacagccgcctggtactattttatgtggagtttcacaccccatggcatctctttgagctcgtgccattcattctgctgggcatatttggtggtctgtggggagcactgtttatccgcacaaacattgcctggtgtcggaagcgaaagaccacccagttgggcaagtatcctgttatagaggtactcgtcgtgacagccatcactgccatcctggctttccccaatgaatacactcggatgagcacaagtgagctcatttctgagctgtttaatgactgtggccttctggactcctccaagctctgtgattatgagaaccgtttcaacacaagcaaagggggtgaactgcctgacagaccggctggcgtgggagtctacagtgcaatgtggcagctggctttaacactcatactgaaaattgtcattactatattcacctttggcatgaagatcccttctggcctctttatccctagcatggctgttggtgctatagcaggtcgacttctaggagtaggaatggaacagctggcttattaccaccaggaatggaccgtcttcaatagctggtgtagtcagggagctgattgcatcacccccggcctttatgcaatggttggggctgcagcctgcttaggtggggtgactcggatgactgtttctcttgttgtcataatgtttgaactgactggtggcttagaatacatcgtgcctctgatggctgcagccatgacaagcaagtgggtggcagatgctcttgggcgggagggcatctatgatgcccacatccgtctcaatggatacccctttcttgaagccaaagaagagtttgctcataagaccctggcaatggatgtgatgaaaccccggagaaatgatcctttgttgactgtccttactcaggacagtatgactgtggaagatgtagagaccataatcagtgaaaccacttacagtggcttcccagtggtggtatcccgggagtcccaaagacttgtgggctttgtcctccgaagagatctcattatttcaattgaaaatgctcgaaagaaacaggatggggttgttagcacttccatcatttatttcacggagcattctcctccattgccaccatacactccacccactctaaagcttcggaacatcctcgatctcagccccttcactgtgactgaccttacacccatggagatcgtagtggatattttccgaaagctgggactgcggcagtgcctggttacacacaacgggcgattgcttggaatcattaccaaaaaggatgtgttaaagcatatagcacagatggcgaaccaagatcctgattccattctcttcaactagaatcatagagttctggatgtaaagcgggaaggacattacagaccatggatatgttgtattaactgggtacccaaaacacattttccatatttggatggtgaagtcacattagtgtgttgtctctttcctacaagttaaccagttgcactacataatctctggaaattaattttctctttaggagaaattatagttaggcttccatgatgttacattaggaagatatcatgaaagaataaataagattgctatggtttaattatatttgctttttaaaagatttttttaacttaaaaagtagttagccaatatgcaatcactgaaaactatgcaagagaaattccaaccgtcctgacctataacctgtaggaaaccgacgaaaaagtcactcttttgggatctaactgttgttactggaagacgaagtgtaaactaaggggctttgcttttcaaaccagagaaaggaaagccagaaggaaaagagtaatggtattttctagactgtgaagattcagttcaaatgttatccttgttcctgttacaatatttagcattattagtttgttatgtgtgtatgtttatgttaattttaatttctgattataagacaatgctgctttggttaatctcttctaaatgaatttagagagattgacttttatagcttgcttgttgctggtactcttttgaagtgcacaaagataagttatagagctttctccttgtctgcaaaaacggtaattttccaggtggcatttgttagctggtagacaaggactttgccgtgaatttgttagtagcaaggaatgatttcttccagcttccttgaaatgaataattagtaaacttctaagcaaagtcaatgactaggagtttcacatgtttgtgaggtcctaactaattctcttacccagatgccacctccatgaatgatggtgctttaggcttctggaatatgtaaaaacagcaaagggaaccaagtctagactgcatactggtaaaccagggaagactcagaactgcatatgcatcctcatgcattcctttgtaaagaccaccagtactaaaataactggacactcattgtacctcccagcgataagtatgtgtaacaggccagtgtgttgtccccatgatcatgaattaggcttgggatgcttccaaatatattcaaggtgttggaacaggataggcagctgtgactccctcaagagtccttagaattctaaataaaatgcagagccatcctaagacacaggggtatggacaaggcctggtgacaccaaaggtgcttgtatccaattgaaaaggtgcctgtctcaatttcataccacctttattgcagttaaaaaaaaatcacactctggggacacttggtggaattacagagccaccatcatcattccaaccactatttcattttctgtagttttacctgtgtgcaattactccccctccattctgttccacttcttactccttagtaccaaatcctctgtttgggattgagcgctgctcctggttaatcattcctactacaaaaaaaaataactcccagggctagttaaattgtaaaccaaggctcagcagtctcacaacacatggaccagaggtgacacacagccatttcctttgccatgtggcccagttgctgctgccatgcctccatttccacactggatgcctacggcagtgagatttcactgccggggtaagagttcagcctggatgattttatagctctgttcctagcacttctcatcatccttccagcccagaatcagcggtcattctgcatattcccaccaaccctctacccccaaacacttcagtgtacctcattttaagagttgctgatccctgattctaggacgtttttacccatagttcttgtctttccaaaatctgaaattcttttttttgctcagaactgggtagccaagggttattttatttttatctttaaaataatcaaggcagtcgctagagtttctccttgtgaatagatcactctagcattttaatgaaaaagaaaaaaatctttctggggtatgttgtatcatagtaatggctcagtaaccacatattttgtcctttccatgtcactgattccttcatatgagactatttggcttgactaccctgtatattgtgtagaaatcaaagttcttatctgtacatttctggtccaatacctgtcttattagttgtccttccccactaaagtttgcaaaacagaaaatgttactatttctggtatttaatgacaatgaaaggtttggtcatatttcatagtgcagtagcgataaggagggtgtctcaagtttgcttttgtgtttcttctaggctttgttcttgattttagacagatgagccagtgttaaggtgctacttcagagaataaattagagaaatcagataacactgtgccaaggtatactttgtagatgctaagcaccgattggccctccagagaatgacaatatccctttgatacctcactcctgatcaatctcattcattaacctcagcttctcaggaatccttgtagcttgtatgctagaagtagctatggtatatggtatccactatatgtccagtcctatggtttggctcaaaggttggctaattgcagctagagctctcaactgctagctcagcaccttgacatttgaagtttcttgtcttgaggagaaggaaaatgttctttctgccattgccactttaacagttggacatgcttaagcaacaaatacagccagtatagggaggactgtcagtagcatcaaatggccacatacctcaatggcaaaagactagatggtttgtgatttaaaaattaatgagtcgagatgagactattttggtattaaatgagaaaattgcctaacacaagggaagggtttacaaaagaatgccaattagtgtttcaacagagttaggattttccaagtaagagtagctggtagccatccagccataaaaggaacgagagtctatagatttgtaaaagtaaaactgctatattttgtatcttcaaatcttcaatataaagaatttaaagaacctgaaacagttaatgcatgattcgttatattggagggaaaaagcaggggactgataatacaaaataatggcaactttaaagatcatttctacgtggatgtttggttagaaacatattccaatgctctcctctttctctggccacagcatcctggctcagcccagctgtggagtagaggtggtaagatccacagaacagatatcctctggtagataagctgacattgatgatactttgaatttaccagctggtgaagcaaacgattaatttgtgattgaactgaaaagcagttgaattgttttgacaccagaggctgaatctaaaccctttacaggaagagcagagcatactatacatttcttagcagatcttcaattctgtttgaacatgatgaagtaaccagggtttagtgagatctaaggccgtgaagtaattcacaaccaagatcttatgaacgcattcagatgtgaggggggcaaatatgttttcaaaaacttagtgtgcaatagagtccattatagaaattaaccactgctatatgttttaagtagttcaatcacctgttgtggttcagtcttgattattgtttattttgttaggtgataagtaggaagatgcacttgttatcccacactatctcttgttttgttttgttttgtttttaaataatgaacagtgcaatctttgaacttgagtttttaataatgatagcaaagacaatggtgagaacttgaaacagccagcatattttatattgccaaagtacttactgatgactgaccacactgtcttgtgaggaactgggtcccctgcactggatcagagccaaatgcaagccacccatcagttcagaggaagcaggaaaacatcttttgggtggtgcatagaacattgagctcttaaaaacccggagaaaaattaggaatttagaaagtaagtgggaggtagaatattgagtccttttttaaaaaaaagaattgatgtctaaatatgtagtctgaacttaagtgtcctaaaaccttgttttttgtttttttgttttttgaggagtcgtcttgctctatcaccaggtgggagtgcagtggcacaatctcggctcactgtaacctctgcctcctgcctcccgggtccaagcaattcccctgcctcagtctcccaagtaggtgggactacaggcgcacaccaccatgcccagctaacttttgtatttttagtagagacggggtttcaccatgttggccaggatggtctcgatctcttgacctcgtgatccacccatctcggcctcccaaagtgctgggattataggtgtgagccaccgcacccagccaaaccttgatttttttagccacctctgggattgcctgggttccctttggagaagaaactaaaagttatggccatagaaaaagccctggtaagaaaatatttgaatggtgtaagatggtggaaggaaagccatcccacacccctacaacatatgttctggcatttataaactgcttgattgtgtgcctcaaggggagaaaaagtcaagcaatgcttcaaaggccaggctttctaagcaaatgagtggttcaaagcagtgtttggctcaagggcagtctggttttatggatagggccgacccaagacatctgctcatgaagaaatgtggcatctgttgccatttcctaaactataaggtttagatagattgtcttgaattttgatagcaaatttttttaaatttatatttctgcctcctcgtacatccttatatatggaaaaaaaagtaagagttcctcagatcagagctcagtagctgtgtcaatttgaagttcaatcagtgtagttgtcctggggtgatcgctgactctgctctgtttcatatttcagttgcttgctccaaggagagaatttctgagaacaatgggtgttagcaactttaagttactccccaaacgtttgctggccacattctcatttctaaacatctggatctgggtaaaggtttgaatagatgtagggaacaaaattggtttttccatggtgtagtctaattttgccaaatcacccaagaaagaaagtatatgacgtgtggagtttgcatttcttggatgggacctatcgggtcacccagcccagtcttacagtcataaattcctacctcttagttcctgccaaagggccttcagcctctgtgtgcacacttattgaatgaatgctttgcctaaagtttggccttttgaagaaaaacagcatgtgataatataaaaatatgagagtttaaaaaaaaaaaagatctctgcctctcttctctctgcctcgtcccaccttgctgtctgtctcattgtctttctctcccctcaccatgcgctgaattcagatttctctttcttttattataggcatgttgttttgaatgtggactttgtgggagggagaggattgttctgagaacagaaactggaagatacgtctgagttgatgggaccaacagggctttgctcctctgtgagggccaaagccattgatacttgtcgggggtgatgagggctttagcatctcaaggcagacatatgaagtatttactgctaaactatattacttactagtacaaatctgttggaattcaggggcagtctaagatttggtgagtgaaatgccatctggcaaaatcgagaagagagtgtggcctgagaggggaatgttcagcctcactgtcacattaagggtacctcaaaatacatggtccttccagtgtgttccttttccttcctccatttcactttgtcccctcttcttcctttctctcccattttcctggctttttagcactcagcttttttttataagtatgtatttactttttattatatatttggtcctttgggactttgtgatgattaagaatttattccattcaggattttaaaatgatgtgtttaatattttgttctcttaaactcttttgaagctatgctgctaaccaggtataggccagaaaggaggtggcccagtcagtaccttgctcacgtcagctaagggggacagtgatgtcatgtgggtgactcttcttcatttgaccaaggccagcctcctgttcttacctctgcccattcatttctggctatgggaaaactaccacctgttgagtgagccaatgaggccaggaagatcagaggggctgggttccggcccatgggccactatttgaatttctctgtagtaagctctttgtagggctggctccaactgcagtagccaaagaaaacctgtctgactcgacattttaatgcctgagagttggtgaaagttcagctgaagctaatgtctagacatcagcagtaactaggcatccagaaagtagcttcaaccaaagctaatagagcccaagtttccgcaggaagtttggtgctgagctgtccagagcagttgtttatctgagtgttgctagcccttagccatgctttcttagctttattctcgcctgttcctaggcatagcctgaaccagagctatggctcactgctcgctttattctactccctagtcatgcggaacaacatagtctaaaaaggaagatgtggactggggagttaggagacctgatttctattccctatgcttctactaactagcctcgagatcttaaccgctctgtgcctcagtgttcccatctgcaaaatggggatagtgttaattgccctacctacctcacagggttgttgtgaggataaactgagacaatgaattcaaagcaagttgacaagtaagtgctatgcaaattgtaagaaatggaaacaatcatgttaaaagcaatggaatggacattggcagaagggttaatggattgtccagccctttctctgtgtggcttaaacccaggtcgccattgctttatacattttcacttagcacagatttgtaattatgcatgtaataaagcacagccttatccaccctg

SEQ ID NO: 4414 - DNA, 10108 bp, Homo sapiens; identical to SEQ ID NO: 2504

SEQ ID NO: 4415 - DNA, 4815 bp, Homo sapiens
agtggcgtcggaactgcaaagcacctgtgagcttgcggaagtcagttcagactccagcccgctccagcccggcccgacccgaccgcacccggcgcctgccctcgctcggcgtccccggccagccatgggcccttggagccgcagcctctcggcgctgctgctgctgctgcaggtctcctcttggctctgccaggagccggagccctgccaccctggctttgacgccgagagctacacgttcacggtgccccggcgccacctggagagaggccgcgtcctgggcagagtgaattttgaagattgcaccggtcgacaaaggacagcctatttttccctcgacacccgattcaaagtgggcacagatggtgtgattacagtcaaaaggcctctacggtttcataacccacagatccatttcttggtctacgcctgggactccacctacagaaagttttccaccaaagtcacgctgaatacagtggggcaccaccaccgccccccgccccatcaggcctccgtttctggaatccaagcagaattgctcacatttcccaactcctctcctggcctcagaagacagaagagagactgggttattcctcccatcagctgcccagaaaatgaaaaaggcccatttcctaaaaacctggttcagatcaaatccaacaaagacaaagaaggcaaggttttctacagcatcactggccaaggagctgacacaccccctgttggtgtctttattattgaaagagaaacaggatggctgaaggtgacagagcctctggatagagaacgcattgccacatacactctcttctctcacgctgtgtcatccaacgggaatgcagttgaggatccaatggagattttgatcacggtaaccgatcagaatgacaacaagcccgaattcacccaggaggtctttaaggggtctgtcatggaaggtgctcttccaggaacctctgtgatggaggtcacagccacagacgcggacgatgatgtgaacacctacaatgccgccatcgcttacaccatcctcagccaagatcctgagctccctgacaaaaatatgttcaccattaacaggaacacaggagtcatcagtgtggtcaccactgggctggaccgagagagtttccctacgtataccctggtggttcaagctgctgaccttcaaggtgaggggttaagcacaacagcaacagctgtgatcacagtcactgacaccaacgataatcctccgatcttcaatcccaccacgtacaagggtcaggtgcctgagaacgaggctaacgtcgtaatcaccacactgaaagtgactgatgctgatgcccccaataccccagcgtgggaggctgtatacaccatattgaatgatgatggtggacaatttgtcgtcaccacaaatccagtgaacaacgatggcattttgaaaacagcaaagggcttggattttgaggccaagcagcagtacattctacacgtagcagtgacgaatgtggtaccttttgaggtctctctcaccacctccacagccaccgtcaccgtggatgtgctggatgtgaatgaagcccccatctttgtgcctcctgaaaagagagtggaagtgtccgaggactttggcgtgggccaggaaatcacatcctacactgcccaggagccagacacatttatggaacagaaaataacatatcggatttggagagacactgccaactggctggagattaatccggacactggtgccatttccactcgggctgagctggacagggaggattttgagcacgtgaagaacagcacgtacacagccctaatcatagctacagacaatggttctccagttgctactggaacagggacacttctgctgatcctgtctgatgtgaatgacaacgcccccataccagaacctcgaactatattcttctgtgagaggaatccaaagcctcaggtcataaacatcattgatgcagaccttcctcccaatacatctcccttcacagcagaactaacacacggggcgagtgccaactggaccattcagtacaacgacccaacccaagaatctatcattttgaagccaaagatggccttagaggtgggtgactacaaaatcaatctcaagctcatggataaccagaataaagaccaagtgaccaccttagaggtcagcgtgtgtgactgtgaaggggccgctggcgtctgtaggaaggcacagcctgtcgaagcaggattgcaaattcctgccattctggggattcttggaggaattcttgctttgctaattctgattctgctgctcttgctgtttcttcggaggagagcggtggtcaaagagcccttactgcccccagaggatgacacccgggacaacgtttattactatgatgaagaatgaggcggagaagaggaccaggactttgacttgagccagctgcacaggggcctggacgctcggcctgaagtgactcgtaacgacgttgcaccaaccctcatgagtgtcccccggtatcttccccgccctgccaatcccgatgaaattggaaattttattgatgaaaatctgaaagcggctgatactgaccccacagccccgccttatgattctctgctcgtgtttgactatgaaggaagcggttccgaagctgctagtctgagctccctgaactcctcagagtcagacaaagaccaggactatgactacttgaacgaatggggcaatcgcttcaagaagctggctgacatgtacggaggcggcgaggacgactaggggactcgagagaggcgggccccagacccatgtgctgggaaatgcagaaatcacgttgctggtggtttttcagctcccttcccttgagatgagtttctggggaaaaaaaagagactggttagtgatgcagttagtatagctttatactctctccactttatagctctaataagtttgtgttagaaaagtttcgacttatttcttaaagcttttttttttttcccatcactctttacatggtggtgatgtccaaaagatacccaaattttaatattccagaagaacaactttagcatcagaaggttcacccagcaccttgcagattttcttaaggaattttgtctcacttttaaaaagaaggggagaagtcagctactctagttctgttgttttgtgtatataattttttaaaaaaaatttgtgtgcttctgctcattactacactggtgtgtccctctgccttttttttttttttaagacagggtctcattctatcggccaggctggagtgcagtggtgcaatcacagctcactgcagccttgtcctcccaggctcaagctatccttgcacctcagcctcccaagtagctgggaccacaggcatgcaccactacgcatgactaattttttaaatatttgagacggggtctccctgtgttacccaggctggtctcaaactcctgggctcaagtgatcctcccatcttggcctcccagagtattgggattacagacatgagccactgcacctgcccagctccccaactccctgccattttttaagagacagtttcgctccatcgcccaggcctgggatgcagtgatgtgatcatagctcactgtaacctcaaactctggggctcaagcagttctcccaccagcctcctttttatttttttgtacagatggggtcttgctatgttgcccaagctggtcttaaactcctggcctcaagcaatccttctgccttggccccccaaagtgctgggattgtgggcatgagctgctgtgcccagcctccatgttttaatatcaactctcactcctgaattcagttgctttgcccaagataggagttctctgatgcagaaattattgggctcttttagggtaagaagtttgtgtctttgtctggccacatcttgactaggtattgtctactctgaagacctttaatggcttccctctttcatctcctgagtatgtaacttgcaatgggcagctatccagtgacttgttctgagtaagtgtgttcattaatgtttatttagctctgaagcaagagtgatatactccaggacttagaatagtgcctaaagtgctgcagccaaagacagagcggaactatgaaaagtgggcttggagatggcaggagagcttgtcattgagcctggcaatttagcaaactgatgctgaggatgattgaggtgggtctacctcatctctgaaaattctggaaggaatggaggagtctcaacatgtgtttctgacacaagatccgtggtttgtactcaaagcccagaatccccaagtgcctgcttttgatgatgtctacagaaaatgctggctgagctgaacacatttgcccaattccaggtgtgcacagaaaaccgagaatattcaaaattccaaatttttttcttaggagcaagaagaaaatgtggccctaaagggggttagttgaggggtagggggtagtgaggatcttgatttggatctctttttatttaaatgtgaatttcaacttttgacaatcaaagaaaagacttttgttgaaatagctttactgtttctcaagtgttttggagaaaaaaatcaaccctgcaatcactttttggaattgtcttgatttttcggcagttcaagctatatcgaatatagttctgtgtagagaatgtcactgtagttttgagtgtatacatgtgtgggtgctgataattgtgtattttctttgggggtggaaaaggaaaacaattcaagctgagaaaagtattctcaaagatgcatttttataaattttattaaacaattttgttaaaccat

SEQ ID NO: 4416 - DNA, 2900 bp, Homo sapiens; identical to SEQ ID NO: 777

SEQ ID NO: 4417 - DNA, 2960 bp, Homo sapiens
gcagtacccaagcgagccatttaacatggcggaggatgtttcctcagcggccccgagcccgcggggctgtgcggatggtagggatgccgaccctactgaggagcagatggcagaaacagagagaaacgacgaggagcagttcgaatgccaggaactgctcgagtgccaggtgcaggtgggggcccccgaggaggaggaggaggaggaggaggacgcgggcctggtggccgaggccgaggccgtggctgccggctggatgctcgatttcctctgcctctctctttgccgagctttccgcgacggccgctccgaggacttccgcaggacccgcaacagcgcagaggctattattcatggactatccagtctaacagcttgccagttgagaacgatatacatatgtcagtttttgacaagaattgcagcaggaaaaacccttgatgcacagtttgaaaatgatgaacgaattacacccttggaatcagccctgatgatttggggttcaattgaaaaggaacatgacaaacttcatgaagaaatacagaatttaattaaaattcaggctatagctgtttgtatggaaaatggcaactttaaagaagcagaagaagtctttgaaagaatatttggtgatccaaattctcatatgcctttcaaaagcaaattgcttatgataatctctcagaaagatacatttcattccttttttcaacacttcagctacaaccacatgatggagaaaattaagagttatgtgaattatgtgctaagtgaaaaatcatcaacctttctaatgaaggcagcggcaaaagtagtagaaagcaaaaggacaagaacaataacttctcaagataaacctagtggtaatgatgttgaaatggaaactgaagctaatttggatacaagaaaaagtgttagtgacaaacagtctgcggtaactgaatcctcagagggtacagtatccttattgaggtctcacaagaatcttttcttatctaagttgcaacatggaacccagcaacaagaccttaataagaaagaaagaagagtaggaactcctcaaagtacaaaaaagaaaaaagaaagcagaagagccactgaaagcagaatacctgtttcaaagagtcagccggtaactcctgaaaaacatcgagctagaaaaagacaggcatggctttgggaagaagacaagaatttgagatctggcgtgaggaaatatggagagggaaactggtctaaaatactgttgcattataaattcaacaaccggacaagtgtcatgttaaaagacagatggaggaccatgaagaaactaaaactgatttcctcagacagcgaagactgattgtgtttgtaaaagcttgatgaaaggacagttaagtattttgatcactgcattttgtttgaaacttgtgtcattgatgtaatttaaaacttttgtttaaagcattacagtatttttctgtgaccatcaattaatgagggtttgtgctaccagagttaaagcatatgctatcattgtattctttaagaaccttattttgataaaatgtaaatttgttgaaccctgccacatttagtatccccacccccaaatcctgttccaatgaaaaaattaaaacctgatacgaaaaaaaaaaaattccagttaacctattttgtgtctgtaggctgacctcaaccctgtaacgtaacccattaaaatgaatttctttttttttaagacagagtttctctctgttgcccaggctggagtgcagtggcgcaatttcagctcactgcaacctctgcctcccaggttcaagtgattctcctgcctcagcctcctgagtagctgggattacaggcacacaccaccacgcccagctaatttttgtatttttagtagaggcggggtttcaccatgctggtcaggatgttctccaactcctgacttcatgatccacccacctcggcctcccaaagtgctgagattacagacgtgagccactgcgtcctgcctaaaatgaattttctagatgattgaataacagtagtcctttgatagaagataatgacttggtttatggccttaatatactacttaattacttaagatgtttattaatagaatgataaatgtacagagtaacctataagcatgacatacttttgctttcagtagtttcatgtaaagaaaaaaacttgaaaatagtaatacctgagtacccatgggaataatagacactggggaggtagggtggggagcgggagcaagagctgaaaaacttacctactggggactgtgctcactacctgggtgacaggatcatacgtaccccaaacctcaacatcacacagtatactcagctaacaaacctgcccatgtgtttcctgaatctaaaataaaaatcgaaataatttttttaaaaaagaaaaagacaatagtattacccatgggacaaaatttgtactattagcaagaatcattttgtgtctcatttagaaacaatttgacttttgttccagtgtttaaactttgacaaaaatggttttgaatagatctttataacctgatgccataaatacaagattctctgataccttcatttaatatatcaatattgggcctaaaacagtattctgtaaagcttaaattggtattaactatgatcatcttgatgtctatgatagataataaacaaggtcatacataccttactaaacaattttggtttttcaccaacattttattctttaaaagatttagactaacagaattatttagcatttcgagtcatgtgctttatttagcaagtgagtaaaaatattggaatattgaagtatttgcataaaaaatcaaatggtggtgttttgtaatctctattgtatttcctattaaggtttcatatattactttcccattgttcctgaatttgttatcctatatataaacagaaacatggatgagtaccatatac

SEQ ID NO: 4418 - DNA, 5559 bp, Homo sapiens; identical to SEQ ID NO: 592

SEQ ID NO: 4419 - DNA, 2898 bp, Homo sapiens; identical to SEQ ID NO: 1788

SEQ ID NO: 4420 - DNA, 2906 bp, Homo sapiens
aagccaacctcgctcagcggacgactggccggatcccaacgcgctgccccttgcccagcctgcgagcgcgtggtacgaaggcgcgtctgcatccatgccccagcccggggagctggaggcgctcgcagtcagaggcgagtgatgctaggctgagcgcgtggcggcccgtgtcgtgccccgctgagccaagtgcggaagggcagcggcgcgctccgactctgctcgccgcacgcagggcggggcgcggctggggggcggggggcctggccgcccgctgggagctgcggacgagcaggcgcgctgaggacccgagggaggacacggttaaagcattgctatcaactgtgaacccagagagccctccttagccaacacgctaactccgaagcctcccttacgcccccgaaccaccgaaggcggcgacacctgattcagcgcacaaacacaggtcccttctgtcccggatacaattacgcggcagacacacactcagactcgcgcggggcagccaagagacgagctatgaagtcttacactccatatttcattctcctgtggagtgctgttgggatagcgaaggctgccaaaatcatcatcgtgccgccaattatgtttgaaagccatatgtacattttcaagacgctagcctcagccttgcacgagagaggccaccatacagtgttcctcctctctgaaggcagagacatcgccccatctaatcattacagcctccagcgctacccagggatctttaacagtaccacctcagatgctttcctacagtccaagatgcggaatattttctctgggagattgacagcaatcgaactgtttgacatactggatcactatactaagaactgtgacctgatggttggcaaccatgccctgatccagggtctgaagaaagaaaaatttgacctgctgctggtggaccctaatgatatgtgtggatttgtgatagctcatcttttaggggttaaatatgctgtattttcaactggcctttggtatcctgctgaagtgggtgctcctgctccattagcatacgtcccagagtttaactcactcctcacagaccgcatgaacttgctgcaaaggatgaaaaataccggtgtttacctcatttccagattaggggtcagctttctggttcttcccaaatatgaaaggataatgcagaagtacaacctgctgccggagaagtccatgtatgatttggttcatgggtccagcctgtggatgctgtgtactgacgtagcactggaattcccaagacccactctgcctaatgttgtttatgtaggaggaatcctaaccaaaccagccagcccactaccagaagatctccaaagatgggtaaatggtgctaatgaacatggctttgtcttggtgtcttttggagctggtgtcaagtatctgtcagaagacattgctaacaaactggcaggagctctggggagattgcctcaaaaagtgatttggaggttttctggacccaaaccaaagaatctaggaaacaacactaaactcatagaatggttaccacaaaatgacctgcttgggcattcaaagattaaagccttcctgagccatggtggtttgaacagtatttttgaaactatgtatcatggtgtgcctgtagtgggaattccactctttggagaccattatgatactatgaccagagtacaggcaaaaggcatggggatattgctagaatggaagacagttactgaaaaagagctctatgaagcactagtgaaggttatcaataatcccagctaccgtcagagggctcagaagctttcggaaattcacaaggatcaacctggtcaccctgtcaatcgaactatctattggatagattatattattcgtcacaatggagcccatcacctacgtgccgctgtccatcagatctccttttgtcagtattttttactggatattgcctttgtgcttttgcttggtgctgccttgttatactttctcttgtcttgggtgacaaaatttatctacagaaaaatcaaaagtctgtggtctagaaataagcatagcacagttaatggacattaccacaatggaatcctcaatggcaagtacaaaagaaatggccatattaaacatgaaaagaaagtgaaatgagccaacagcccaggtgatagaaataaattggttcactcattgaatttttattgctattatttagtctaacagctactaaaagtaaaacatcagtaaacaattctaacatgcccttatgagatctactaatgaaattctgtggaattaagatggctgtaaaaagcacaaacctaaaatgcagaaatgtattttattcaaatactgatgtagagagttttggcactgaaccttttagaagccttaattatttaaatcaattcagtgactgtgtcagaccttagttttaaatcttgatatgtgcgtgtcccggatcaggaatggtttcatttttcttaataatgtgtgtgtgtgtatgtgtgtgtgtgtgtgtgtgtgtttgtgtgtgtgtgtgtgtgtcctaattaagagaatttttactggctgcttgttacatttgttgagggtacaacacactcaagaataaagtaaaaggatagtcaggatccagatgtttcttttctagcatttaatgtgtgtgaactcagaacactaccatgaaagaacacttccccccaaaactggatgcagaggaagaaaaaaaaaaaagaaatggcacagttttttgtatttttttttttagttattttttgttgttgttgtttgtattgtttttcttttctgatagagtatggccacttctgggggaaaaacatgtaattaagtaaatgtatacattggttttcacgttttacttttgttttcccactaccaataatttt

SEQ ID NO: 4421 - DNA, 5160 bp, Homo sapiens; identical to SEQ ID NO: 2534

SEQ ID NO: 4422 - DNA, 1395 bp, Homo sapiens; identical to SEQ ID NO: 1772

SEQ ID NO: 4423 - DNA, 1111 bp, Homo sapiens
gggtgacctcacgccggcccggccaccgcggccattagacccggtccaattgctggggctgcagcgctgcctccgagaccgcgagacatctacgcagcgaaatcgagcctggccttgagggtccacaccgcgagggaagatgcgtgcgcccattccagagcctaagcctggagacctgattgagatttttcgccctttctacagacactgggccatctatgttggcgatggatatgtggttcatctggcccctccaagtgaggtcgcaggagctggtgcagccagtgtcatgtccgccctgactgacaaggccatcgtgaagaaggaattgctgtatgatgtggccgggagtgacaagtaccaggtcaacaacaaacatgatgacaagtactcgccgctgccctgcagcaaaatcatccagcgggcggaggagctggtggggcaggaggtgctctacaagctgaccagtgagaactgcgagcactttgtgaatgagctgcgctatggagtcgcccgcagtgaccaggtcagagatgtcatcatcgctgcaagcgttgcaggaatgggcttggcagccatgagccttattggagtcatgttctcaagaaacaagcgacaaaagcaataactgaaaaagactgtcctgtcagcgatgactttatacatcaagggggtcttgttttgctagagagtttggggtttggtttgtggatttcattgtgatttataataaggcttattttcacagaataaaataaagcaaaacgagggaggattttattgggggaagtgcagcaagaactgcctggtgtgaagtctgttcagggaacagccgggctgtcttcctggtcagggattgtctttcactttctttttgcgtgctgtgttctttgcattgcaggaggcagagtccagctccagttatctcaagtagagggcgtttctggtcgtcaggatacatgcggggcggaagggagacagaaagacataatacacaagaacagaaagcagcagacagccaggacccttggcccggaactagatctaggatggcctctgagactcagcagctggagtctgtagatgttcagctgagttgaaaaaaaaaaag

SEQ ID NO: 4424 - DNA, 5710 bp, Homo sapiens
aggttacttgactgggagttctcagacctccagtttcagccctgccctcagcctccaatccgtaagagacacccagccccagcaattggattgggcagcccgtcttgacacaccactgtgctgagtgcttgaggacgtgtttcaacagatggttggggttagtgtgtgtcatcacattcgagtggggattaagagaaggaaggctgccttgctggagctgtgtggtcttctccaagtgagagtcgcaggcaatagaactactttgcttttggaggaaaaggaggaattcattttcagcagacacaagaaaagcagtttttttttcagggattcttcacttctcttgaacaaggaactcactcagagactaacacaaaggaagtaatttcttacctggtcattatttagtctacaataagttcatccttcttcagtgtgaccagtaaattcttcccatactcttgaagagagcataattggaatggagaggtgctgacggccacccaccatcatctaaagaagataaacttggcaaatgacatgcaggttcttcaaggcagaataattgcagaaaatcttcaaaggaccctatctgcagatgttctgaatacctctgagaatagagattgattattcaaccaggatacctaattcaagaactccagaaatcaggagacggagacattttgtcagttttgcaacattggaccaaatacaatgaagtattcttgctgtgctctggttttggctgtcctgggcacagaattgctgggaagcctctgttcgactgtcagatccccgaggttcagaggacggatacagcaggaacgaaaaaacatccgacccaacattattcttgtgcttaccgatgatcaagatgtggagctggggtccctgcaagtcatgaacaaaacgagaaagattatggaacatgggggggccaccttcatcaatgcctttgtgactacacccatgtgctgcccgtcacggtcctccatgctcaccgggaagtatgtgcacaatcacaatgtctacaccaacaacgagaactgctcttccccctcgtggcaggccatgcatgagcctcggacttttgctgtatatcttaacaacactggctacagaacagccttttttggaaaatacctcaatgaatataatggcagctacatcccccctgggtggcgagaatggcttggattaatcaagaattctcgcttctataattacactgtttgtcgcaatggcatcaaagaaaagcatggatttgattatgcaaaggactacttcacagacttaatcactaacgagagcattaattacttcaaaatgtctaagagaatgtatccccataggcccgttatgatggtgatcagccacgctgcgccccacggccccgaggactcagccccacagttttctaaactgtaccccaatgcttcccaacacataactcctagttataactatgcaccaaatatggataaacactggattatgcagtacacaggaccaatgctgcccatccacatggaatttacaaacattctacagcgcaaaaggctccagactttgatgtcagtggatgattctgtggagaggctgtataacatgctcgtggagacgggggagctggagaatacttacatcatttacaccgccgaccatggttaccatattgggcagtttggactggtcaaggggaaatccatgccatatgactttgatattcgtgtgcctttttttattcgtggtccaagtgtagaaccaggatcaatagtcccacagatcgttctcaacattgacttggcccccacgatcctggatattgctgggctcgacacacctcctgatgtggacggcaagtctgtcctcaaacttctggacccagaaaagccaggtaacaggtttcgaacaaacaagaaggccaaaatttggcgtgatacattcctagtggaaagaggcaaatttctacgtaagaaggaagaatccagcaagaatatccaacagtcaaatcacttgcccaaatatgaacgggtcaaagaactatgccagcaggccaggtaccagacagcctgtgaacaaccggggcagaagtggcaatgcattgaggatacatctggcaagcttcgaattcacaagtgtaaaggacccagtgacctgctcacagtccggcagagcacgcggaacctctacgctcgcggcttccatgacaaagacaaagagtgcagttgtagggagtctggttaccgtgccagcagaagccaaagaaagagtcaacggcaattcttgagaaaccaggggactccaaagtacaagcccagatttgtccatactcggcagacacgttccttgtccgtcgaatttgaaggtgaaatatatgacataaatctggaagaagaagaagaattgcaagtgttgcaaccaagaaacattgctaagcgtcatgatgaaggccacaaggggccaagagatctccaggcttccagtggtggcaacaggggcaggatgctggcagatagcagcaacgccgtgggcccacctaccactgtccgagtgacacacaagtgttttattcttcccaatgactctatccattgtgagagagaactgtaccaatcggccagagcgtggaaggaccataaggcatacattgacaaagagattgaagctctgcaagataaaattaagaatttaagagaagtgagaggacatctgaagagaaggaagcctgaggaatgtagctgcagtaaacaaagctattacaataaagagaaaggtgtaaaaaagcaagagaaattaaagagccatcttcacccattcaaggaggctgctcaggaagtagatagcaaactgcaacttttcaaggagaacaaccgtaggaggaagaaggagaggaaggagaagagacggcagaggaagggggaagagtgcagcctgcctggcctcacttgcttcacgcatgacaacaaccactggcagacagccccgttctggaacctgggatctttctgtgcttgcacgagttctaacaataacacctactggtgtttgcgtacagttaatgagacgcataattttcttttctgtgagtttgctactggctttttggagtattttgatatgaatacagatccttatcagctcacaaatacagtgcacacggtagaacgaggcattttgaatcagctacacgtacaactaatggagctcagaagctgtcaaggatataagcagtgcaacccaagacctaagaatcttgatgttggaaataaagatggaggaagctatgacctacacagaggacagttatgggatggatgggaaggttaatcagccccgtctcactgcagacatcaactggcaaggcctagaggagctacacagtgtgaatgaaaacatctatgagtacagacaaaactacagacttagtctggtggactggactaattacttgaaggatttagatagagtatttgcactgctgaagagtcactatgagcaaaataaaacaaataagactcaaactgctcaaagtgacgggttcttggttgtctctgctgagcacgctgtgtcaatggagatggcctctgctgactcagatgaagacccaaggcataaggttgggaaaacacctcatttgaccttgccagctgaccttcaaaccctgcatttgaaccgaccaacattaagtccagagagtaaacttgaatggaataacgacattccagaagttaatcatttgaattctgaacactggagaaaaaccgaaaaatggacggggcatgaagagactaatcatctggaaaccgatttcagtggcgatggcatgacagagctagagctcgggcccagccccaggctgcagcccattcgcaggcacccgaaagaacttccccagtatggtggtcctggaaaggacatttttgaagatcaactatatcttcctgtgcattccgatggaatttcagttcatcagatgttcaccatggccaccgcagaacaccgaagtaattccagcatagcggggaagatgttgaccaaggtggagaagaatcacgaaaaggagaagtcacagcacctagaaggcagcgcctcctcttcactctcctctgattagatgaaactgttaccttaccctaaacacagtatttctttttaacttttttatttgtaaactaataaaggtaatcacagccaccaacattccaagctaccctgggtacctttgtgcagtagaagctagtgagcatgtgagcaagcggtgtgcacacggagactcatcgttataatttactatctgccaagagtagaaagaaaggctggggatatttgggttggcttggttttgattttttgcttgtttgtttgttttgtactaaaacagtattatcttttgaatatcgtagggacataagtatatacatgttatccaatcaagatggctagaatggtgcctttctgagtgtctaaaacttgacacccctggtaaatctttcaacacacttccactgcctgcgtaatgaagttttgattcatttttaaccactggaatttttcaatgccgtcattttcagttagatgattttgcactttgagattaaaatgccatgtctatttgattagtcttatttttttatttttacaggcttatcagtctcactgttggctgtcattgtgacaaagtcaaataaacccccaaggacgacacacagtatggatcacatattgtttgacattaagcttttgccagaaaatgttgcatgtgttttacctcgacttgctaaaatcgattagcagaaaggcatggctaataatgttggtggtgaaaataaataaataagtaaacaaaatgaagattgcctgctctctctgtgcctagcctcaaagcgttcatcatacatcatacctttaagattgctatattttgggttattttcttgacaggagaaaaagatctaaagatcttttattttcatcttttttggttttcttggcatgactaagaagcttaaatgttgataaaatatgactagttttgaatttacaccaagaacttctcaataaaagaaaatcatgaatgctccacaatttcaacataccacaagagaagttaatttcttaacattgtgttctatgattatttgtaagaccttcaccaagttctgatatcttttaaagacatagttcaaaattgcttttgaaaatctgtattcttgaaaatatccttgttgtgtattaggtttttaaataccagctaaaggattacctcactgagtcatcagtaccctcctattcagctccccaagatgatgtgtttttgcttaccctaagagaggttttcttcttatttttagataattcaagtgcttagataaattatgttttctttaagtgtttatggtaaactcttttaaagaaaatttaatatgttatagctgaatctttttggtaactttaaatctttatcatagactctgtacatatgttcaaattagctgcttgcctgatgtgtgtatcatcggtgggatgacagaacaaacatatttatgatcatgaataatgtgctttgtaaaaagatttcaagttattaggaagcatactctgttttttaatcatgtataatattccatgatacttttatagaacaattctggcttcaggaaagtctagaagcaatatttcttcaaataaaaggtgtttaaacttt

SEQ ID NO: 4425 - DNA, 5548 bp, Homo sapiens
aggttacttgactgggagttctcagacctccagtttcagccctgccctcagcctccaatccgtaagagacacccagccccagcaattggattgggcagcccgtcttgacacaccactgtgctgagtgcttgaggacgtgtttcaacagatggttggggttagtgtgtgtcatcacattcgagtggggattaagagaaggaaggctgccttgctggagctgtgtggtcttctccaagtgagagtcgcaggcaatagaactactttgcttttggaggaaaaggaggaattcattttcagcagacacaagaaaagcagtttttttttcaggtgctgacggccacccaccatcatctaaagaagataaacttggcaaatgacatgcaggttcttcaaggcagaataattgcagaaaatcttcaaaggaccctatctgcagatgttctgaatacctctgagaatagagattgattattcaaccaggatacctaattcaagaactccagaaatcaggagacggagacattttgtcagttttgcaacattggaccaaatacaatgaagtattcttgctgtgctctggttttggctgtcctgggcacagaattgctgggaagcctctgttcgactgtcagatccccgaggttcagaggacggatacagcaggaacgaaaaaacatccgacccaacattattcttgtgcttaccgatgatcaagatgtggagctggggtccctgcaagtcatgaacaaaacgagaaagattatggaacatgggggggccaccttcatcaatgcctttgtgactacacccatgtgctgcccgtcacggtcctccatgctcaccgggaagtatgtgcacaatcacaatgtctacaccaacaacgagaactgctcttccccctcgtggcaggccatgcatgagcctcggacttttgctgtatatcttaacaacactggctacagaacagccttttttggaaaatacctcaatgaatataatggcagctacatcccccctgggtggcgagaatggcttggattaatcaagaattctcgcttctataattacactgtttgtcgcaatggcatcaaagaaaagcatggatttgattatgcaaaggactacttcacagacttaatcactaacgagagcattaattacttcaaaatgtctaagagaatgtatccccataggcccgttatgatggtgatcagccacgctgcgccccacggccccgaggactcagccccacagttttctaaactgtaccccaatgcttcccaacacataactcctagttataactatgcaccaaatatggataaacactggattatgcagtacacaggaccaatgctgcccatccacatggaatttacaaacattctacagcgcaaaaggctccagactttgatgtcagtggatgattctgtggagaggctgtataacatgctcgtggagacgggggagctggagaatacttacatcatttacaccgccgaccatggttaccatattgggcagtttggactggtcaaggggaaatccatgccatatgactttgatattcgtgtgcctttttttattcgtggtccaagtgtagaaccaggatcaatagtcccacagatcgttctcaacattgacttggcccccacgatcctggatattgctgggctcgacacacctcctgatgtggacggcaagtctgtcctcaaacttctggacccagaaaagccaggtaacaggtttcgaacaaacaagaaggccaaaatttggcgtgatacattcctagtggaaagaggcaaatttctacgtaagaaggaagaatccagcaagaatatccaacagtcaaatcacttgcccaaatatgaacgggtcaaagaactatgccagcaggccaggtaccagacagcctgtgaacaaccggggcagaagtggcaatgcattgaggatacatctggcaagcttcgaattcacaagtgtaaaggacccagtgacctgctcacagtccggcagagcacgcggaacctctacgctcgcggcttccatgacaaagacaaagagtgcagttgtagggagtctggttaccgtgccagcagaagccaaagaaagagtcaacggcaattcttgagaaaccaggggactccaaagtacaagcccagatttgtccatactcggcagacacgttccttgtccgtcgaatttgaaggtgaaatatatgacataaatctggaagaagaagaagaattgcaagtgttgcaaccaagaaacattgctaagcgtcatgatgaaggccacaaggggccaagagatctccaggcttccagtggtggcaacaggggcaggatgctggcagatagcagcaacgccgtgggcccacctaccactgtccgagtgacacacaagtgttttattcttcccaatgactctatccattgtgagagagaactgtaccaatcggccagagcgtggaaggaccataaggcatacattgacaaagagattgaagctctgcaagataaaattaagaatttaagagaagtgagaggacatctgaagagaaggaagcctgaggaatgtagctgcagtaaacaaagctattacaataaagagaaaggtgtaaaaaagcaagagaaattaaagagccatcttcacccattcaaggaggctgctcaggaagtagatagcaaactgcaacttttcaaggagaacaaccgtaggaggaagaaggagaggaaggagaagagacggcagaggaagggggaagagtgcagcctgcctggcctcacttgcttcacgcatgacaacaaccactggcagacagccccgttctggaacctgggatctttctgtgcttgcacgagttctaacaataacacctactggtgtttgcgtacagttaatgagacgcataattttcttttctgtgagtttgctactggctttttggagtattttgatatgaatacagatccttatcagctcacaaatacagtgcacacggtagaacgaggcattttgaatcagctacacgtacaactaatggagctcagaagctgtcaaggatataagcagtgcaacccaagacctaagaatcttgatgttggaaataaagatggaggaagctatgacctacacagaggacagttatgggatggatgggaaggttaatcagccccgtctcactgcagacatcaactggcaaggcctagaggagctacacagtgtgaatgaaaacatctatgagtacagacaaaactacagacttagtctggtggactggactaattacttgaaggatttagatagagtatttgcactgctgaagagtcactatgagcaaaataaaacaaataagactcaaactgctcaaagtgacgggttcttggttgtctctgctgagcacgctgtgtcaatggagatggcctctgctgactcagatgaagacccaaggcataaggttgggaaaacacctcatttgaccttgccagctgaccttcaaaccctgcatttgaaccgaccaacattaagtccagagagtaaacttgaatggaataacgacattccagaagttaatcatttgaattctgaacactggagaaaaaccgaaaaatggacggggcatgaagagactaatcatctggaaaccgatttcagtggcgatggcatgacagagctagagctcgggcccagccccaggctgcagcccattcgcaggcacccgaaagaacttccccagtatggtggtcctggaaaggacatttttgaagatcaactatatcttcctgtgcattccgatggaatttcagttcatcagatgttcaccatggccaccgcagaacaccgaagtaattccagcatagcggggaagatgttgaccaaggtggagaagaatcacgaaaaggagaagtcacagcacctagaaggcagcgcctcctcttcactctcctctgattagatgaaactgttaccttaccctaaacacagtatttctttttaacttttttatttgtaaactaataaaggtaatcacagccaccaacattccaagctaccctgggtacctttgtgcagtagaagctagtgagcatgtgagcaagcggtgtgcacacggagactcatcgttataatttactatctgccaagagtagaaagaaaggctggggatatttgggttggcttggttttgattttttgcttgtttgtttgttttgtactaaaacagtattatcttttgaatatcgtagggacataagtatatacatgttatccaatcaagatggctagaatggtgcctttctgagtgtctaaaacttgacacccctggtaaatctttcaacacacttccactgcctgcgtaatgaagttttgattcatttttaaccactggaatttttcaatgccgtcattttcagttagatgattttgcactttgagattaaaatgccatgtctatttgattagtcttatttttttatttttacaggcttatcagtctcactgttggctgtcattgtgacaaagtcaaataaacccccaaggacgacacacagtatggatcacatattgtttgacattaagcttttgccagaaaatgttgcatgtgttttacctcgacttgctaaaatcgattagcagaaaggcatggctaataatgttggtggtgaaaataaataaataagtaaacaaaatgaagattgcctgctctctctgtgcctagcctcaaagcgttcatcatacatcatacctttaagattgctatattttgggttattttcttgacaggagaaaaagatctaaagatcttttattttcatcttttttggttttcttggcatgactaagaagcttaaatgttgataaaatatgactagttttgaatttacaccaagaacttctcaataaaagaaaatcatgaatgctccacaatttcaacataccacaagagaagttaatttcttaacattgtgttctatgattatttgtaagaccttcaccaagttctgatatcttttaaagacatagttcaaaattgcttttgaaaatctgtattcttgaaaatatccttgttgtgtattaggtttttaaataccagctaaaggattacctcactgagtcatcagtaccctcctattcagctccccaagatgatgtgtttttgcttaccctaagagaggttttcttcttatttttagataattcaagtgcttagataaattatgttttctttaagtgtttatggtaaactcttttaaagaaaatttaatatgttatagctgaatctttttggtaactttaaatctttatcatagactctgtacatatgttcaaattagctgcttgcctgatgtgtgtatcatcggtgggatgacagaacaaacatatttatgatcatgaataatgtgctttgtaaaaagatttcaagttattaggaagcatactctgttttttaatcatgtataatattccatgatacttttatagaacaattctggcttcaggaaagtctagaagcaatatttcttcaaataaaaggtgtttaaacttt

SEQ ID NO: 4426 - DNA, 5716 bp, Homo sapiens; identical to SEQ ID NO: 2314

SEQ ID NO: 4427 - DNA, 5554 bp, Homo sapiens
gtgatgataataatacgcgggcttatataaccgtcttcatcttgcgagcacttcgcagaccgtcgctaatgaatcttggggccggtgtcgggccggggcggcttgatcggcaactaggaaaccccaggcgcagaggccaggagcgagggcagcgaggatcagaggccaggccttcccggctgccggcgctcctcggaggtcagggcagatgaggaacatgactctcccccttcggaggaggaaggaagtcccgctgccaccttatctctgctcctctgcctcctccctgttcccagagctttttctctagagaagattttgaaggcggcttttgtgctgacggccacccaccatcatctaaagaagataaacttggcaaatgacatgcaggttcttcaaggcagaataattgcagaaaatcttcaaaggaccctatctgcagatgttctgaatacctctgagaatagagattgattattcaaccaggatacctaattcaagaactccagaaatcaggagacggagacattttgtcagttttgcaacattggaccaaatacaatgaagtattcttgctgtgctctggttttggctgtcctgggcacagaattgctgggaagcctctgttcgactgtcagatccccgaggttcagaggacggatacagcaggaacgaaaaaacatccgacccaacattattcttgtgcttaccgatgatcaagatgtggagctggggtccctgcaagtcatgaacaaaacgagaaagattatggaacatgggggggccaccttcatcaatgcctttgtgactacacccatgtgctgcccgtcacggtcctccatgctcaccgggaagtatgtgcacaatcacaatgtctacaccaacaacgagaactgctcttccccctcgtggcaggccatgcatgagcctcggacttttgctgtatatcttaacaacactggctacagaacagccttttttggaaaatacctcaatgaatataatggcagctacatcccccctgggtggcgagaatggcttggattaatcaagaattctcgcttctataattacactgtttgtcgcaatggcatcaaagaaaagcatggatttgattatgcaaaggactacttcacagacttaatcactaacgagagcattaattacttcaaaatgtctaagagaatgtatccccataggcccgttatgatggtgatcagccacgctgcgccccacggccccgaggactcagccccacagttttctaaactgtaccccaatgcttcccaacacataactcctagttataactatgcaccaaatatggataaacactggattatgcagtacacaggaccaatgctgcccatccacatggaatttacaaacattctacagcgcaaaaggctccagactttgatgtcagtggatgattctgtggagaggctgtataacatgctcgtggagacgggggagctggagaatacttacatcatttacaccgccgaccatggttaccatattgggcagtttggactggtcaaggggaaatccatgccatatgactttgatattcgtgtgcctttttttattcgtggtccaagtgtagaaccaggatcaatagtcccacagatcgttctcaacattgacttggcccccacgatcctggatattgctgggctcgacacacctcctgatgtggacggcaagtctgtcctcaaacttctggacccagaaaagccaggtaacaggtttcgaacaaacaagaaggccaaaatttggcgtgatacattcctagtggaaagaggcaaatttctacgtaagaaggaagaatccagcaagaatatccaacagtcaaatcacttgcccaaatatgaacgggtcaaagaactatgccagcaggccaggtaccagacagcctgtgaacaaccggggcagaagtggcaatgcattgaggatacatctggcaagcttcgaattcacaagtgtaaaggacccagtgacctgctcacagtccggcagagcacgcggaacctctacgctcgcggcttccatgacaaagacaaagagtgcagttgtagggagtctggttaccgtgccagcagaagccaaagaaagagtcaacggcaattcttgagaaaccaggggactccaaagtacaagcccagatttgtccatactcggcagacacgttccttgtccgtcgaatttgaaggtgaaatatatgacataaatctggaagaagaagaagaattgcaagtgttgcaaccaagaaacattgctaagcgtcatgatgaaggccacaaggggccaagagatctccaggcttccagtggtggcaacaggggcaggatgctggcagatagcagcaacgccgtgggcccacctaccactgtccgagtgacacacaagtgttttattcttcccaatgactctatccattgtgagagagaactgtaccaatcggccagagcgtggaaggaccataaggcatacattgacaaagagattgaagctctgcaagataaaattaagaatttaagagaagtgagaggacatctgaagagaaggaagcctgaggaatgtagctgcagtaaacaaagctattacaataaagagaaaggtgtaaaaaagcaagagaaattaaagagccatcttcacccattcaaggaggctgctcaggaagtagatagcaaactgcaacttttcaaggagaacaaccgtaggaggaagaaggagaggaaggagaagagacggcagaggaagggggaagagtgcagcctgcctggcctcacttgcttcacgcatgacaacaaccactggcagacagccccgttctggaacctgggatctttctgtgcttgcacgagttctaacaataacacctactggtgtttgcgtacagttaatgagacgcataattttcttttctgtgagtttgctactggctttttggagtattttgatatgaatacagatccttatcagctcacaaatacagtgcacacggtagaacgaggcattttgaatcagctacacgtacaactaatggagctcagaagctgtcaaggatataagcagtgcaacccaagacctaagaatcttgatgttggaaataaagatggaggaagctatgacctacacagaggacagttatgggatggatgggaaggttaatcagccccgtctcactgcagacatcaactggcaaggcctagaggagctacacagtgtgaatgaaaacatctatgagtacagacaaaactacagacttagtctggtggactggactaattacttgaaggatttagatagagtatttgcactgctgaagagtcactatgagcaaaataaaacaaataagactcaaactgctcaaagtgacgggttcttggttgtctctgctgagcacgctgtgtcaatggagatggcctctgctgactcagatgaagacccaaggcataaggttgggaaaacacctcatttgaccttgccagctgaccttcaaaccctgcatttgaaccgaccaacattaagtccagagagtaaacttgaatggaataacgacattccagaagttaatcatttgaattctgaacactggagaaaaaccgaaaaatggacggggcatgaagagactaatcatctggaaaccgatttcagtggcgatggcatgacagagctagagctcgggcccagccccaggctgcagcccattcgcaggcacccgaaagaacttccccagtatggtggtcctggaaaggacatttttgaagatcaactatatcttcctgtgcattccgatggaatttcagttcatcagatgttcaccatggccaccgcagaacaccgaagtaattccagcatagcggggaagatgttgaccaaggtggagaagaatcacgaaaaggagaagtcacagcacctagaaggcagcgcctcctcttcactctcctctgattagatgaaactgttaccttaccctaaacacagtatttctttttaacttttttatttgtaaactaataaaggtaatcacagccaccaacattccaagctaccctgggtacctttgtgcagtagaagctagtgagcatgtgagcaagcggtgtgcacacggagactcatcgttataatttactatctgccaagagtagaaagaaaggctggggatatttgggttggcttggttttgattttttgcttgtttgtttgttttgtactaaaacagtattatcttttgaatatcgtagggacataagtatatacatgttatccaatcaagatggctagaatggtgcctttctgagtgtctaaaacttgacacccctggtaaatctttcaacacacttccactgcctgcgtaatgaagttttgattcatttttaaccactggaatttttcaatgccgtcattttcagttagatgattttgcactttgagattaaaatgccatgtctatttgattagtcttatttttttatttttacaggcttatcagtctcactgttggctgtcattgtgacaaagtcaaataaacccccaaggacgacacacagtatggatcacatattgtttgacattaagcttttgccagaaaatgttgcatgtgttttacctcgacttgctaaaatcgattagcagaaaggcatggctaataatgttggtggtgaaaataaataaataagtaaacaaaatgaagattgcctgctctctctgtgcctagcctcaaagcgttcatcatacatcatacctttaagattgctatattttgggttattttcttgacaggagaaaaagatctaaagatcttttattttcatcttttttggttttcttggcatgactaagaagcttaaatgttgataaaatatgactagttttgaatttacaccaagaacttctcaataaaagaaaatcatgaatgctccacaatttcaacataccacaagagaagttaatttcttaacattgtgttctatgattatttgtaagaccttcaccaagttctgatatcttttaaagacatagttcaaaattgcttttgaaaatctgtattcttgaaaatatccttgttgtgtattaggtttttaaataccagctaaaggattacctcactgagtcatcagtaccctcctattcagctccccaagatgatgtgtttttgcttaccctaagagaggttttcttcttatttttagataattcaagtgcttagataaattatgttttctttaagtgtttatggtaaactcttttaaagaaaatttaatatgttatagctgaatctttttggtaactttaaatctttatcatagactctgtacatatgttcaaattagctgcttgcctgatgtgtgtatcatcggtgggatgacagaacaaacatatttatgatcatgaataatgtgctttgtaaaaagatttcaagttattaggaagcatactctgttttttaatcatgtataatattccatgatacttttatagaacaattctggcttcaggaaagtctagaagcaatatttcttcaaataaaaggtgtttaaacttt

SEQ ID NO: 4428 - DNA, 3721 bp, Homo sapiens; identical to SEQ ID NO: 737

SEQ ID NO: 4429 - DNA, 2425 bp, Homo sapiens
agtggttcccgcaggcttgcgcgcgcactcgctgcgggacaagcttctggaagctctttgcggtggcgttggtgctgtttgcggatgctgatgcagtttctgcaggactgtaaactggattcctggaacctttgatattcctggctgtgtatagtgcctgttggtggactgtactgatactcaactagagtgtgaagggactggattcctgcccctgagacacaatgcaagctgtagtgcccttgaacaagatgacagccatctcaccagaacctcaaactctggcctcgactgaacaaaatgaggtcccaagagtggttacttctggggaacaagaagctattttaagaggaaatgctgctgatgcagagtctttcagacagaggtttaggtggttttgttactcagaagtagctggacccaggaaagctctgagtcaactctgggagctctgcaatcagtggctgagaccagacattcacacgaaagaacagattttagagcttctggtgtttgagcagttcctgaccattttgcctggggagatcaggatttgggtaaagtcacaacatcctgagagtagtgaggaagtggtgaccctaatagaagatttgacccagatgcttgaagaaaaagatccagtctctcaagattctactgtttcccaagaggagaactcaaaagaggataaaatggtcactgtttgtcccaatactgagtcctgtgaatctataacattgaaggatgtagctgtgaacttttcaagaggagagtggaagaagctggagccttttcaaaaggagctatataaggaagtgctactggaaaacctcaggaacctagaatttctggactttccagtttcaaaattagagttgatttcccagctaaagtgggttgaattgccatggctgctggaagaagtctcaaaaagctcccgactagacatacatggagcagtaaaaaagatgcagatgttctctgaggctgaataagaccatgctctgccttcttgtttcaactgttacacagagatgaccagaggatggggccactgcagtgcagttcaagaggctctggttcggggaagagctggatggagtatgaatcccaactctgggggtattagctagtggagtggccataggcaagttacttaacacttctgaacctccttttgtctttcataaaataaaagctactaggatgagttgttttaaggatttcagattatagtctatgtgagatatgtgcaaacatgtacatatttcccctagaagcaatggttttcagccttggtggtgaccttatagaacataaatattgtgaataatgaaaatccactgaatctaataagggacttgtatcggtaagatgtaaagaactcttggccaggtgtggtggctcatgcctataatcccagcactttgggaggccaaggcaggtggatcacctgaggtcaggagttcgagaccaacctggccaacatgacgaaactccgtctctatttaaaatacaaaaattagctgggcatggtggtgcatgcctgtaatcccagctactcgggaggctgaggcaggagaatcacttgaactcgggaggtggaggttgcagtgagccaagatcgcgccactgcactccagcctggatgacagagcaaaaaactgtctcaaaaaaaaaaaaatcttacaacctcacaaataacctagttcaaaaatgggcaaagattttgaacagatatttctccaaagaagatatacaaatggcaaatacatacgttgaaagatccttaatattgttagccatagggaaatgcaagtcaaactcaaatcagaatgaaatatcacttcaaacctactaggatggttataataaaaaagacagacaatagcacgtgttggtgagtatgtagagaagttggaaccctcatacactgcttgtgggaatgtaaagtactgtagccactttgcaaaacagtttgacagctcctcaaaatgttaaacatgaaattatcatatgacccagcaattctactcataggtatatacttaaaagaaatgaaaaatccacacaaaaacctctgcatgaatgttcatagtaacattatacttcatagccagaaagtataagctaatacccatcaggctgggtgtggtggctcacgcctgtaatcctagcactttgggaggccgagttgggaggtttgcttgagcccaggagttccagaccagcctgggcaacatggcgaaaccccatctctactaaaaatataaaaattagttgcgtgtggtggcacatccctatagtcccagctacttgggaggctgaggtggaaggattgcttgagcgagggaggtcgaggctgcagtgagccacgatcacaccactgcactccagcctaggtgacagagtgagatcctgtctc

SEQ ID NO: 4430 - DNA, 3058 bp, Homo sapiens; identical to SEQ ID NO: 2524

SEQ ID NO: 4431 - DNA, 2956 bp, Homo sapiens
aaaaatgcataaagagccaagtgcttatattctggccaagttatgaggctctgagaacaagagcttgaggggaagactgttaaccccatccacgccaccagaattagctctttcccttttggtttgcaagcactgcctgtaaagccctcgcatgagaggccagcctgctagggaaatccaggaatctgcaacaaaaacgatgacagtctgaaatactctctggtgccaacctccaaattctcgtctgtcacttcagacccccactagttgacagagcagcagaatttcaactccagtagacttgaatatgcctctgggcaaagaagcagagctaacgaggaaagggatttaaagagtttttcttgggtgtttgtcaaacttttattccctgtctgtgtgcagaggggattcaacttcaatttttctgcagtggctctgggtccagccccttacttaaagatctggaaagcatgaagactgggctttttttcctatgtctcttgggaactgcagctgcaatcccgacaaatgcaagattattatctgatcattccaaaccaactgctgaaacggtagcacctgacaacactgcaatccccagtttaagggctgaagctgaagaaaatgaaaaagaaacagcagtatccacagaagacgattcccaccataaggctgaaaaatcatcagtactaaagtcaaaagaggaaagccatgaacagtcagcagaacagggcaagagttctagccaagagctgggattgaaggatcaagaggacagtgatggtcacttaagtgtgaatttggagtatgcaccaactgaaggtacattggacataaaagaagatatgagtgagcctcaggagaaaaaactctcagagaacactgattttttggctcctggtgttagttccttcacagattctaaccaacaagaaagtatcacaaagagagaggaaaaccaagaacaacctagaaattattcacatcatcagttgaacaggagcagtaaacatagccaaggcctaagggatcaaggaaaccaagagcaggatccaaatatttccaatggagaagaggaagaagaaaaagagccaggtgaagttggtacccacaatgataaccaagaaagaaagacagaattgcccagggagcatgctaacagcaagcaggaggaagacaatacccaatctgatgatattttggaagagtctgatcaaccaactcaagtaagcaagatgcaggaggatgaatttgatcagggtaaccaagaacaagaagataactccaatgcagaaatggaagaggaaaatgcatcgaacgtcaataagcacattcaagaaactgaatggcagagtcaagagggtaaaactggcctagaagctatcagcaaccacaaagagacagaagaaaagactgtttctgaggctctgctcatggaacctactgatgatggtaataccacgcccagaaatcatggagttgatgatgatggcgatgatgatggcgatgatggcggcactgatggccccaggcacagtgcaagtgatgactacttcatcccaagccaggcctttctggaggccgagagagctcaatccattgcctatcacctcaaaattgaggagcaaagagaaaaagtacatgaaaatgaaaatataggtaccactgagcctggagagcaccaagaggccaagaaagcagagaactcatcaaatgaggaggaaacgtcaagtgaaggcaacatgagggtgcatgctgtggattcttgcatgagcttccagtgtaaaagaggccacatctgtaaggcagaccaacagggaaaacctcactgtgtctgccaggatccagtgacttgtcctccaacaaaaccccttgatcaagtttgtggcactgacaatcagacctatgctagttcctgtcatctattcgctactaaatgcagactggaggggaccaaaaaggggcatcaactccagctggattattttggagcctgcaaatctattcctacttgtacggactttgaagtgattcagtttcctctacggatgagagactggctcaagaatatcctcatgcagctttatgaagccaactctgaacacgctggttatctaaatgagaagcagagaaataaagtcaagaaaatttacctggatgaaaagaggcttttggctggggaccatcccattgatcttctcttaagggactttaagaaaaactaccacatgtatgtgtatcctgtgcactggcagtttagtgaacttgaccaacaccctatggatagagtcttgacacattctgaacttgctcctctgcgagcatctctggtgcccatggaacactgcataacccgtttctttgaggagtgtgaccccaacaaggataagcacatcaccctgaaggagtggggccactgctttggaattaaagaagaggacatagatgaaaatctcttgttttgaacgaagattttaaagaactcaactttccagcatcctcctctgttctaaccacttcagaaatatatgcagctgtgatacttgtagatttatatttagcaaaatgttagcatgtatgacaagacaatgagagtaattgcttgacaacaacctatgcaccaggtatttaacattaactttggaaacaaaaatgtacaattaagtaaagtcaacatatgcaaaatactgtacattgtgaacagaagtttaattcatagtaatttcactctctgcattgacttatgagataattaatgattaaactattaatgataaaaataatgcatttgtattgttcataatatcatgtgcacttcaagaaaatggaatgctactcttttgtggtttacgtgtattattttcaatatcttaataccctaataaagagtccataaaaatccaaaaaaaaaaaaaaaaaaaaaaaaaaaaaaaaaaaaaaaaaaaaaaaaaaaaaa

SEQ ID NO: 4432 - DNA, 5434 bp, Homo sapiens; identical to SEQ ID NO: 817

SEQ ID NO: 4433 - DNA, 4833 bp, Homo sapiens
gtgaactgttgcaccgtgcaattgcacactataaatgtctttccttatctgtgtgtactcttatctcactgttctattttttctcctcatttatattaactctttcttacctttttttctgaacttctaggccttctctttccagaactggtggaagacaaatgaaacggccaagatggtaagaaacaagccgcatttctccttggggagactgataatttaaaaggtttgttgtgtcagaaacattcccagcttcatcaccaaccctttccttccacctctgcccactggagaccacttatatcccgaagcggacgcggcagctgaagtcaggaaaccatgcatcacattagcaggagccaactgcagactttaaactccgttcaacatgtggatgcggcagagaaatgacctgtccagacaagccggggcagctcataaactggttcatctgctccctgtgcgtcccgcgggtgcgtaagctctggagcagccggcgtccaaggacccggagaaaccttctgctgggcactgcgtgtgccatctacttgggcttcctggtgagccaggtggggagggcctctctccagcatggacaggcggctgagaaggggccacatcgcagccgcgacaccgccgagccatccttccctgagatacccctggatggtaccctggcccctccagagtcccagggcaatgggtccactctgcagcccaatgtggtgtacattaccctacgctccaagcgcagcaagccggccaatatccgtggcaccgtgaagcccaagcgcaggaaaaagcatgcagtggcatcggctgccccagggcaggaggctttggtcggaccatcccttcagccgcaggaagcggcaagggaagctgatgctgtagcacctgggtacgctcagggagcaaacctggttaagattggagagcgaccctggaggttggtgcggggtccgggagtgcgagccgggggcccagacttcctgcagcccagctccagggagagcaacattaggatctacagcgagagcgccccctcctggctgagcaaagatgacatccgaagaatgcgactcttggcggacagcgcagtggcagggctccggcctgtgtcctctaggagcggagcccgtttgctggtgctggaggggggcgcacctggcgctgtgctccgctgtggccctagcccctgtgggcttctcaagcagcccttggacatgagtgaggtgtttgccttccacctagacaggatcctggggctcaacaggaccctgccgtctgtgagcaggaaagcagagttcatccaagcagcagcagcagcgtgtctttccatgcgcttggcattctttattttcccagcctgggaggatatgagagttccagggaaatgctgtattggacatgcaagactcacctggggaacttatcagcagttgctgaaacagaaatgctggcagaatggccgagtacccaagcctgaatcgggttgtactgaaatacatcatcatgagtggtccaagatggcactctttgattttttgttacagatttataatcgcttagatacaaattgctgtggattcagacctcgcaaggaagatgcctgtgtacagaatggattgaggccaaaatgtgatgaccaaggttctgcggctctagcacacattatccagcgaaagcatgacccaaggcatttggtttttatagacaacaagggtttctttgacaggagtgaagataacttaaacttcaaattgttagaaggcatcaaagagtttccagcttctgcagtttctgttttgaagagccagcacttacggcagaaacttcttcagtctctgtttcttgataaagtgtattgggaaagtcaaggaggtagacaaggaattgaaaagcttatcgatgtaatagaacacagagccaaaattcttatcacctatatcaatgcacacggggtcaaagtattacctatgaatgaatgacaaaagaatcttctggctagggtgttagatatatttatgcatttttggttttgtttttaaatcaagcacatcaacctcaagcccgtttagcaatgaggcagtgtagatgaatacgtaaaataaatgactttaaccaagtagctataatgggacttagcactgtatgcatacttaaaaaggttttgaaaaacaaactacttgagaaatatttgtttatatttttctctaacatcatgctatgtgtcagtctgaacatctgacaacagaaatttcagttattattctagctaagttttgaaaacatttgtcatgctgtttaatagaaaactgcaaaccagagacactgactccattaataaaccatattttgtgccgttttgactgttctgaccaaatactaatgggaacaattcttgacgtttttctgttgctgattgttaacatagagcagtctctacactaccctgaggcaactctacattggaacactgaggcttacagcctgcaagagcatcagagctgaccatacatttaaacagaaatgctggtttatttgcaaaatcaccagtatattttctattgtgtctataaaaaatcagtcatttaagtacaagaatcatattttccattcctttttagaaatttattttgttgtccctatggaaatcattcacatctgacaatttatatgttaaagagttttactctctctattttggtccaatttgtatctagtggctgagaaattaaataattctaaagtatgaagttacctatctgaaaatgtacttacagagtatcattttaaaatggatgtctctttaaaaattttgttacttttaccaacaatgtaatataatttatgtatattttattaataatagtgaattccttaaaatttgttctatgtacttatatttaatttgatttaatggttactgcccagatattgagaattggttcaaatattgagtgtgtttcaatatattatctggcttatttcaacatgagtaatatgagcaaaataagttaaaacctgcgtctgatcaattttcctcatgactagaactaaaacagtaaatttggacaatattaagcctcaaataatcatctccaaactccttctaacactttttaaatcagattggaagacatggacaaatcaggttcatgtgttgcatctttatgtcctttgccaatatccaagatcatcacatatggtagatattcacatggagtttcaaattcagaatagattaccattaccttcctgcccttacacatcctactccttatttaaaagttctatttgtgacttttcatttcctgaaagtttaaaaatacaatttgagaatgtttataatacattctctcctgtcttttcacggttacgtctgttattgctgaaatacaccacattttctttgttctggtcaaggttaactcaatatctgtgtgaaagagaactactaacaacgttacaatagaggctagatttgaaaaaaaaaatctatagatctaattgatacaattgtagaacaaaatgtcaaaataatgttttaagtataagagaagatggaccaaggagagagagatcatttgaaaatctaattgtagcttttctaggctcacattcatgtactacttttagcacccttatgggctgtgctcgccccctggacagttgagctttggattatcttcctcttcaattttccctctattgacccgagtgtctccctctgcttctacagatttatagtactccttggctcttttgagtctccacttttactcactgtctctgggatttttaagatccttttcttctcttataaatcatcctcttaatgaaaattagcctaacaaaagtttggagactggaatcctactttgagccactgacttgaaataactcttttggcaagttgcctgacatcctgtcttaccaaggtggcatatttgcatttttactgcttaaaacatttttttttttttaccatctttatccaaatttatcatattgatggtaggactaacaggctttttagaagctggctttaactttgagtctcaagctacaatgctgttgggcagcctggtcttcccacgtgagggtttaactttgtttatttgcctccagttattccaaaatgcttattaaatgaaagtcccaggaacatgtttattttagtcacctttgctttttaacaattttgttttgtaatcaatgagtaattcatgatgaattatttttgactaatggatagccgaaggccaggcttttaattctaataggtaatgttcttcttttgtcttattgaaacaatgagaatactctgtgcatttcaaatgcactccgattatgctgtggttttattcacataagcacaatatgtgttttatttataacttcataacaaacttataatataataatttaccttagcagacatgcaaaagcttattcttgtgtgacttactttctttaagctaataatataaaaataaatatgtatcttaaaaatctataataaaacattagaaattaaagatatgtgctttttattttgcagatgagttcatttgcttttgtagatgtgttttcagagctaggtacagaggaatgtttgctacctttagcggtgaaaaaagaaagagagtcaagaattttgttggattgtgtttgtgtgtgcatatatttgatatcatcattatatttgtaatctttggacttgtaatcatagcctgtttattctactgtgccattaaatatactttaccttatacataacgaataaaatacctagaagtagatttatttacaaaaaaaaaaaaaaaa

SEQ ID NO: 4434 - DNA, 4854 bp, Homo sapiens
gtttttaaaagctttgtatctcttaaaaccatgcagcagtcagtttccaagttttgctttgcaatcagtagttttcaagggagcttttaaagctgaactgaaatgtttgaaatgtggaacactcttgaccatgaaatatgttctacttacatgcctcagcctttaaaagttctttgcattagagtcaaggattacattcttcctggagccaagcatggggccagctgtaaacaagccgcatttctccttggggagactgataatttaaaaggtttgttgtgtcagaaacattcccagcttcatcaccaaccctttccttccacctctgcccactggagaccacttatatcccgaagcggacgcggcagctgaagtcaggaaaccatgcatcacattagcaggagccaactgcagactttaaactccgttcaacatgtggatgcggcagagaaatgacctgtccagacaagccggggcagctcataaactggttcatctgctccctgtgcgtcccgcgggtgcgtaagctctggagcagccggcgtccaaggacccggagaaaccttctgctgggcactgcgtgtgccatctacttgggcttcctggtgagccaggtggggagggcctctctccagcatggacaggcggctgagaaggggccacatcgcagccgcgacaccgccgagccatccttccctgagatacccctggatggtaccctggcccctccagagtcccagggcaatgggtccactctgcagcccaatgtggtgtacattaccctacgctccaagcgcagcaagccggccaatatccgtggcaccgtgaagcccaagcgcaggaaaaagcatgcagtggcatcggctgccccagggcaggaggctttggtcggaccatcccttcagccgcaggaagcggcaagggaagctgatgctgtagcacctgggtacgctcagggagcaaacctggttaagattggagagcgaccctggaggttggtgcggggtccgggagtgcgagccgggggcccagacttcctgcagcccagctccagggagagcaacattaggatctacagcgagagcgccccctcctggctgagcaaagatgacatccgaagaatgcgactcttggcggacagcgcagtggcagggctccggcctgtgtcctctaggagcggagcccgtttgctggtgctggaggggggcgcacctggcgctgtgctccgctgtggccctagcccctgtgggcttctcaagcagcccttggacatgagtgaggtgtttgccttccacctagacaggatcctggggctcaacaggaccctgccgtctgtgagcaggaaagcagagttcatccaagatggccgcccatgccccatcattctttgggatgcatctttatcttcagcaagtaatgacacccattcttctgttaagctcacctggggaacttatcagcagttgctgaaacagaaatgctggcagaatggccgagtacccaagcctgaatcgggttgtactgaaatacatcatcatgagtggtccaagatggcactctttgattttttgttacagatttataatcgcttagatacaaattgctgtggattcagacctcgcaaggaagatgcctgtgtacagaatggattgaggccaaaatgtgatgaccaaggttctgcggctctagcacacattatccagcgaaagcatgacccaaggcatttggtttttatagacaacaagggtttctttgacaggagtgaagataacttaaacttcaaattgttagaaggcatcaaagagtttccagcttctgcagtttctgttttgaagagccagcacttacggcagaaacttcttcagtctctgtttcttgataaagtgtattgggaaagtcaaggaggtagacaaggaattgaaaagcttatcgatgtaatagaacacagagccaaaattcttatcacctatatcaatgcacacggggtcaaagtattacctatgaatgaatgacaaaagaatcttctggctagggtgttagatatatttatgcatttttggttttgtttttaaatcaagcacatcaacctcaagcccgtttagcaatgaggcagtgtagatgaatacgtaaaataaatgactttaaccaagtagctataatgggacttagcactgtatgcatacttaaaaaggttttgaaaaacaaactacttgagaaatatttgtttatatttttctctaacatcatgctatgtgtcagtctgaacatctgacaacagaaatttcagttattattctagctaagttttgaaaacatttgtcatgctgtttaatagaaaactgcaaaccagagacactgactccattaataaaccatattttgtgccgttttgactgttctgaccaaatactaatgggaacaattcttgacgtttttctgttgctgattgttaacatagagcagtctctacactaccctgaggcaactctacattggaacactgaggcttacagcctgcaagagcatcagagctgaccatacatttaaacagaaatgctggtttatttgcaaaatcaccagtatattttctattgtgtctataaaaaatcagtcatttaagtacaagaatcatattttccattcctttttagaaatttattttgttgtccctatggaaatcattcacatctgacaatttatatgttaaagagttttactctctctattttggtccaatttgtatctagtggctgagaaattaaataattctaaagtatgaagttacctatctgaaaatgtacttacagagtatcattttaaaatggatgtctctttaaaaattttgttacttttaccaacaatgtaatataatttatgtatattttattaataatagtgaattccttaaaatttgttctatgtacttatatttaatttgatttaatggttactgcccagatattgagaattggttcaaatattgagtgtgtttcaatatattatctggcttatttcaacatgagtaatatgagcaaaataagttaaaacctgcgtctgatcaattttcctcatgactagaactaaaacagtaaatttggacaatattaagcctcaaataatcatctccaaactccttctaacactttttaaatcagattggaagacatggacaaatcaggttcatgtgttgcatctttatgtcctttgccaatatccaagatcatcacatatggtagatattcacatggagtttcaaattcagaatagattaccattaccttcctgcccttacacatcctactccttatttaaaagttctatttgtgacttttcatttcctgaaagtttaaaaatacaatttgagaatgtttataatacattctctcctgtcttttcacggttacgtctgttattgctgaaatacaccacattttctttgttctggtcaaggttaactcaatatctgtgtgaaagagaactactaacaacgttacaatagaggctagatttgaaaaaaaaaatctatagatctaattgatacaattgtagaacaaaatgtcaaaataatgttttaagtataagagaagatggaccaaggagagagagatcatttgaaaatctaattgtagcttttctaggctcacattcatgtactacttttagcacccttatgggctgtgctcgccccctggacagttgagctttggattatcttcctcttcaattttccctctattgacccgagtgtctccctctgcttctacagatttatagtactccttggctcttttgagtctccacttttactcactgtctctgggatttttaagatccttttcttctcttataaatcatcctcttaatgaaaattagcctaacaaaagtttggagactggaatcctactttgagccactgacttgaaataactcttttggcaagttgcctgacatcctgtcttaccaaggtggcatatttgcatttttactgcttaaaacatttttttttttttaccatctttatccaaatttatcatattgatggtaggactaacaggctttttagaagctggctttaactttgagtctcaagctacaatgctgttgggcagcctggtcttcccacgtgagggtttaactttgtttatttgcctccagttattccaaaatgcttattaaatgaaagtcccaggaacatgtttattttagtcacctttgctttttaacaattttgttttgtaatcaatgagtaattcatgatgaattatttttgactaatggatagccgaaggccaggcttttaattctaataggtaatgttcttcttttgtcttattgaaacaatgagaatactctgtgcatttcaaatgcactccgattatgctgtggttttattcacataagcacaatatgtgttttatttataacttcataacaaacttataatataataatttaccttagcagacatgcaaaagcttattcttgtgtgacttactttctttaagctaataatataaaaataaatatgtatcttaaaaatctataataaaacattagaaattaaagatatgtgctttttattttgcagatgagttcatttgcttttgtagatgtgttttcagagctaggtacagaggaatgtttgctacctttagcggtgaaaaaagaaagagagtcaagaattttgttggattgtgtttgtgtgtgcatatatttgatatcatcattatatttgtaatctttggacttgtaatcatagcctgtttattctactgtgccattaaatatactttaccttatacataacgaataaaatacctagaagtagatttatttacaaaaaaaaaaaaaaaa

SEQ ID NO: 4435 - DNA, 4809 bp, Homo sapiens; identical to SEQ ID NO: 2369

SEQ ID NO: 4436 - DNA, 4074 bp, Homo sapiens; identical to SEQ ID NO: 1431

SEQ ID NO: 4437 - DNA, 2105 bp, Homo sapiens; identical to SEQ ID NO: 547

SEQ ID NO: 4438 - DNA, 3148 bp, Homo sapiens; identical to SEQ ID NO: 1565

SEQ ID NO: 4439 - DNA, 782 bp, Homo sapiens; identical to SEQ ID NO: 704

SEQ ID NO: 4440 - DNA, 3641 bp, Homo sapiens; identical to SEQ ID NO: 161

SEQ ID NO: 4441 - DNA, 2304 bp, Homo sapiens; identical to SEQ ID NO: 2431

SEQ ID NO: 4442 - DNA, 2403 bp, Homo sapiens
aactgagttcaaggcaattaaagtcaagagctaaggagggagggagagggtttagaaataccagcataataagtagtatgactgggtgctctgtaaattaactcaattagacaaagcctgacttaacgggggaagatggtgagaagcgctaccctcattaaatttggttgttagaggcgcttctaaggaaattaagtctgttagttgtttgaatcacataaaattgtgtgtgcacgttcatgtacacatgtgcacacatgtaacctctgtgattcttgtgggtatttttttaagaagaaaggaatagaaagcaaagaaaaataaaaaatactgaaaagaaaagactgaaagagtagaagataaggagaaaagtacgacagagacaaggaaagtaagagagagagagagctctcccaattataaagccatgagccccctttggtgggggtttctgctcagttgcttgggctgcaaaatcctgccaggagcccagggtcagttcccccgagtctgcatgacggtggacagcctagtgaacaaggagtgctgcccacgcctgggtgcagagtcggccaatgtctgtggctctcagcaaggccgggggcagtgcacagaggtgcgagccgacacaaggccctggagtggtccctacatcctacgaaaccaggatgaccgtgagctgtggccaagaaaattcttccaccggacctgcaagtgcacaggaaactttgccggctataattgtggagactgcaagtttggctggaccggtcccaactgcgagcggaagaaaccaccagtgattcggcagaacatccattccttgagtcctcaggaaagagagcagttcttgggcgccttagatctcgcgaagaagagagtacaccccgactacgtgatcaccacacaacactggctgggcctgcttgggcccaatggaacccagccgcagtttgccaactgcagtgtttatgatttttttgtgtggctccattattattctgttagagatacattattaggaccaggacgcccctacagggccatagatttctcacatcaaggacctgcatttgttacctggcaccggtaccatttgttgtgtctggaaagagatctccagcgactcattggcaatgagtcttttgctttgccctactggaactttgccactgggaggaacgagtgtgatgtgtgtacagaccagctgtttggggcagcgagaccagacgatccgactctgattagtcggaactcaagattctccagctgggaaactgtctgtgatagcttggatgactacaaccacctggtcaccttgtgcaatggaacctatgaaggtttgctgagaagaaatcaaatgggaagaaacagcatgaaattgccaaccttaaaagacatacgagattgcctgtctctccagaagtttgacaatcctcccttcttccagaactctaccttcagtttcaggaatgctttggaagggtttgataaagcagatgggactctggattctcaagtgatgagccttcataatttggttcattccttcctgaacgggacaaacgctttgccacattcagccgccaatgatcccatttttgtggtgatttctaatcgtttgctttacaatgctacaacaaacatccttgaacatgtaagaaaagagaaagcgaccaaggaactcccttccctgcatgtgctggttcttcattcctttactgatgccatctttgatgagtggatgaaaagatttaatcctcctgcagatgcctggcctcaggagctggcccctattggtcacaatcggatgtacaacatggttcctttcttccctccagtgactaatgaagaactctttttaacctcagaccaacttggctacagctatgccatcgatctgccagtttcagttgaagaaactccaggttggcccacaactctcttagtagtcatgggaacactggtggctttggttggtctttttgtgctgttggcttttcttcaatatagaagacttcgaaaaggatatacacccctaatggagacacatttaagcagcaagagatacacagaagaagcctagggtgctcatgccttacctaagagaagaggctggccaagccacagttctgacgctgacaataaaggaactaatcctcactgttccttcttgagttgaagatctttgacataggttcttctatagtgatgatgatctcattcagaagatgcttagctgtagtttccgctttgcttgcttgtttaacaaacccaactaaagtgcttgaggctacctctaccttcaaataaagatagacctgacaatttgtgatatctaataataaccccccccccaatattgattaagcctcctccttttctgaaagcatttaaaaaaaa

SEQ ID NO: 4443 - DNA, 4678 bp, Homo sapiens; identical to SEQ ID NO: 2425

SEQ ID NO: 4444 - DNA, 3690 bp, Homo sapiens; identical to SEQ ID NO: 1445

SEQ ID NO: 4445 - DNA, 1298 bp, Homo sapiens
agctggagccgcggcgcgctgagcgagcaggcggggcgggagcgcccacagctcggagccaccaggcgctgacgaggagcccggctgagggaggatgcgccgctgacgcctgcgggagccgcgcgcctggggcgggaggatgctccagaggggcctctggccgtggcgcacgcggctgctgccgacccctggcacctggcgcccagcgcgcccgtggccgctgccgcctccgccccaggttttgcgtgtgaagctgtgtggaaatgtgaaatactaccagtcacaccattatagtaccgtggtgccacctgatgaaataacagttatttatagacatggccttcccttggtaacacttaccttgccatctagaaaagaacgttgtcaattcgtagtcaaaccaatgttgtcaacagttggttcattccttcaggacctacaaaatgaagataagggtatcaaaactgcagccatcttcacagcagatggcaacatgatttcagcttctaccttgatggatattttgctaatgaatgattttaaacttgtcattaataaaatagcatatgatgtgcagtgtccaaagagagaaaaaccaagtaatgagcacactgctgagatggaacacatgaaatctttggttcacagactatttacaatcttgcatttagaagagtctcagaaaaagagagagcaccatttactggagaaaattgaccacctgaaggaacagctgcagccccttgaacaggtgaaagctggaatagaagctcattcggaagccaaaaccagtggactcctgtgggctggattggcactgctgtccattcagggtggggcactggcctggctcacgtggtgggtgtactcctgggatatcatggagccagttacatacttcatcacatttgcaaattctatggtcttttttgcatactttatagtcactcgacaggattatacttactcagctgttaagagtaggcaatttcttcagttcttccacaagaaatcaaagcaacagcactttgatgtgcagcaatacaacaagttaaaagaagaccttgctaaggctaaagaatccctgaaacaggcgcgtcattctctctgtttgcaaatgcaagtagaagaactcaatgaaaagaattaatcttacagttttaaatgtcgtcagattttccattatgtattgattttgcaacttaggatgtttttgagtcccatggttcattttgattgtttaatctttgttattaaattcttgtaaaacagaaaaaaaaaaaaaaaaaaaaaaaaaa

SEQ ID NO: 4446 - DNA, 5335 bp, Homo sapiens; identical to SEQ ID NO: 2495

SEQ ID NO: 4447 - DNA, 456 bp, Homo sapiens; identical to SEQ ID NO: 789

SEQ ID NO: 4448 - DNA, 3050 bp, Homo sapiens; identical to SEQ ID NO: 1453

SEQ ID NO: 4449 - DNA, 2288 bp, Homo sapiens
aatcaggcacgcagctggagcggacaggacggcttccgggatttggcggggcctttgtctctagctgctgcgggagctccaggtctagtctttactgctctgtgtattctgctcctagaggcccagcctctgtgactccgttatctgcaggtattgggagatgcacagctaagatgccaggaccacctggaagcctagaaatgggaccactgacatttagggatgtggccatagaattctctctggaggagtggcaatgcctggacactgcacaacggaatttatataggaaagtgatgtttgagaactacagaaacctggtcttcctgggtattgctgtctctaagcctcacctgataacctgtttggagcaaggaaaagagccctggaataggaagagacaggagatggtagccaaacccccagagtcttactgtgttgctcaggctgatcttgaactcctggtctcaagttatcttactgccttggcctccctaaagatgtgggattacagaaataatccactttgccaggctactatgtagcccttcatgtagaactgtgctagtcataatgaatcataacactgtcaccttttattttgaaaagtctttatttttatctgtttttaaagtacactaatcttgaatcaagtattcttggttaggaattttattactgcatcaaaatttgggaagttcttagcctttttcatctacaagtaacctctacattactttttccctacattcttcttctaagagttttttaatgaatatattgatgtacttgatggtgtccaataagttttacatttcatgttttaattttcttttggaattttatatttttgttttatatattttaggatatgccacctcacatgagttaattgttttggttttttagtttatattataattgagtatgccagtatttaactctgtaaaatttaagacagtgtggaacaaagtcaaatatgaatcagccatatgtctactaccaatataacgatctctgtgtttacctgtataaatattttccctgttctttttatgacttgtatatttctggtataggtttgttgcaaatggttatttaatcttgactaggtgagaagtcatagaaattctcctaatttcaacatctatttattcatggatctatattatttttgtgtgggagaaaaacttttctatttaaagataatttacaaacgatcataatctcttttaggtatgtctatttttacttgtcaaaaacacataacatttacaatagaatatttttaaatgtttattttagtcctattatattgacattgttatgcaacatattcctaaaatgtttttatcttgcaaagctaaatatcaatacccattaaaaaactatgaattttacccatttcctggcacttttcaaacaccactctgttttctctaagagtgtaactgcttcatatatctcatacaatctctgtctttttgtgactggctcattttattttgcacaatatcatcaagctttatagttgttagaatattttctgctttttaaatactgggtgatatttaagtattttgtattttagattatatctactgagtaatttggtgacaaatttgcactgcttttacctattggctttcagtaacaatgctgcaataattacaggtatgcaaatgacctatatgatcatatatgtgtaagtttatatatgtgccgcattctgttctactagtgtacgtttttacctttgtactcataccaaattgttacaattctgtagctctgtaatgtgtttcaaaatcagaaactgtaatgccttcaaaattgtttattttattgcagatttttgggtactttattatctcttaagactttatatactttgggggttgctgtttctatttcttcaaaaatgcatgagaaatttgaacaacattgcattaaatctgtaaattacattgagcaggatggacatcttcacaagattaattattttaacatttcaacaagcatgctcaagagtgtattgttttaatttctatgtatttgtgaatttttcagttttttcttcttactgttctatactcatttcattttggtcatagaaagtaatccataaaaatttagttttaaataatttgttaagacttcttttttggtttaccaggttttctatcaaggagaatttcgtatgaggtattgagaaggctgtttatcattatgttgttgagtgttctttatgcctctgttattaataattgttttatactcccttcaag

SEQ ID NO: 4450 - DNA, 5801 bp, Homo sapiens; identical to SEQ ID NO: 761

SEQ ID NO: 4451 - DNA, 5748 bp, Homo sapiens
agtgtgccaccgccatctttaccggctgtggctcagcatggtcagtgccgtttaacctttattgtggtggagtccaccccgctgtgattcataagctgccctgaggcgatcttggcatcaagaaagacagcattgaggcacatctcaccatcagcttcagaggatgtcagcctttgatatgtcccatgggttttttcccagggaaccaatctgtccttttgaagaaaagacaaagataggaacgatggtagaggaccaccggtcaaattcttaccaggattcagtgacgtttgatgatgtggctgtggagttcaccccagaggagtgggctttactggacacaactcagaaatacctctacagagatgtgatgctggagaactacatgaacctggcctctgtggatttctttttctgcttaacttcagaatgggaaatacaacctagaaccaaacggtcatcacttcagcagggttttttgaagaatcaaatattcactgggatacaaatgcagacaagaagctacagtggatggaaactctgtgagaattgtggagaggtcttcagtgaacagttttgccttaagacacacatgagagctcagaatggagggaacacttttgagggtaattgttatggaaaagacagcatcagtgtgcacaaggaagcctctattggacaagaactttccaaatttaatccatgtggaaaagtcttcaccttaactccaggccttgctgtgcatcttgaaattctcaatggaagacaaccctacaaatgtaaggaatgtggaaaaggctttaagtattttgcaagccttgataatcacatgggaatccacattggagagaaactctgtgaatttcaggaatgtgagagagccatcacaacttcctcacacttaaagcagtgtgtagcagttcatactggaaagaaatccgaaaagactaagaactgtgggaaatccttcactaatttttctcaactttctgcacatgcaaaaactcataaaggagagaagtcctttgaatgtaaagaatgtggaagatcctttagaaattcctcatcctttaatgttcacattcaaattcacactggaataaaaccacacaaatgtacggaatgtgggaaagccttcactagatcaactcaccttactcaacatgtaagaactcacactggaataaaaccctatgaatgtaaggaatgtggccaagccttcactcagtacacgggccttgctatacacatacgaaatcacactggagagaaaccctatcagtgtaaggaatgtgggaaagccttcaatagatcttcaacgcttactcaacatagaagaattcacacaggagagaagccttatgaatgtgttgaatgtgggaagaccttcattacttcttcccatcgtagtaaacatttgaaaactcacagtggagaaaggtaaatgcaagatatgtgggaaagaatttctgtattcctcaccccacctgtgaactcctaccagagagaaaccttttgtatgtaaagaatttgggaaagcatttgctctttcctcatgcctaagtatgcatgaaagaattcacactggggagaaatactatgaatgtaaggatatgagtgttgttaccatttagcccattggttgccatctttaattattggcagtgcaaagatcatcagattagtcctaaatgccttttggaggttgtaatggctcacagattggccttagatgcatcccgagggtctgaaattaaacctacaggttctgaatacaacatcatggttacctgagtctgggcatctgtgaagaagggtcatggatggtgaggtcagtactgcaggctgcctcaccttggtgattagattcctaagatcatagcattaacaagttctgtacgagataaatcatgcagattgatcccagcccctgttggttagtggctgccagtgtggcacattcatgtcaaaatttaccagaagccaagatgatgtaggccccagaggtggattgttaaaaagatgctcctccaaggttctcttctgttcccatggatcctgcagagcatgtcaggagtgaaaccatccataactgccagtgccctttcacagctgattatttctatgtccccttcttgtaaaataagaagtgtgacaaccttgactgttctgttctgtcttctctgtccattttaggtggcacaatgtaagtggcagtgtctcttatagtataatccagtctctcttctcacttctgttaagatggctgatatagtccatgaatcccactcatgatctctttatcaaatgattgttcagccacactttgaggattctcttcagtacaagttttctaatttttgcagtatggataggctgagaattttccaaatctccaagttctggttcctttttccttaacaatttcttctgcaattcaggtctccttttgcatttttgccgagaccagctgggtcgtggagaccctaacccagtggctctagaggaattaagacaaagacacagaaatatagtgcagagtgggaatcggggctcacagccttcagagctgagcttgaacagagtttgacccacatatttattgacagtaagcctgtgataaacattattcctatagattgtagatcagctataagtattccttatgagaaagaaagggacaggctctggcttgttatctgcaacaggaatatgtccttaaggcacaaatcactcatgctattgtttgtggtttaggaatgccttgagcagttttccagttttctgccctgggtgggccaggtgttgcttgccctcattctggtaaaccagcagcctccagcatgggcgtcatagccatcacgagcatgtcacagtgctgcagagattttgtttatggccagtttctcattgcctgtttatggccagatttggggggcctgttcccagcacattttcctgtaagcactcaggaataatgaagcttcctgtgtcctttaacactttaattacagatcttagtgatacataccattttatctgtctcaagctctaccttccgtaaaatgctagaatacagttctgccaagttcttcaccactttatatcaagggttgtcttttcttcatttcccaatagcatgttcctcattccccaatgacacctcaccagaataacccttaccaaccttatttccagcttgcacatcagaatttttccagcctctactcatttgtcagtttcaaagctgcttcacatttttagtttttttgtttgtttttaattgcagtacctcacttctcagtaccaatatctgccttagtcagctcagacaaccataagagaataccgcagaccaaatggcttagaaattaatttaattttaaatcaatgaggttaaaaacacaggattttttttttttttttttttttttttttgagatggagttttgctcttgttgcccaggctggagtgcaatggtatgatcttggctcaccgcaacctccacctcctgagttccagtgattctcctgcctcaccctcagtagctgggattattggcatgcaccacaaaccttagctaagtttgtatttttagtagagacagggtttctccatgttggttaggctgatctccatgttggtcagatctgacctttggtgatccacctgccttggcctcccaaagtgctgggattacaggcctgagccaccgtatctggcccaaaacacaaatttatattctcacatatctggaggctggaagtctgagatcagagtgccagcatggtcaacctctagtgagagctctcttcctggcatgtaagtgcccacttcctcatgttttcacacgatggagaccaacaaataggtcggtcggtctcccccctccccgcccccttctcttttcacatacagtcacattgaggtttggaacttcatatgaaatttggggggtcactgtgtgtgtgtgtgtgtgtgtgtgtatgtgtatatatatatacatatatatacacatatgtatgtatacctaactcctaaagtggaacagtaagagtcattatttatagattatctgattctctatgtggaaagagaaaagaatcatattaagtactttggactgaacaatgacccccaaaattcgtatgatgatgaagctctctctaaatattttcttgctttactggactgattttaacccgctgcacaacaccaactaaaagtagtaataccagcatacttgtctttgcagttctggtgagatatgcactctattttgttggtttggctgtaggcttttatttcttttttattttttgaagaggttatgtcctgtcagggaaccagccccgatattcacataggttcttttctattttccctaagtgtcagccaacttgagaaataaagggacagagtacaaaagagagaaattttaaagctgggtgtccggggcagacatcacatgtcggtaggttccgtgatgccccacaagccgcaaaaaccagcaagtttttattagggattttcaaaaggggagggagtgtgcaaataggtgtgggtcacagacatcaagtactttacaaggtaatagaatatcacaaggcaagtggaggcagggcgagatcacaggaccaaggtgaaattaaaattgctaatgaagttttgggcaccattgtcattgataacatcttatcaggagacggttttgagatcaactggtctgactaaaatttattaggtgggaatttcctcttcctaataagcctgggagtgctatgggagactggggtctatttcacccctgcagtctcgaccataagagatggctacacccaggggggccagttcagagacccactcccaggtgtgcattctctttctcaaggatgttccttgctgagaaaaagaattcagtgatatttctcccatttgcttgtgaaagaagagaaatgtggctttgttccacctggctcaccggcggtcagaatttaaggttatctctcttgtttcctaaacattgctgttatcctgttcttttttcaaggtgcccagatttcatattgctcaaacacacatgctgtataatttgtgcagttaatgcaattattacagggtcctgaggtaatatacatcctcctcagctgacaggattgagagattaaagtaaagacaggcataggaaatcacaagggtattgactggggaagtgataagtgtccatgaaatctttacaatttatgtttagagattgcagtaaagacaggcataagaaattataaaagtattaatttggggaactaataaatgtccatgaaaccttcacaatccatgtttttctgccatggcttcagccagtccccccgtttggggtccctgacttcctgcaacaatgtcctgcaggaaaagttttttctttatatccagtttttacatgatgaattatttcccaatatttcatagtttatgaggctgaattcctcttgaatttattaaatgcttccttcacatcctctgtgatgatcatgtttatttactgataaaactcaatacctagaactgcacctagctcatgatggtacctaataaatacttcaatgaaatgatgtggtgatgcatgcctatagttttagctacttgggagggtggcctgagcccaggggttctagaccagcttaggcaacatagcaagaccccatctcaaaaaaaaaaacaaaaacaaaacaaaaaaaaaaaaaaaaaaa

SEQ ID NO: 4452 - DNA, 5585 bp, Homo sapiens
agtgtgccaccgccatctttaccggctgtggctcagcatggtcagtgccgtttaacctttattgtggtggagtccaccccgctgtgggcctcagataaccctgtacaaaggggaatggagattgcctgtatccacctagattcataagctgccctgaggcgatcttggcatcaagaaagacagcattgaggcacatctcaccatcagcttcagaggatgtcagcctttgatatgtcccatgatttctttttctgcttaacttcagaatgggaaatacaacctagaaccaaacggtcatcacttcagcagggttttttgaagaatcaaatattcactgggatacaaatgcagacaagaagctacagtggatggaaactctgtgagaattgtggagaggtcttcagtgaacagttttgccttaagacacacatgagagctcagaatggagggaacacttttgagggtaattgttatggaaaagacagcatcagtgtgcacaaggaagcctctattggacaagaactttccaaatttaatccatgtggaaaagtcttcaccttaactccaggccttgctgtgcatcttgaaattctcaatggaagacaaccctacaaatgtaaggaatgtggaaaaggctttaagtattttgcaagccttgataatcacatgggaatccacattggagagaaactctgtgaatttcaggaatgtgagagagccatcacaacttcctcacacttaaagcagtgtgtagcagttcatactggaaagaaatccgaaaagactaagaactgtgggaaatccttcactaatttttctcaactttctgcacatgcaaaaactcataaaggagagaagtcctttgaatgtaaagaatgtggaagatcctttagaaattcctcatcctttaatgttcacattcaaattcacactggaataaaaccacacaaatgtacggaatgtgggaaagccttcactagatcaactcaccttactcaacatgtaagaactcacactggaataaaaccctatgaatgtaaggaatgtggccaagccttcactcagtacacgggccttgctatacacatacgaaatcacactggagagaaaccctatcagtgtaaggaatgtgggaaagccttcaatagatcttcaacgcttactcaacatagaagaattcacacaggagagaagccttatgaatgtgttgaatgtgggaagaccttcattacttcttcccatcgtagtaaacatttgaaaactcacagtggagaaaggtaaatgcaagatatgtgggaaagaatttctgtattcctcaccccacctgtgaactcctaccagagagaaaccttttgtatgtaaagaatttgggaaagcatttgctctttcctcatgcctaagtatgcatgaaagaattcacactggggagaaatactatgaatgtaaggatatgagtgttgttaccatttagcccattggttgccatctttaattattggcagtgcaaagatcatcagattagtcctaaatgccttttggaggttgtaatggctcacagattggccttagatgcatcccgagggtctgaaattaaacctacaggttctgaatacaacatcatggttacctgagtctgggcatctgtgaagaagggtcatggatggtgaggtcagtactgcaggctgcctcaccttggtgattagattcctaagatcatagcattaacaagttctgtacgagataaatcatgcagattgatcccagcccctgttggttagtggctgccagtgtggcacattcatgtcaaaatttaccagaagccaagatgatgtaggccccagaggtggattgttaaaaagatgctcctccaaggttctcttctgttcccatggatcctgcagagcatgtcaggagtgaaaccatccataactgccagtgccctttcacagctgattatttctatgtccccttcttgtaaaataagaagtgtgacaaccttgactgttctgttctgtcttctctgtccattttaggtggcacaatgtaagtggcagtgtctcttatagtataatccagtctctcttctcacttctgttaagatggctgatatagtccatgaatcccactcatgatctctttatcaaatgattgttcagccacactttgaggattctcttcagtacaagttttctaatttttgcagtatggataggctgagaattttccaaatctccaagttctggttcctttttccttaacaatttcttctgcaattcaggtctccttttgcatttttgccgagaccagctgggtcgtggagaccctaacccagtggctctagaggaattaagacaaagacacagaaatatagtgcagagtgggaatcggggctcacagccttcagagctgagcttgaacagagtttgacccacatatttattgacagtaagcctgtgataaacattattcctatagattgtagatcagctataagtattccttatgagaaagaaagggacaggctctggcttgttatctgcaacaggaatatgtccttaaggcacaaatcactcatgctattgtttgtggtttaggaatgccttgagcagttttccagttttctgccctgggtgggccaggtgttgcttgccctcattctggtaaaccagcagcctccagcatgggcgtcatagccatcacgagcatgtcacagtgctgcagagattttgtttatggccagtttctcattgcctgtttatggccagatttggggggcctgttcccagcacattttcctgtaagcactcaggaataatgaagcttcctgtgtcctttaacactttaattacagatcttagtgatacataccattttatctgtctcaagctctaccttccgtaaaatgctagaatacagttctgccaagttcttcaccactttatatcaagggttgtcttttcttcatttcccaatagcatgttcctcattccccaatgacacctcaccagaataacccttaccaaccttatttccagcttgcacatcagaatttttccagcctctactcatttgtcagtttcaaagctgcttcacatttttagtttttttgtttgtttttaattgcagtacctcacttctcagtaccaatatctgccttagtcagctcagacaaccataagagaataccgcagaccaaatggcttagaaattaatttaattttaaatcaatgaggttaaaaacacaggattttttttttttttttttttttttttttgagatggagttttgctcttgttgcccaggctggagtgcaatggtatgatcttggctcaccgcaacctccacctcctgagttccagtgattctcctgcctcaccctcagtagctgggattattggcatgcaccacaaaccttagctaagtttgtatttttagtagagacagggtttctccatgttggttaggctgatctccatgttggtcagatctgacctttggtgatccacctgccttggcctcccaaagtgctgggattacaggcctgagccaccgtatctggcccaaaacacaaatttatattctcacatatctggaggctggaagtctgagatcagagtgccagcatggtcaacctctagtgagagctctcttcctggcatgtaagtgcccacttcctcatgttttcacacgatggagaccaacaaataggtcggtcggtctcccccctccccgcccccttctcttttcacatacagtcacattgaggtttggaacttcatatgaaatttggggggtcactgtgtgtgtgtgtgtgtgtgtgtgtatgtgtatatatatatacatatatatacacatatgtatgtatacctaactcctaaagtggaacagtaagagtcattatttatagattatctgattctctatgtggaaagagaaaagaatcatattaagtactttggactgaacaatgacccccaaaattcgtatgatgatgaagctctctctaaatattttcttgctttactggactgattttaacccgctgcacaacaccaactaaaagtagtaataccagcatacttgtctttgcagttctggtgagatatgcactctattttgttggtttggctgtaggcttttatttcttttttattttttgaagaggttatgtcctgtcagggaaccagccccgatattcacataggttcttttctattttccctaagtgtcagccaacttgagaaataaagggacagagtacaaaagagagaaattttaaagctgggtgtccggggcagacatcacatgtcggtaggttccgtgatgccccacaagccgcaaaaaccagcaagtttttattagggattttcaaaaggggagggagtgtgcaaataggtgtgggtcacagacatcaagtactttacaaggtaatagaatatcacaaggcaagtggaggcagggcgagatcacaggaccaaggtgaaattaaaattgctaatgaagttttgggcaccattgtcattgataacatcttatcaggagacggttttgagatcaactggtctgactaaaatttattaggtgggaatttcctcttcctaataagcctgggagtgctatgggagactggggtctatttcacccctgcagtctcgaccataagagatggctacacccaggggggccagttcagagacccactcccaggtgtgcattctctttctcaaggatgttccttgctgagaaaaagaattcagtgatatttctcccatttgcttgtgaaagaagagaaatgtggctttgttccacctggctcaccggcggtcagaatttaaggttatctctcttgtttcctaaacattgctgttatcctgttcttttttcaaggtgcccagatttcatattgctcaaacacacatgctgtataatttgtgcagttaatgcaattattacagggtcctgaggtaatatacatcctcctcagctgacaggattgagagattaaagtaaagacaggcataggaaatcacaagggtattgactggggaagtgataagtgtccatgaaatctttacaatttatgtttagagattgcagtaaagacaggcataagaaattataaaagtattaatttggggaactaataaatgtccatgaaaccttcacaatccatgtttttctgccatggcttcagccagtccccccgtttggggtccctgacttcctgcaacaatgtcctgcaggaaaagttttttctttatatccagtttttacatgatgaattatttcccaatatttcatagtttatgaggctgaattcctcttgaatttattaaatgcttccttcacatcctctgtgatgatcatgtttatttactgataaaactcaatacctagaactgcacctagctcatgatggtacctaataaatacttcaatgaaatgatgtggtgatgcatgcctatagttttagctacttgggagggtggcctgagcccaggggttctagaccagcttaggcaacatagcaagaccccatctcaaaaaaaaaaacaaaaacaaaacaaaaaaaaaaaaaaaaaaa

SEQ ID NO: 4453 - DNA, 2521 bp, Homo sapiens; identical to SEQ ID NO: 142

SEQ ID NO: 4454 - DNA, 3894 bp, Homo sapiens
agtagtgaatcgtagcatgttagagttagaaggttcagtgttgatggagttattgaagaaatgatggagtaagagactcttttctaagcaactcaagtttgcagtgattcaggcctacttctgaagagacagccttttatctcaatgaatgacacagaaaaaccagcagatactccctctgaggaagaggactttggtgatccaaggacatatgacccagatttcaaggggcctgttgccaacaggagttgtacagatgttctgtgctgtatgatcttcctactgtgtattattggctacattgttttaggacttgtggcctgggtacatggggaccccagaagagcagcctatcctacagacagccagggccacttttgtggccagaagggcactcccaatgagaacaagaccattttgttttactttaacctgttacgctgtaccagtccctccgtgttgctaaacctacagtgccctaccacacagatctgtgtctccaagtgcccagaaaaatttttaacctatgtggaaatgcaacttttgtacacaaaagacaaaagctactgggaagactaccgtcagttctgtaagaccactgctaagcctgtgaagtctctcacacagcttttactggatgatgattgtccaacagcgatttttcccagcaaaccttttctccagagatgtttccctgacttctctaccaaaaatggcactttaacaataggaagtaagatgatgtttcaagatggaaatggagggacaagaagtgttgtagaactcgggattgctgcaaatggtatcaataaacttcttgatgcaaagtcacttggattgaaagtgtttgaagactatgcaagaacttggtattggattctcattggcctgacgattgccatggtccttagttggatatttttgatacttctgaggttcatagctggatgcctcttctgggtcttcatgattggtgtgattggaattataggttatggaatatggcactgttaccagcagtacaccaatcttcaggaacgcccaagttctgtattaactatctatgacatcgggattcagactaacataagcatgtactttgaactgcaacaaacatggttcacatttatgataatactctgcatcattgaagtgattgtcatcctcatgctgatcttcctcaggaatcgaatccgagtcgccattatcctgctgaaggaaggaagcaaagccattggatatgttcctagtacattagtctatccagctttaactttcattttgctctcaatctgcatttgctactgggtcgtgacagcagttttcttggcgacatcgggggtacctgtatacaaagtcatagctccaggggggcattgtatacatgaaaatcaaacctgtgacccagagatttttaatacaactgaaattgccaaagcttgccctggggctctgtgtaactttgctttctatggtggaaagagcttgtaccatcagtacatccctaccttccatgtatacaacttatttgtctttctctggcttataaacttcgtcattgcattaggtcagtgcgcccttgctggtgcattcgctacttattactgggccatgaaaaaacctgatgacatcccacgatatccactttttactgcatttggacgagccatacgatatcacacaggatccctagcatttggatctttaattattgcattaattcaaatgtttaaaattgtactagaatacttggaccaccgtcttaaacgtacccagaacacattgtctaaattcctacaatgctgcctgagatgctgcttctggtgtttggaaaatgcaataaagtttttaaacagaaatgcctatattatgattgcaatatatggcagaaacttctgcaggtcagcaaaagatgctttcaatctgctgatgagaaatgttttgaaagttgcagttacagatgaagttacatactttgtattattcctggggaaacttctagttgctggaagtataggtgttctggccttcctattcttcacacaaagactgccagtgattgcacaaggaccagcatctttaaattactactgggtacctttgctgacagtcatttttgggtcttacctgattgcacatgggttcttcagcgtctatgcaatgtgtgttgaaacaattttcatctgcttcttggaagatttagaaagaaatgatggttctactgcaagaccttattatgtgagtcaacctttgctgaagattttccaggaggaaaatccacaaactaggaagcagtagaagagcaaactggtcgtcctacagctgtgtgttaccttttctccatctgctgtgtctgtgcaacatttgtttcataagtgctttgtgtttagcaacactgtattcacgaccttgttggcttgcatttgcatgttttataccaaagcttatactgtactatgtgaagccatcagaagtcgcaagggaattgttaataacataaaacatttttatactaagatcatttgttttgtaattcgtttttaaagagtggcttggatgttttgaaaatactactgaatatgttaatattcttttaaatcttagattgaaaaatgatacattacttaaattgatagctcctaatatatttttaaaattacaactaaaagaagacttcttctgcagggaaaattggtcagcaaagtgaaattaaaaattttaaagtttttcccactctcgttggacagtaaatcagtgaaaggactgccccagttgagagtttgctctctttaagtatagaatgtttcctcttaaacaaattgccaatcatccagcctttactacttagccctctgacaaagtgccttactggctatttaatattacccagcttttatgggcaagtttacaaacattgttttttaaaaaattaaaacctgcaatgtttcgtgattaaaacaagtcttattgcatttgtttcactcttagctcactgattggaaaacatttgtcattttgctctgtttgatatcctcactattatggaatacattgtgcagctaaacaatttcccttgcgcctagtggacattcatgaatgtgtactacacgcaagaagaaacaaaccccgaaagaacacttgttggatttctttgtttttttttttactaaaagagaagttttaaaatgaaatgttttctatagtagatctttgaaaatacaataggtataatactgcatttctcagtgttttacaaagatcagaaagagaaacttctaggaattgcaaagggaaactttactcctcgaaagggtgctcacagatgtcatgtactgaatagctcccttttaaatgatcatttattttcatcaaagcctgttctatatatgccacttcattttctaacttttggtatgaaaaaatcagtttacttacagtatgttaattgtattgtactactataaacaggaacataatttccaattcagttttaaataattttaccagtactactaacttttaaggaaattaattcagttggttactcagtgtttgttacagaaagagtccagaaaagtattcaccctaagagaatgtcaatcatataatgataatttgtgaaagctttgagaatcaatcatcagtaagttactatcagtttataaaatattatcacatttgtttaaatgtgactttagatacttttatgccaaaaataaactcacatgagcacatgacagtctgagctctataatcagtgtgcttctgctgtgcagaaatgttagaaacgtattgtctaaatatctttgataattaaaatgtttaatatttaatgaaatttgttgttacttgttttaaatcttttttcttttaataaagatttaaataagaaat

SEQ ID NO: 4455 - DNA, 468 bp, Homo sapiens; identical to SEQ ID NO: 776

SEQ ID NO: 4456 - DNA, 2278 bp, Homo sapiens; identical to SEQ ID NO: 1427

SEQ ID NO: 4457 - DNA, 2317 bp, Homo sapiens
agtaggatgcggccagcgcaggagctggtggtgaaaaactgatctcgcatgttcagaaactgcacaagctctaccacatcctcgtcaacactgcccttccggctgaggtccgctttgctcaaacattgcgccttccatttcctgaactccgcgctgcgatccatgggtgacggactcagggtctgcgctcggctccttcatggtagcctcgtctctccctgggggcagccatattgaagcgagcggtggccgaaaaggtccaaacttcctcttcgttcttaatttgggaaattctagtgccttcgcctaggggtggagagaggcgcacatcctgggtggagcgaggcgcacatcctgggtggagcctgcaaaagttggagaaggtgtggcagtcctcatttctgtggaatctgaagaagcccacgcagattttaattcccactctagattctggcttcatcgttatgaagcatatgatgatcccgtggatagtatctagatcaccatggcgactggacagaagttgatgagagctgttagagtttttgaatttggtgggccagaagtcctgaaattgcgatcagatattgcagtaccgattccaaaagaccatcaggttctaatcaaggtccatgcatgtggtgtcaaccccgtggagacatacattcgctctggtacttatagtagaaaaccactcttaccctatactcctggctcagatgtggctggggtgatagaagctgttggagataatgcatctgctttcaagaaaggtgacagagttttcactagcagcacgatctctgggggttatgcagagtatgctcttgcagcagaccacactgtttacaaactacctgaaaaactggactttaaacaaggagctgccatcggcattccatattttactgcttatcgagctctgatccacagtgcctgtgtgaaagctggagagagtgttctggttcatggggcaagtggaggagttggattagcagcatgccaaattgctagagcttatggcttaaagattttgggcactgctggtactgaggaaggacaaaagattgttttgcaaaatggagcccatgaagtgttcaatcacagagaagtgaattacattgataaaattaagaagtatgttggtgagaaaggaattgatataattattgaaatgttagctaatgtaaatcttagtaaagacttgagtcttctgtcacatggaggacgagtgatagttgttggcagcagaggtactattgaaataaacccacgagacaccatggcaaaggagtcgagtataattggagttactctcttttcctcaaccaaggaggaatttcagcaatatgcagcagcccttcaagctggaatggaaattggctggttgaaacctgtgataggttctcaatatccattggagaaggtggccgaggctcatgaaaatatcattcatggtagtggggctactggaaaaatgattcttctcttatgatgattaattctttcatggatttcctatgtaattagaggtactgtctttcccccagttgtacttaccctatcttttctttaattaacattcgattccatgagcttcttatgtgaaaaaataagatttttctttagagagcagaagcagaagagtaaaatttattgtatagctagcaatatttttttatgccatctgtctcaaatcaaagagtcatcatagtaggaaataacatgttagttgtcatttggcatgagtgtgcattccagtaattcttaattgatatttgattaattccatacctttgattaaaacatgctagttcaaaataagactgctcagtttccaagggttttcaagcctacttacctttataaaggttctctagtctctgattagccatgactgtattggactttgaacattttctgaactaaaaacctctattctaaactaatctcatttggatgtgtaagtcttttgtaaaggcaagaataaataatatccaggacaatttattagttttctcagtattttcccaaatattagaatatttacttcattattggttggctgccaatgaccccatatgttctgtgagaatagtagctttatctttgatataatacatagtctccaaataggtaatacttcgcaattgattagattttcagagtagatttagagttatctgtttttctggtgagggtcaaatatttttgttaattaagctcacaaatttgataaattaagaattatctgcatttgtctcgtaacataataatgtgtaataaagtctatagaaaattaaaaaaaaaaaaaaaa

SEQ ID NO: 4458 - DNA, 2176 bp, Homo sapiens
agtaggatgcggccagcgcaggagctggtggtgaaaaactgatctcgcatgttcagaaactgcacaagctctaccacatcctcgtcaacactgcccttccggctgaggtccgctttgctcaaacattgcgccttccatttcctgaactccgcgctgcgatccatgggtgacggactcagggtctgcgctcggctccttcatggtagcctcgtctctccctgggggcagccatattgaagcgagcggtggccgaaaaggtccaaacttcctcttcgttcttaatttgggaaattctagtgccttcgcctaggggtggagagaggcgcacatcctgggtggagcgaggcgcacatcctgggtggagcctgcaaaagttggagaaggtgtggcagtcctcatttctgtggaatctgaagaagcccacgcagattttaattcccactctagattctgtatctagatcaccatggcgactggacagaagttgatgagagctgttagagtttttgaatttggtgggccagaagtcctgaaattgcgatcagatattgcagtaccgattccaaaagaccatcaggttctaatcaaggtccatgcatgtggtgtcaaccccgtggagacatacattcgctctggtacttatagtagaaaaccactcttaccctatactcctggctcagatgtggctggggtgatagaagctgttggagataatgcatctgctttcaagaaaggtgacagagttttcactagcagcacgatctctgggggttatgcagagtatgctcttgcagcagaccacactgtttacaaactacctgaaaaactggactttaaacaaggagctgccatcggcattccatattttactgcttatcgagctctgatccacagtgcctgtgtgaaagctggagagagtgttctggttcatggggcaagtggaggagttggattagcagcatgccaaattgctagagcttatggcttaaagattttgggcactgctggtactgaggaaggacaaaagattgttttgcaaaatggagcccatgaagtgttcaatcacagagaagtgaattacattgataaaattaaggttgttggcagcagaggtactattgaaataaacccacgagacaccatggcaaaggagtcgagtataattggagttactctcttttcctcaaccaaggaggaatttcagcaatatgcagcagcccttcaagctggaatggaaattggctggttgaaacctgtgataggttctcaatatccattggagaaggtggccgaggctcatgaaaatatcattcatggtagtggggctactggaaaaatgattcttctcttatgatgattaattctttcatggatttcctatgtaattagaggtactgtctttcccccagttgtacttaccctatcttttctttaattaacattcgattccatgagcttcttatgtgaaaaaataagatttttctttagagagcagaagcagaagagtaaaatttattgtatagctagcaatatttttttatgccatctgtctcaaatcaaagagtcatcatagtaggaaataacatgttagttgtcatttggcatgagtgtgcattccagtaattcttaattgatatttgattaattccatacctttgattaaaacatgctagttcaaaataagactgctcagtttccaagggttttcaagcctacttacctttataaaggttctctagtctctgattagccatgactgtattggactttgaacattttctgaactaaaaacctctattctaaactaatctcatttggatgtgtaagtcttttgtaaaggcaagaataaataatatccaggacaatttattagttttctcagtattttcccaaatattagaatatttacttcattattggttggctgccaatgaccccatatgttctgtgagaatagtagctttatctttgatataatacatagtctccaaataggtaatacttcgcaattgattagattttcagagtagatttagagttatctgtttttctggtgagggtcaaatatttttgttaattaagctcacaaatttgataaattaagaattatctgcatttgtctcgtaacataataatgtgtaataaagtctatagaaaattaaaaaaaaaaaaaaaa

SEQ ID NO: 4459 - DNA, 1747 bp, Homo sapiens; identical to SEQ ID NO: 762

SEQ ID NO: 4460 - DNA, 2143 bp, Homo sapiens
actgaaggctagagaacaattccgagaaagagacggagagagagggaagaaaaagacagatagatagatattggggggaaggagaaaaaaggagaagagagggaagagaggacagcggagagagagcaccagagagagagggagagagagagagagcgctagagagagggagcgagcatgtgcgatgagcaatagctgtggaccttacagttgctgctaactgccctggtgtgtgtgagggagagagagggagggagggagagagagcgcgctagcgcgagagagcgagtgagcaagcgagcagaaaagaggtggagagggggggaataagaaagagagagaaggaaaggagagaaggcaggaagaaggcaagggacgagacaaccatgctgtgctgtatgagaagaaccaaacagaattaaaagggaacctggtctctgggttgttttcaacatctcaagtgtgaattttccctgtcaaaatcttcacaaggaaaatgagtcacagcatcacctgggtgacgaggtcataacacctcagcccttgcttaaaaaattttatttctacttttctattgtaaagagatctcaaaacaggaagataaaattggactgacagctctacagcctagtcttttagacagtgaactaggccagcattggcagacactggcgatgacaaagtcctgctctgaattatgccaccccgcactccactttttaccttgcctgggaggcttgaggaaaaatcttcagagagcagttcgacctagtccttattcacttggcttcttgactttctggatttcaagggttgaaaaaaatgatgacgaccaaaagattgaacaagatggtatcaaaccagaagataaagctcataaggccgcaaccaaaattcaggctagcttccgtggacacataacaaggaaaaagctcaaaggagagaagaaggatgatgtccaagctgctgaggctgaagctaataagaaggatgaagcccctgttgccgatggggtggagaagaagggagaaggcaccactactgccgaagcagccccagccactggctccaagcctgatgagcccggcaaagcaggagaaactccttccgaggagaagaagggggagggtgatgctgccacagagcaggcagccccccaggctcctgcatcctcagaggagaaggccggctcagctgagacagaaagtgccactaaagcttccactgataactcgccgtcctccaaggctgaagatgccccagccaaggaggagcctaaacaagccgatgtgcctgctgctgtcactgctgctgctgccaccacccctgccgcagaggatgctgctgccaaggcaacagcccagcctccaacggagactggggagagcagccaagctgaagagaacatagaagctgtagatgaaaccaaacctaaggaaagtgcccggcaggacgagggtaaagaagaggaacctgaggctgaccaagaacatgcctgaactctaagaaatggctttccacatccccaccctcccctctcctgagcctgtctctccctaccctcttctcagctccactctgaagtcccttcctgtcctgctcacgtctgtgagtctgtcctttcccacccactagccctctttctctctgtgtggcaaacatttaaaaaaaaaaaaaaaaagcaggaaagatcccaagtcaaacagtgtggcttaaacattttttgtttcttggtgttgttatggcaagtttttggtaatgatgattcaatcattttgggaaattcttgcactgtatccaagttatttgatctggtgcgtgtggccctgtgggagtccactttcctctctctctctctctctgttccaagtgtgtgtgcaatgttccgttcatctgaggagtccaaaatatcgagtgaattcaaaatcatttttgttttcctccttttcaatgtgatggaatgaacaaaaaggaaaaaattcaaaaaacccagtttgttttaaaaataaataaataaagcaaatgtgccaattagcgtaaacttgcggctctaaggctcctttttcaacccgaatattaataaatcatgagagtaatcaaggtcaaaaaaaaaaaaaaaaaaaaaaaaaaaaaaaaaaaaaaa

SEQ ID NO: 4461 - DNA, 2445 bp, Homo sapiens; identical to SEQ ID NO: 1455

SEQ ID NO: 4462 - DNA, 3519 bp, Homo sapiens; identical to SEQ ID NO: 1502

SEQ ID NO: 4463 - DNA, 3552 bp, Homo sapiens
cggttctttccggaaattatgactgcagctgttttcactccgctgtgactcagagcgctccgggctgcaggagaggaagcccagcctgttctaccagagaacttgcccaggtcagaggtctgcgtagaagcccttttctgagcatcctctcctctcctcacacctgccactgtcctctgcgttgctgtcgaattaaatcttgcatcaccatggtgcacttctgtggcctactcaccctccaccgggagccagtgccgctgaagagtatctctgtgagcgtgaacatttacgagtttgtggctggtgtgtctgcaactttgaactacgagaatgaggagaaagttcctttggaggccttctttgtgttccccatggatgaagactctgctgtttacagctttgaggccttggtggatgggaagaaaattgtagcagaattacaagacaagatgaaggcccgcaccaactatgagaaagccatctcccagggccaccaggccttcttattggagggggacagcagctccagggatgtcttctcttgcaatgtgggtaacctccaacctgggtcgaaggcggcagtcaccctgaagtatgtgcaggagctgcctctggaagcagatggggctctgcgctttgtgctcccagctgtcctgaatcctagataccagttctctgggtcgtctaaggacagttgccttaatgtgaagactcctatagtccctgtggaggacctgccctacacactcagcatggtcgccaccatagattcccagcatggcattgagaaggtccaatccaactgccccttgagtcctaccgagtacctaggagaggacaagacttctgctcaggtttccctggctgctggacacaagtttgatcgggacgtggaactcctgatttactacaatgaggtgcatacccccagcgtggttttggagatggggatgcctaacatgaagccaggtcatttgatgggagatccatctgcaatggtgagtttctatccaaatatcccagaagatcaaccatcaaatacctgtggagagtttatctttctcatggaccgctcgggaagtatgcagagccccatgagtagccaggatacatctcagctgcgaatacaggcagccaaggaaacactgattttgctgctgaagagtttacctataggctgttatttcaacatctatggatttggctcttcctatgaggcatgctttccggagagtgtgaagtacactcagcaaacaatggaggaggctctggggagagtgaagcttatgcaggccgacctagggggcactgaaatcttggcaccactccagaacatttacaggggaccctccatcccaggccaccccctacagctttttgtctttacagatggagaagttacagacacgtttagtgtaattaaagaagttaggatcaacagacagaaacacaggtgtttctcatttggtattggagaaggcacctccaccagcctaataaaaggtattgcccgggcatcagggggcacctcagaatttatcacaggcaaagacaggatgcagtccaaggctctcaggactctgaaacgctctctgcagcctgtggtagaggatgtctctctgagctggcatttgcctcctggtctgtctgctaaaatgctttccccagaacagactgtcatctttaggggtcagagattaatcagctatgcccagctgaccgggaggatgccagcagcagagacaacaggagaagtatgcctcaaatatacactccagggcaagacttttgaggataaggtgacatttcctctacaacccaagcctgatgtcaacctcaccattcaccgccttgctgccaagtccttgctccagaccaaggacatgggcctcagggagactccagcaagtgataaaaaagatgcattgaaccttagccttgagtctggtgtcataagctccttcacagctttcattgctatcaataaggagctcaacaagccggttcaggggcctctggctcatagggacgtcccaaggccaattctgttgggtgcttctgccccattgaagataaaatgccaatcaggttttcgaaaggccttacactctgaccgtcctccttctgcatctcagcccagaggggaacttatgtgttataaggccaagacattccagatggacgattacagtctctgtgggttgataagtcacaaggaccagcacagtccaggctttggagagaatcaccttgtgcagctgatttaccaccaaaatgcaaatggttcctgggatctgaatgaagatctagccaagatcctaggtatgagtttggaagaaataatggctgcacagcctgccgagcttgtggattcctcaggctgggccaccatcctggccgtgatctggctgcacagcaatggtaaggacttgaagtgtgaatgggagcttctggaaaggaaggccgtggcctggatgcgtgcccatgcaggctccaccatgccttcggttgtgaaagctgctattactttcctgaagtcatctgtggatcctgctatctttgccttttgaagataccatccagaaaaagaagtgcctttaatttgctactgtcatttcctctagtatcacttttgctgtgatgatgtgttcttgtgtattataactctttattttttgccataaaagtaaaggatgcttactccacttcgcttctctgctccaggttcactttggatatgatctttcttttcccaacatatgccctcagaaaagtgacagtggtcccagaacctattccctttcttgagggagttcaaaacattcataggcagtaatgttcctcccagggtttccagggaaacaacatgaaaaacaggtgacatgaactacagactaaagattgcagcatttatgttagagaatgcttgaattagagaattttctgcattatctttgtctgttcactttctatcttatatacttatcagggccatactggtaagcttgcgtaggaggagttagagggaagttgaaagccaacatctggatcaatgtaatgtcaagatcacaaagacagagactgcaggggtccactgtgagaggtgacactgttggggaccttcctgattcattcttcttgggctttgctagcctgtacaacctacatgtcttttcttccactgcctgaaagacttgggttgaactataactgttggagagagatgttcctctttaatcatgaaacaccttaagaagtctataatgcaatccttagtcctaccctgaacctatgtgtcctctaagtcaggccctgatctagtgcagtaaagggaagggtgggcttaatgggagctttgcctgggacctgaacctggagcacttaccgcattaggaagaaaggagctccccgtaatcgttcctgacccttgtgtctcatataccctatcctggtggaaatgaccctatttgatatgctgtcccttaaaataacttgtatcaatattaaaatgactatttctaccctttgatgagtaaaaaaaaaaaaaaaaaa

SEQ ID NO: 4464 - DNA, 5445 bp, Homo sapiens; identical to SEQ ID NO: 1758

SEQ ID NO: 4465 - DNA, 5508 bp, Homo sapiens
tcggtcctcagaggaggggcccgggcaccctccgtgcgggccgcagcacgccggtctttgagggacccttggactcccggatctgcatgcgagggatgcggtcgaagacgagatgagggagctgacgggaggggaaacggaggggcaggtgaacatggagagagcaggaacagggagagagtagggacagcgactgggagacgcgctccacagaaacccggactgagaggcagcgagaggacgtagtcttgctctgttgcctaggctggagtagagtggtgtgatcttggctcactgcaacctccgcctcccaggttcaagcgattctcctgcctcagcctcccaagtagttgggattacagacatctgaatgggactccgagtgccttacatccctgcagccccttcctcttcctacacccccagcagcaaatgaggcacacctgcagacagcagctatctctctgtggacagtggtggccgccgtgcaggctatagagaggaaggtggagatccacagccggcgactcctacacctggaaggtcggacagggacagcagagaagaaactagccagctgtgaaaagacagttaccgagcttgggaaccagctggagggcaagtgggccgtgctgggaaccctgctgcaggagtacgggctgctgcagaggcggctggagaacttggagaacctgctgcgcaacaggaacttctggatcctgcggctccctccaggtattaagggagatatcccaaaggtgcctgtggcatttgatgatgtctccatctacttttccactccagagtgggaaaaattagaagaatggcaaaaggaactttacaagaatatcatgaagggcaactacgagtctctcatctccatggattatgctataaatcaacctgatgtcttatctcagattcaaccagaaggggaacataatacagaggaccaggcagggccagaggaaagtgagattcccacagaccccagtgaagagcctggtatttcaacatcagatattctgtcttggattaaacaagaagaagagcctcaggttggggccccaccggagtccaaggagagtgacgtgtacaaaagcacttatgctgatgaagagcttgtcatcaaagctgaaggccttgctagatcctcgttgtgccctgaggttccagtccctttctcttctccaccagcagcagcaaaggatgctttttcagatgtggctttcaaaagccagcagtctacatccatgacaccttttggacgtccagccactgacctgcctgaagcctctgagggacaagtgacttttactcagttgggtagctatcccctcccacctccagttggcgagcaggtgttctcatgccaccactgtggcaagaatctcagccaagacatgttgctgacccaccaatgtagccatgctactgagcaccccttaccctgtgcccagtgccctaagcactttactccacaggcggacctcagcagcacctcccaggaccatgccagcgagacaccccccacctgcccacactgtgccaggacttttactcacccatcaagacttacctaccatcttcgggtccataacagcactgagcgtcctttcccctgtcctgattgccccaagcgctttgctgaccaggctcgactcaccagccaccggagagctcatgcaagcgaaaggcccttccgctgtgcccagtgcggcaggagcttcagcttgaaaatcagcctcctgctccaccagcggggtcatgcacaagagcgccctttctcctgccctcagtgtggcattgacttcaacggccactcggccctgatccgccaccagatgatccacacaggcgagcgtccttacccctgcactgactgcagtaagagcttcatgcgcaaggagcacctgctgaaccaccggcggctgcacacaggcgagcggcccttcagttgtcctcactgtggcaagagcttcatccgcaagcaccacctaatgaaacaccagcgcatccacaccggggagcggccctacccctgctcctactgtggcaggagcttccgctacaaacagacactcaaggaccacctccgttcaggccacaatggaggctgtgggggtgatagtgacccatcaggtcagccacccaacccaccaggtcccctcataactgggcttgaaacttctggcctgggtgtcaacactgaaggtctagagaccaaccagtggtatggggaagggagtggagggggagttttgtaaatccaaatctctgtggcttcatgcttgtatatgctcacagcagggcacaaaatccaagagaaggtctgtgagccccatccaacacccacagtaattattatctggcacatcaatgaatttggggtcctatacacttgactagagacatgcttgtgttttggaatttcacacccttacaagaataccacattttgaaacccagaaagacctggaaaggagcccagcatgtccatcttttcaaagatacaacaaaagcagaagttacaagaatattgcggagaggttggaaagcaggatttaacctctagttctcttgttctcagagaacagcaggttgatagtagattatgtctctaggtagagacagatacatgagaagagcctccaaaactggaagcccatcataaggcatgagaatgtttaactataaagccttttattagttctttgatagctaagatggttgttggagaaagtgcttaagccactgtttatgttgctgcctcctctctcaaaaccagccaagatctgttcacacacctctgtggctgtctttccctgaaacatggtaactcaagactgcctgcctaggtttcttagattaattattcacataaattttgtttaatattggttgaacaagaaatctgactttaaaagattattaaggagaatattccttaactatactggcttgatttgaaacaggctcttattgccatttaaactgccagaaatctttgccaaggtcctggttaaaaaaattggaaacggttttcttagccccagctttaaaagctagagatctcagagaaatagctggcttaacaatgacagaacagcttaaaatttgtgcctacaccatgttctgagagtcgttcacatcaaattcttatcttttccaagccagtaagttggcttctccattcctggtgtctgatattcttgacaatcatcagcaacaaagatcacagcactttccagaagcatggagcttcagaaagtgccagtgaactcttggtcctcagtagtgagatgataacagtgttataatgcagcttccttgagccatcagagagagtgtatgttcaccctatctggctgtatcccattggcagtggacagattgaggaaattcctagatcactgagagctaagcaccatgcatagacaacagtttgttcttgcctgtgttgcttttagggactttgactaccacatgttcttttcttggggtgatttaatcacctgggagcatctgagtctgctcctaagtggctttgcaactgggcctaagttctgtttcctttatggatctcaaattttcatctgcacaatgaggctgttgaaaggaaaaaaagtgagcctctaggaattattcaaaaaaagtctgtgatacattccttttcctgccaaagttctgtctctgtctttggcttctgtccaggcaaagctaaataagacagcaaagtcaaagcagataaattcttgttgaaacttgactaaaatttatttgatttgttgttttactcccacttggaatcctgaggtagaagacagaatgcagaagtcttacatcttgggcaggaaactggtttattcctatactcttgtttcctctgcttcttcctgaggtctagaacaaggtctggaaatgtttagacaggatattttcttgatgaagtgataaggaaaggacccatttttttgctcatcacctagcccatccttcactctctctagttatgcataacaacactagaagaaggtgttagcccagctaactttgcttctgggaaggctatgtctgaacatgttgctctgtaggataatcacacttagaaaacatctgctccatgacattcacaataccagggaccatgggagacacaagaaatgtgtgtctgctgtcataacttacagtgaaaaagcccaataatacagaacaagacatgatgggcaataccctagcatattgggattaagagctttctagccagaatctggacctataccatgggaaaatttaggggtgctgggaatcccaaagccaaggttctggcttcattggcaacccactaggaacttgaatgtgagattcagctctagtttgcaccttgatttccccagtgaaaagggagaagagccaaagtattgtctaggtgctgagttcccttttctgagtggatttcaagcatttgccagggtatgctggaggagggactcctaaagtaggtgagatgtgggactaggtaacactttaaatacttttttactcaaagatttgccaagaacacagcttattagtgaaagagacctgtggattgaaatggctgcagatagatcccgcagtcccttctgaaaggaactgtgtagccagcagggacctaaactttggcaaaaagtgaacacaattcaaatacgaatgaaggaagagccctcagatggaacgaaaggcgatgtgcaaggccatcccagagagacggaagcaggtgcgatactaagcctcagcccaagaataaaagagagttcaactgttactcttttctttcatcaatcccctatcagttagaactgcaggccagttccaaagagtgtttgcttaagattcaaaagtgggtaagtaaaatggatcagtgggaaggataaggtgtccaacagaaagtgtggaggagaaactcttggcctatcaagtgctcctgagagaaaccatgcaatttaacacttcagttaaagaaatacatgagaactgcttgtcatgaccagacaagataggaaaggggaaaccccagaaacgtgctcttcatctgtcagccttttggaccaagaagctgtcactatcacacataagcaccattcccttagagtggatccaggtgttgactataaccagatttactctttgcttactaggttttccattgtcaccattggatgaacctctggtttagccacagttgtgaaaataaatggaagttggttgattgtctagaaagtgcaagaagatggccctgctccttttctgctgaacatttagtattggaaactcctacttcccttttcattaataatgtgtgcaagtttcctattagcggggaaggtgtggggctctgctgggcttctcttgagcatatctgagaagtgatgttcatgtctatctcaaccaggaccagaccctgtgacttactcggtaataacagtccacacaagcctcgttgatattaaaaaaaaaaaaaaaaaa

SEQ ID NO: 4466 - DNA, 2415 bp, Homo sapiens
cggccgctgctagaggggctgcttgcgccaggcgccggccgccccactgcgggtccctggcggccggtgtctgaggagtcggagagccgaggcggccagaccgtgcgccccgcgcttctcccgaggccgttccgggtctgaactgtaacagggaggggcctcgcaggagcagcagcgggcgagttaaagtatgctgggagcggtgaagatggaagggcacgagccgtccgactggagcagctactatgcagagcccgagggctactcctccgtgagcaacatgaacgccggcctggggatgaacggcatgaacacgtacatgagcatgtcggcggccgccatgggcagcggctcgggcaacatgagcgcgggctccatgaacatgtcgtcgtacgtgggcgctggcatgagcccgtccctggcggggatgtcccccggcgcgggcgccatggcgggcatgggcggctcggccggggcggccggcgtggcgggcatggggccgcacttgagtcccagcctgagcccgctcggggggcaggcggccggggccatgggcggcctggccccctacgccaacatgaactccatgagccccatgtacgggcaggcgggcctgagccgcgcccgcgaccccaagacctacaggcgcagctacacgcacgcaaagccgccctactcgtacatctcgctcatcaccatggccatccagcagagccccaacaagatgctgacgctgagcgagatctaccagtggatcatggacctcttccccttctaccggcagaaccagcagcgctggcagaactccatccgccactcgctctccttcaacgactgtttcctgaaggtgccccgctcgcccgacaagcccggcaagggctccttctggaccctgcaccctgactcgggcaacatgttcgagaacggctgctacctgcgccgccagaagcgcttcaagtgcgagaagcagctggcgctgaaggaggccgcaggcgccgccggcagcggcaagaaggcggccgccggagcccaggcctcacaggctcaactcggggaggccgccgggccggcctccgagactccggcgggcaccgagtcgcctcactcgagcgcctccccgtgccaggagcacaagcgagggggcctgggagagctgaaggggacgccggctgcggcgctgagccccccagagccggcgccctctcccgggcagcagcagcaggccgcggcccacctgctgggcccgccccaccacccgggcctgccgcctgaggcccacctgaagccggaacaccactacgccttcaaccacccgttctccatcaacaacctcatgtcctcggagcagcagcaccaccacagccaccaccaccaccaaccccacaaaatggacctcaaggcctacgaacaggtgatgcactaccccggctacggttcccccatgcctggcagcttggccatgggcccggtcacgaacaaaacgggcctggacgcctcgcccctggccgcagatacctcctactaccagggggtgtactcccggcccattatgaactcctcttaagaagacgacggcttcaggcccggctaactctggcaccccggatcgaggacaagtgagagagcaagtgggggtcgagactttggggagacggtgttgcagagacgcaagggagaagaaatccataacacccccaccccaacacccccaagacagcagtcttcttcacccgctgcagccgttccgtcccaaacagagggccacacagataccccacgttctatataaggaggaaaacgggaaagaatataaagttaaaaaaaagcctccggtttccactactgtgtagactcctgcttcttcaagcacctgcagattctgatttttttgttgttgttgttctcctccattgctgttgttgcagggaagtcttacttaaaaaaaaaaaaaaattttgtgagtgactcggtgtaaaaccatgtagttttaacagaaccagagggttgtactattgtttaaaaacaggaaaaaaaataatgtaagggtctgttgtaaatgaccaagaaaaagaaaaaaaaagcattcccaatcttgacacggtgaaatccaggtctcgggtccgattaatttatggtttctgcgtgctttatttatggcttataaatgtgtattctggctgcaagggccagagttccacaaatctatattaaagtgttatacccggttttatcccttgaatcttttcttccagatttttcttttctttacttggcttacaaaatatacaggcttggaaattatttcaagaaggagggagggataccctgtctggttgcaggttgtattttattttggcccagggagtgttgctgttttcccaacattttattaataaaattttcagacataaaaaa

SEQ ID NO: 4467 - DNA, 3077 bp, Homo sapiens; identical to SEQ ID NO: 2422

SEQ ID NO: 4468 - DNA, 1975 bp, Homo sapiens
gagccgctgctggtcccggcctcgcggcctgcgggggaggctgcccggaggaggcagcggcggcggcagcgcgtcctcggtccccaggaccacggcttctttcctgccaggtcacaggctgtgcgtgtgcatgccgaacacccacatgcacacagttggtggctcagtctgatgtgcctgacttctcacgccttcccccagtcctccagtaccgtgcctctacatgggctgggcagccccaaactgaaatgtgagtgccagagtgcatcctttaagcgaggtctgccccacggacacccgctccctctgtgtccctgctttgacagatctatccatctggccatccatccgtgggggtctgcaatggccacctttagccgccaggaatttttccagcagctactgcaaggctgtctcctgcctactgcccagcagggccttgaccagatctggctgctccttgccatctgcctcgcctgccgcctcctctggaggctcgctgcacatggtttgggtcgtgctgctcagcctcctgtgctacctcgtgctgttcctctgccgacattcctcccatcgaggcgtcttcctatccgtcaccatcctcatctacctactcatgggtgagatgcacatggtagacaccgtgacatggcacaagatgcgaggggcacagatgattgtggccatgaaggcagtgtctctgggcttcgacctggaccggggcgaggtgggtacggtgccctcgccagtggagttcatgggctacctctacttcgtgggcaccatcgtcttcgggccctggatatccttccacagctacctacaagctgtccaaggccgcccactgagctgccggtggctgcagaaggtggcccggagcctggcactggccctgctgtgccttgtgctgtccacttgcgtgggcccctacctcttcccgtacttcatccccctcaacggtgaccgcctccttcgcaagtggctgcgagcctacgagagtgctgtctccttccacttcagcaactattttgtgggctttctttccgaggccacgaccacgttggcgggggctggctttaccgaggagaaggatcacctggaatgggacctgacggtgtccaagccactgaatgtggagctgcctcggtcaatggtggaagttgtcacaagctggaacctgcccatgtcttattggctaaataactatgttttcaagaatgctctccgcctggggaccttctcggctgtgctggtcacctatgcagccagcgccctcctacatggcttcagtttccacctggctgcggtcctgctgtccctggcttttatcacttacgtggagcatgtcctccggaagcgcctggctcggatcctcagtgcctgtgtcttgtcaaagcggtgcccgccagactgttcgcaccagcatcgcttgggcctgggggtgcgagccttaaacttgctctttggagctctggccatcttccacctggcctacctgggctccctgtttgatgtcgatgtggatgacaccacagaggagcagggctacggcatggcatacactgtccacaagtggtcagagctcagctgggccagtcactgggtcacttttggatgctggatcttctaccgtctcataggctgaggcacatctgtggaccctcataaccctcttaagacccctctcagggtgccactgatgggggatgagggaaggccctctctctactccttgaccccctccatccttgacccccaacacctcaacacacacacacacacacacacacaaaatcacaccattttcatgcctgtcaatccccaccccaccacaaggcaggaagggggtggtgcctgctggggcctagagggggatgcttggggaaacagagaaggggagatccagggcctccccgccttccttcttcctttttatatacaatttgttattgtcaaataaaagtaggaaatattc

SEQ ID NO: 4469 - DNA, 1264 bp, Homo sapiens
aagctcctgcagagtgccacggaggcacagagacaaaagatccaacgcactgcccgcaagcttttcggcctcagtgtacgctgtcgccacaatcccaaccaccagctgcctagagagaggacaattcagcagtggcttgcaagggtccagtcactcctctactgtaatgagaatgggttttggggaaccttcctggagagccagcggagctgcgtgtgccacggcagcaccacgctgtgccagcgccccatcccctgcgtgataggcgggaacaacagctgcgccatgtgcagcctggccaacatctccctctgcggctcctgcaacaagggctacaagctgtatcgaggccgctgtgaaccacagaacgtggactcggagcggagcgagcagttcatcagctttgagactgacctggacttccaggacctggagctgaagtacctgctgcagaagatggactcacgcctctacgtccacaccaccttcatcagcaacgagatccgcctcgacaccttctttgaccctcggtggcgcaagcgcatgtccctcactctcaagagcaacaagaaccgcatggacttcatccacatggtgatcggcatgtccatgcgcatctgccagatgcgcaacagcagcctggaccccatgttctttgtctatgtcaacccctttagcgggagccattcggagggctggaacatgcccttcggggaatttggctacccacgctgggagaagatccgtctccaaaacagccagtgctacaactggactcttttgctgggcaatcggtggaaaacatttttcgagacggtccacatctacctacgtagtcggactcggctacctaccctactgcgaaatgagactggccagggccccgtggacctgtcggatccctccaagaggcagttctacatcaagatctcagacgtgcaggtgtttgggtatagcctgaggttcaacgccgacctcctgcgcagtgcagtgcagcaggtcaaccagtcctacacacagggcggccagttctattcctcttcgtcagtgatgctcctcttgttggatattcgggaccgaattaatcgcctggcccctcctgtggccccggggaaaccccagctggacttgttctcctgtatgctgaaacaccgcctgaaactgaccaacagcgagatcatcagggtgaaccacgccttggacctgtacaacacggagatcctcaaacagtcggaccagatgacagccaaactctgctaacccg

SEQ ID NO: 4470 - DNA, 2372 bp, Homo sapiens
acctgctgggagctggaggaggcgcggagcgaagccggccctgccagccacgcggagaagcagaggcaggtgagcgcgatgcagccggcgccgggtctggggctcggggactcctccctgcaccgctacctggacggcgacttctggagcctcaagaacgagctgcgcggactcctcggcggcgcccgctcttccggcaaaggtatgatttaagcttggatgaaatgagagctttgacagttcagagagtgaagtttgccatggacctgcctctgaaaacgtgcaggtcaggatctggcagagaaaacaaagaattttgtcagccgaagccttgtcataggagaagtcctctccatggcggacatggccacaggagtgaagtgcggaataatttattggctatttggtggtgctatcaggaatctcggaagccctgaacatgttactaagtggtttcagccactccaggagcagaaatacactgggatgtttgcaatgaccgagaggggccatgggagcaacgcgagagggatccagaccaaagccacctttgacctctctgcccaggagtttgtaattgacacgccgtgtgaaaatgcggagaagatgtatattggaaatgccatgtacgggaattatgcagctgtctttgcccagctcatcatagatggaagatctcaagggccccactgtttcatcgttcctgtccgggatgaaaacggaagtcttgtacccaggagtcacagctattgatatgatgtacaaggagggtctgcatggtgtggacaatgggatattaatatttgacaaggttcggatacccagggagaacctgctggataagtttggttccgtggctccagatggacagtaccattcgcctattaggaacaagagtgcaagattcaatgccatgctggcagcactgaccccttcgagattagctgtggctttccaagctatgggtgccatgaagcttgggttgacgatagccattcgctatagccacagccggaggcagtttgggcccaaaaccaaggaagaggtgaagatcattgagcaccaaacacagaccctgcggctgatgccccacctggccacagccttggccctgaccttcgtcagcaggtatgctggggccctcctggatgaggatgtcttccagggaaaggagctggtcaacagtcgctcgctgcaggctctggtggcggggctgaaggcctacagcacctgggagaacatccgctgcctgcaggactgccgcgagtgcactggaggcatggttgtggggcgggaactgctggcccaatacaccaaacagtatgaagaaaaaccactctttggcctgctccaaaactgggctgaatctgtgggggacaagctgagaaccagtttcctggcatttaacatggacacagttgatgatctcgcctttctgttgaaagcagtgaaatttcgtgaaagggttcttcagcggggtttggtggccagaatttattataaggtaaagaccaagaaggaggattttttccatgcctggaactcgtgtctgcaccacgtggcttctctgtccctggcacacactcaccgagttaccttagagcagttctccctagcagtgaagagctgtcctgaccaagaggaccagactttgttaatgaagttttgtctgttgtatggaaccaagctggtgtttcaggagcgggcctggtatttagaacataaatacttgactcccatggccagcacgaggatcaggaatcagttgctggatttgtgcgactcggtgaaggatgatgcccggagggtgatctcgacctttaacatttcacacacctacctccacgcaccaatcgccggaatctccaacccgcgggccgcgtgggctttctaccctgcaccgctgcagccgcggccacgggaagaggcgcgctcccggcggcccaagctgggagccaagctctaacgggtgtggcgggaagtgtggtggcccgccagcagctgccacgacgctcgctccaccgacgcccagagctgtggccgaggccgggggctggcacccgctgggccgccactctcggggattttggtggcaaagcggaggtcccgccgaggctggcgaggtgcgcggctggctgctaggaaagagatccagacggtcgcctggtgcgctggatccctgtgccctttccctgaaacccagcctggcctgactgcaacctctcccaacttcagtgccggatcccctagacaatcagggtgggctccccgctgcgagcgcgccccacagccgggtgccgccaaaggtctcctgctgttagcggtgactcacattcccagtgatttagaaaaactgtggtgccgagtgaaag

SEQ ID NO: 4471 - DNA, 1046 bp, Homo sapiens
agaacgctcagggggcaggtgacacagtcgtgggttccccggcgggcgctggcttgacagtttcctccccgcccactggcaggggagcgccccgccgggctgcacgcgcgcgcgcgcaggggggcataaaagccgcggccgcgcggagacgcggagctcgcccaccgcccgccccagcagtggctgcaccatgcacgtgaacggcaaagtggcgctggtgaccggcgcggctcagggcataggcagagcctttgcagaggcgctgctgcttaagggcgccaaggtagcgctggtggattggaatcttgaagcaggtgtacagtgtaaagctgccctggatgagcaatttgaacctcagaagactctgttcatccagtgcgatgtggctgaccagcaacaactgagaggtttctgttatcagtggaacctatcttggtttggattacatgagtaagcaaaatggaggtgaaggcggcatcattatcaatatgtcatctttagcaggactcatgcccgttgcacagcagccggtttattgtgcttcaaagcatggcatagttggattcacacgctcagcagcgttggctgctaatcttatgaacagtggtgtgagactgaatgccatttgtccaggctttgttaacacagccatccttgaatcaattgaaaaagaagaaaacatgggacaatatatagaatataaggatcatatcaaggatatgattaaatactatggaattttggacccaccattgattgccaatggattgataacactcattgaagatgatgctttaaatggtgctattatgaagatcacaacttctaagggaattcattttcaagactatgatacaactccatttcaagcaaaaacccaatgaacagcttatgtgttagccatagctgaaaataagcacaaatagcttatattcagatcctatcttcatttgaatatagcttttaaatgaaatgttacagtttgaagttttccttcatgcacttggtgataaacgttttctaaatttttagttaagtatatggat

SEQ ID NO: 4472 - DNA, 1554 bp, Homo sapiens
attttctcagcatttcttattgccgtgactgttaatgatccatgcgtagctacaggaatatctgttcacatgtccatttgctatgtgtgcagaggatggagactccaaattttccatgtcaatctccatgaattcaccttttttagaaatattacatcttgagaattgtaactacgcggtagaattggggaagaatcaagcgaagttctccctggttggcatcggtggacaagatctcaatgaaggaaaccgcactctcacactggccttgatttggcagctaatgagaaggtatacactgaatatcctcgaagaaattggtggtggccagaaggtcaatgatgacattattgtcaactgggtgaatgaaacattgagggaagcaaagaaaagttcatccatctctagtttcaaggacccgaagattagtacaagtctgcctgttctggacctcatcgatgccatccaaccaggttccattaactatgaccttctgaagacagaaaatctgaatgatgatgagaaactcaacaatgcaaaatatgccatctctatggcccgaaaaattggagcaagagtgtatgccctgccagaagacctggttgaagtgaaccccaaaatggtcatgaccgtgtttgcctgcctcatggggaaaggaatgaagagggtgtgaggcccaatggggctgggtgggaggcggtgcactcactcctgactgcccggcacagatgctccagggatgattcaagccattccaaagttcaactcggtgacactctataagattccaaaaagcacatattagtgcagccaagtagcctctcctgtatttaacaaaaagtgcttcattctttgcaggaggcccaacctcctatatataggtttctattcttgatttatttgcttcttcgaaaatctagaggaaaagaaagaagttattttccaggtacccttctcgcttttgccattagccaaggatagaagctgcagtggtattaattttgatataatctttcaaaccagcttcatgtggcttcccttttctttgttcaagatgagggccaggaggggaaacatcacacctgccctaaaccctgttcctggaggtcagcatttgatctgttgcaagcccctctttctgtcccctcttcctaccctgcctcccttgactttgctcctcacacttttggaaccatgccttccgggggggcccatctcttctggccgtccttgtctctgggccacttggagtgtgtgataaatcagtcaagctgttgaagtctcaggagtctctggtagcctgcagaagtaagcctcatcatcagagcctttcctcaaaactggagtcccaaatgtcatcaggttttgttttttttcagccactaagaacccctctgcttttaactctagaatttgggcttggaccagatctaacatcttgaatactctgccctctagagccttcagccttaatggaaggttggatccaaggagggtgtaatggagcatcaagccactcggcggcagcatggagctataactaagcatccttta

SEQ ID NO: 4473 - DNA, 1194 bp, Homo sapiens
gaacaccacccagtgtggagcagcccagccaagcactgtcagggggtgatggtgggaatgggacaaaaagacagctacgtgggtgacgaagcacagagcaaaagaggaatcctgaccctgaagtacccgatagaacatggcatcatcaccaactgggacgacatggaaaaaatctggcaccactctttctacaatgagcttcgtgttgcccctgaagagcatcccaccctgctcacggaggcacccctgaaccccaaggccaaccgggagaaaatgactcaaattatgtttgagactttcaatgtcccagccatgtatgtggctatccaggcggtgctgtctctctatgcctctggacgcacaactggcatcgtgctggactctggagatggtgtcacccacaatgtccccatctatgagggctatgccttgccccatgccatcatgcgtctggatctggctggccgagatctcactgactacctcatgaagatcctgactgagcgtggctattccttcgttactactgctgagcgtgagattgtccgggacatcaaggagaaactgtgttatgtagctctggactttgaaaatgagatggccactgccgcatcctcatcctcccttgagaagagttacgagttgcctgatgggcaagtgatcaccatcggaaatgaacgtttccgctgcccagagaccctgttccagccatccttcatcgggatggagtctgctggcatccatgaaaccacctacaacagcatcatgaagtgtgatattgacatcaggaaggacctctatgctaacaatgtcctatcagggggcaccactatgtaccctggcattgccgaccgaatgcagaaggagatcacggccctagcacccagcaccatgaagatcaagatcattgcccctccggagcgcaaatactctgtctggatcggtggctccatcctggcctctctgtccaccttccagcagatgtggatcagcaaacaggaatacgatgaagccgggccttccattgtccaccgcaaatgcttctaaaacactttcctgctcctctctgtctctagcacacaactgtgaatgtcctgtggaattatgccttcagttcttttccaaatcattcctagccaaagctctgactcgttacctatgtgttttttaataaatctgaaataggctactggt

SEQ ID NO: 4474 - DNA, 2012 bp, Homo sapiens
attcgccagccgcctcgctcccggaccccacggctgcaaactgatctggcgcgcggggaggaggagagcgcaggcgagcgaacccgcgagagagggagagagcgagcgagcaacagcgagagcgagagcgagagagccgggaggcagagggagtagtgaccgccttccggagccgggattcatgcctgtcctcgggaccagcgaaggggactttacggctgagtatgagccaggctgctaggagccaggtacccccacgcctgcagtccccgcgccgtgcccggaatgcgagctggacgcagggctctcccaagttcccaccgagccgaataaaaagcgtccgcccgcagctctccgccaaagacggacattgactccaggactccacagaatggagcaagaatgagaggaaaaaggccggcagaaaagcatgaactggaggtttgttgagctcctctacttcctgtttatatggggccgtatctcagtgcagccctcccaccaggaaccagctgggacagaccaacatgtctccaaggaatttgattggctcatttcagacagggggcctttccaccactccaggagctacctatcctttgtggaaagacaccgtcaaggatttacaaccagatataaaatatacagggagtttgcccgttggaaggtgaggaacacagccatcgagaggagagatctggtccgccatccagtgcccctcatgccggagtttcaaaggagctgcgtgtgccacggcagcaccacgctgtgccagcgccccatcccctgcgtgataggcgggaacaacagctgcgccatgtgcagcctggccaacatctccctctgcggctcctgcaacaagggctacaagctgtatcgaggccgctgtgaaccacagaacgtggactcggagcggagcgagcagttcatcagctttgagactgacctggacttccaggacctggagctgaagtacctgctgcagaagatggactcacgcctctacgtccacaccaccttcatcagcaacgagatccgcctcgacaccttctttgaccctcggtggcgcaagcgcatgtccctcactctcaagagcaacaagaaccgcatggacttcatccacatggtgatcggcatgtccatgcgcatctgccagatgcgcaacagcagcctggaccccatgttctttgtctatgtcaacccctttagcgggagccattcggagggctggaacatgcccttcggggaatttggctacccacgctgggagaagatccgtctccaaaacagccagtgctacaactggactcttttgctgggcaatcggtggaaaacatttttcgagacggtccacatctacctacgtagtcggactcggctacctaccctactgcgaaatgagactggccagggccccgtggacctgtcggatccctccaagaggcagttctacatcaagatctcagacgtgcaggtgtttgggtatagcctgaggttcaacgccgacctcctgcgcagtgcagtgcagcaggtcaaccagtcctacacacagggcggccagttctattcctcttcgtcagtgatgctcctcttgttggatattcgggaccgaattaatcgcctggcccctcctgtggccccggggaaaccccagctggacttgttctcctgtatgctgaaacaccgcctgaaactgaccaacagcgagatcatcagggtgaaccacgccttggacctgtacaacacggagatcctcaaacagtcggaccagatgacagccaaactctgctaacccgggactccttgccatggacttttcctgttgttgtacacacacaacagaacaaaatgaagcaaaacaaaacaaaaaaacccacaaaaatttgtaaaatgtaattaatattcaaagaaaaggaggaaaatcttcatttgttggaaatgaaaacgttctagcaactgtataaaagcgttgggcatgtttgttatttctatactcactctgtcatgaagaa

SEQ ID NO: 4475 - DNA, 1076 bp, Homo sapiens
agctcgcccaccgcccgccccagcagtggctgcaccatgcacgtgaacggcaaagtggcgctggtgaccggcgcggctcagggcataggcagagcctttgcagaggcgctgctgcttaagggcgccaaggtagcgctggtggattggaatcttgaagcaggtgtacagtgtaaagctgccctggatgagcagtttgaacctcagaagactctgttcatccagtgcgatgtggctgaccagcaacaactgagagacacttttagaaaagttgtagaccactttggaagactggacattttggtcaataatgcgggagtgaataatgagaaaaactgggaaaaaactctgcaaattaatttggtttctgttatcagtggaacctatcttggtttggattacatgagtaagcaaaatggaggtgaaggcggcatcattatcaatatgtcatctttagcaggactcatgcccgttgcacagcagccggtttattgtgcttcaaagcatggcatagttggattcacacgctcagcagcgcccaccattgattgccaatggattgataacactcattgaagatgatggtttaaatggtgctattatgaagatcacaacttctaagggaattcattttcaagactatgatacaactccatttcaagcaaaaacccaatgaacagcttatgtgttagccatagctgaaaataagcacaaatagcttatattcagatcctatcttcatttgaatatagcttttaaatgaaatgttacagtttgaagttttccttcatgcacttggtgataaacgttttctaaatttttagttaagtatatggataaaaagttatgaactattaaaaatgtgatgtggaccaaaggctaggttgtaatcttgatagtctaaaaaatgatcaaaacaaatgattttcaaggaatattcaatattctgcctttcagaaagtgtatttatatctgtgcttcataaatattaatgttcttcagaacatcattttaaaggagatacttgaattgttatttaaatcaaaccagatgtaaaacactcacatacaagttcatac

SEQ ID NO: 4476 - DNA, 2163 bp, Homo sapiens
agacttgaatgtgcctctgggcaaagaagcagagctaacgaggaaagggatttaaagagtttttcttgggtgtttgtcaaacttttattccctgtctgtgtgcagaggggattcaacttcaatttttctgcagtggctctgagtccagccccttacttaaagatctggaaagcatgaagactgggctttttttcctatgtctcttgggaactgcagctgcaatcccgacaaatgcaagattattatctgatcattccaaaccaactgctgaaacggtagcacccgacaacactgcaatccccagtttaagggctgaagatgaagaaaatgaaaaagaaacagcagtatccacagaagacgattcccaccataaggctgaaaaatcatcagtactaaagtcaaaagaggaaagccatgaacagtcagcagaacagggcaagagttctagccaagagcaggatccaaatatttccaatggagaagaggaagaagaaaaagagccaggtgaagttggtacccacaatgataaccaagaaagaaagacagaattgcccagggagcatgctaacagcaagcaggaggaagacaatacccaatctgatgatattttggaagagtctgatcaaccaactcaagtaagcaagatgcaggaggatgaatttgatcagggtaaccaagaacaagaagataactccaatgcagaaatggaagaggaaaatgcatcgaacgtcaataagcacattcaagaaactgaatggcagagtcaagagggtaaaactggcctagaagctatcagcaaccacaaagagacagaagaaaagactgtttctgaggctctgctcatggaacctactgatgatggtaataccacgcccagaaatcatggagttgatgatgatggcgatgatgatggcgatgatggcggcactgatggccccaggcacagtgcaagtgatgactacttcatcccaagccaggcctttctggaggccgagagagctcaatccattgcctatcacctcaaaattgaggagcaaagagaaaaagtacatgaaaatgaaaatataggtaccactgagcctggagagcaccaagaggccaagaaagcagagaactcatcaaatgaggaggaaacgtcaagtgaaggcaacatgagggtgcatgctgtggattcttgcatgagcttccagtgtaaaagaggccacatctgtaaggcagaccaacagggaaaacctcactgtgtctgccaggatccagtgacttgtcctccaacaaaaccccttgatcaagtttgtggcactgacaatcagacctatgctagttcctgtcatctattcgctactaaatgcagactggaggggaccaaaaaggggcatcaactccagctggattattttggagcctgcaaatctattcctacttgtacggactttgaagtgattcagtttcctctacggatgagagactggctcaagaatatcctcatgcagctttatgaagccaactctgaacacgctggttatctaaatgagaagcagagaaataaagtcaagaaaatttacctggatgaaaagaggcttttggctggggaccatcccattgaccttctcttaagggactttaagaaaaactaccacatgtatgtgtatcctgtgcactggcagtttagtgaacttgaccaacaccctatggatagagtcttgacacattctgaacttgctcctctgcgagcatctctggtgcccatggaacactgcataacccgtttctttgaggagtgtgaccccaacaaggataagcacatcaccctgaaggagtggggccactgctttggaattaaagaagaggacatagatgaaaatctcttgttttgaacgaagattttaaagaactcaactttccagcatcctcctctgttctaaccacttcagaaatatatgcagctgtgatacttgtagatttatatttagcaaaatgttagcatgtatgacaagacaatgagagtaattgcttgacaacaacctatgcaccaggtatttaacattaactttggaaacaaaaatgtacaattaagtaaagtcaacatatgcaaaatactgtacattgtgaacagaagtttaattcatagtaatttcactctctgcattgacttatgagataatt

SEQ ID NO: 4477 - DNA, 1968 bp, Homo sapiens
acaattccctgagatctcccaggtggcagctgcctccccaagacaggctgcactcaaactgtaccatgtgtctgactccgaggggaatctggtggtgagggaagtcgccacacggccactgacacaggacctgctcagtcacgaggactgttacatcctggaccaggggggcctgaagatctacgtgtggaaagggaagaaagccaatgagcaggagaagaagggagccatgagccatgcgctgaacttcatcaaagccaagcagtacccaccaagcacacaggtggaggtgcagaatgatggggctgagtcggccgtctttcagcagctcttccagaagtggacagcgtccaaccggacctcaggcctaggcaaaacccacactgtgggctccgtggccaaagtggaacaggtgaagttcgatgccacatccatgcatgtcaagcctcaggtggctgcccagcagaagatggtagatgatgggagtggggaagtgcaggtgtggcgcattgagaacctagagctggtacctgtggattccaagtggctaggccacttctatgggggcgactgctacctgctgctctacacctacctcatcggcgagaagcagcattacctgctctacgtttggcagggcagccaggccagccaagatgaaattacagcatcagcttatcaagccgtcatcctggaccagaagtacaatggtgaaccagtccagatccgggtcccaatgggcaaggagccacctcatcttatgtccatcttcaagggacgcatggtggtctaccagggaggcacctcccgaactaacaacttggagaccgggccctccacacggctgttccaggtccagggaactggcgccaacaacaccaaggcctttgaggtcccagcgcgggccaatttcctcaattccaatgatgtctttgtcctcaagacccagtcttgctgctatctatggtgtgggaagggttgtagcggggacgagcgggagatggccaagatggttgctgacaccatctcccggacggagaagcaagtggtggtggaagggcaggagccagccaacttctggatggccctgggtgggaaggccccctatgccaacaccaagagactacaggaagaaaacctggtcatcaccccccggctctttgagtgttccaacaagactgggcgcttcctggccacagagatccctgacttcaatcaggatgacttggaagaggatgatgtgttcctactagacgtctgggaccaggtcttcttctggattgggaaacatgccaacgaggaggagaagaaggccgcagcaaccactgcacaggaatacctcaagacccatcccagcgggcgtgaccctgagacccccatcattgtggtgaagcagggacacgagccccccaccttcacaggctggttcctggcttgggatcccttcaagtggagtaacaccaaatcctatgaggacctgaaggcggagcttggcaactctagggactggagccagatcactgctgaggtcacaagccccaaagtggacgtgttcaatgctaacagcaacctcagttctgggcctctgcccatcttccccctggagcagctagtgaacaagcctgtagaggagctccccgagggtgtggaccccagcaggaaggaggaacacctgtccattgaagatttcactcaggcctttgggatgactccagctgccttctctgctctgcctcgatggaagcaacaaaacctcaagaaagaaaaaggactattttgagaagagtagctgtggttgtaaagcagtaccctaccctgattgtagggtctcattttctcaccgatattagtcctacaccaattgaagtgaaattttgcagatgtgcctatgagcacaaacttctgtggcaaatgccagttttgtttaataatgtacctattccttcagaaagatgataccccaaaagg

SEQ ID NO: 4478 - DNA, 1175 bp, Homo sapiens
aaaaaacttttttttttattcttgtctgttctgcctcactcccgagctctactgactcccaacagagcgcccaagaagaaaatggccataagtggagtccctgtgctaggatttttcatcatagctgtgctgatgagcgctcaggaatcatgggctatcaaagaagaacatgtgatcatccgggccgagttctatctgaatcctgaccaatcaggcgagtttatgtttgactttgatggtgatgagattttccatgtggatatggcaaagaaggagacggtctggcggcttgaagaatttggacgatttgccagctttgaggctcaaggtgcattggccaacatagctgtggacaaagccaacctggaaatcatgacaaagcgctccaactatactccgatcaccaatgacaagttcaccccaccagtggtcaatgtcacgtggcttcgaaatggaaaacctgtcaccacaggagtgtcagagacagtcttcctgcccagggaagaccaccttttccgcaagttccactatctccccttcctgccctcaactgaggacgtttacgactgcagggtggagcactggggcttggatgagcctcttctcaagcactgggagtttgatgctccaagccctctcccagagactacagagaacgtggtgtgtgccctgggcctgactgtgggtctggtgggcatcattattgggaccatcttcatcatcaagggattgcgcaaaagcaatgcagcagaacgcagggggcctctgtaaggcacatggaggtgatggtgtttcttagagagaagatcactgaagaaacttctgctttaatggctttacaaagctggcaatattacaatccttgacctcagtgaaagcagtcatcttcagcattttccagccctatagccaccccaagagtggttatgcctcctcgattgctccatactctaacatctagctggcttccctgtctattgccttttcctgtatctattttcctctatttcctatcattttattatcaccatgcaatgcctctggaataaaacatacaggagtctgtctctgctatggaatgccccatggggcatctcttgtgtacttattgtttaaggtttcctcaaactgtgatttttctgaacacaataaactattttgaagatcttgggtgg

SEQ ID NO: 4479 - DNA, 1360 bp, Homo sapiens
attcttctggacttggagtgtataccatttaaaggtgtgcggcgggtctctgttcacatggctcaactggaaacctgtttcatgaacaagcttactcaggaaccatctggtggtattccagcacattgttcttcagggggacgactctaagtcgctttgtggtggcagcagcttagaatcagtatttgtggttgggaaagatggacttacgggagcttggtaatgcaggtggtgaaggagcaggttatgagagcacttacaaccaagcctagctccctggaccagttcaagagcaaactgcagaacctgagctacactgagatcctgaaaatccgccagtccgagaggatgaaccaggaagatttccagtcccgcccgattttacaagttttggtattgtcggctttcgccaaatcacaaagtcctgcattacggagacttagaagagagtcctcagggagaagtgccccacgattccttgcaggacaaactgccggtggcagatatcaaagccgtggtgacgggaaaggactgccctcatatgaaagagaaaggtgcccttaaacaaaacaaggaggtgcttgaactcgctttctccatcttgtatgactcaaactgccaactgaacttcatcgctcctgacaagcatgagtactgtatctggacggatggactgaatgcgctactcgggaaggacatgatgagcgacctgacgcggaatgacctggacaccctgctcagcatggaaatcaagctccgcctcctggacctggaaaacatccagatccctgacgcacctccgccgattcccaaggagcccagcaactatgacttcgtctatgactgtaactgaagtggccgggcccagacatgccccttccaaaactggaacacctagctaacaggagagaggaatgaaaacacacccacgccttggaaccgtcctttggtaaagggaagctgtgggtccacattcccttcagcatcacctctagccctggcaactttcagcccctagctggcatcttgctcaccgccctgattctgttcctcggctccactgcttcaggtcacttcccatggctgcagtccactggtgggacaagagcaaagcccactgccagtaagaaggccaaagggcccttccatcctagccctctgcaggcatgcccttccttcccttgggcaggaaagccagcagccccagactgcccaaaaacttgcccaccagaccaagggcagtgccccaaggcccctgtctggaggaaatggcctagctatttgatgagaagaccaaaccccacatcctcctttcccctctctctagaatcatctcgcaccaccagttacacttgaatta

SEQ ID NO: 4480 - DNA, 1617 bp, Homo sapiens
actgcagctctcttcattctgccaaccttttccaactccatgatgatcctgcaggtttcagggggcccctggacagtggctctgacagcattactgatggtgctgctcatatctgtggtccagagcagggccactccagagaattccgtctaccaggaacggcaggaatgctatgcgttcaatgggactcagcgcgttgtggacgggctcatctacaaccgggaggaatacgtgcattttgacagcgcagtgggggagttcctagcagtgatggagctggggcggcccataggcgagtacttcaatagccagaaggactttatggaacggaagcgagccgaggtggacaaggtgtgcagacacaagtacgagctgatggagccactcatccggcagcgccgaggccacaagtgccagcagctgcacagatacttctctgtttagccagtaagtaatctacagcaatcctactattaagcataactttcacaaaagaatgtaaaatctgttgtgtaaccatagcccttacagtagactctgtttagagcctctcatgagggatacatttctaatcattgcctgttttactccaaatcatggtaaaaaggacctaaggaacaatgcccttctagaagactgaaggcctcctggcaatgttctctttaacccatgatgtggaataggggagtgaatcaatgttctgtttctgactgattatgaggcaacctatgtaccattaaaatttctcacctacactgggccttcatctttcatctatcaaggtgtgaggttatccatgtataaggctggctgcaaaacccttcaccaataaaagtatacctactccatgagtgcacacaacagacccccttttcacttctactgttcatagaggcataagcaagggaaaaagtactcaaagataagagcctccatatagcagagaagtcttgatctgtgatcttggtaaaagctgttcacatcaaggataccatcttcttctagggagaaacttccctggttagctttaccttacgggttccaatgggtgtatatttccaagaatgtggagggatccttctcagttgtgagattatgaagccaaggttcatggttctgatgtttgctgcagtgtggatggcaagggcagtctttctctgatgttctcagaagatccaatcttcaggttctagattgtgaaggggttgattgtcctcagtcagtgaaccataaaaagctttctttacctggtgaaaatacactgtgaaataataatctactgttataacatcagttcacttgtataggaaagcttttacacaaccagaaaacatgcattgaaaatgacaattgactgaaatctcttcataaatgtttaaacggctcatgaggtagcagaatgtacctgaagctttgattgtcttcccaggaatatgggtttggcaaaccaaacattggtcataaactattttagcaatttagaagtcaccacaccaatatgcatttaacttgggtcattttatcttttccatgatgagtcatggaatgcagaactttaaattataaaagctttaaaagctcaggaaggataaggcagccaccttggttctccatgag

SEQ ID NO: 4481 - DNA, 1415 bp, Homo sapiens
ctctgctttggactgaagcactgcaggagtttgtgaccaagaacttcaagagtcaagacagaaggaagccaagggagcagtgcaatggatttctcagtaaaggtagacatagagaaggaggtgacctgccccatctgcctggagctcctgacagaacctctgagcctagattgtggccacagcttctgccaagcctgcatcactgcaaagatcaaggagtcagtgatcatctcaagaggggaaagcagctgtcctgtgtgtcagaccagattccagcctgggaacctccgacctaatcggcatctggccaacatagttgagagagtcaaagaggtcaagatgagcccacaggaggggcagaagagagatgtctgtgagcaccatggaaaaaaactccagatcttctgtaaggaggatggaaaagtcatcttggacaatgaggagcagagagagctgcaaaagctggaggaaggtgaggtgaatgtgctggacaacctggcagcagctacagaccagctggtccagcagaggcaggatgccagcacgctcatctcagatctccagcggaggttgacgggatcgtcagtagagatgctgcaggatgtgattgacgtcatgaaaaggagtgaaagctggacattgaagaagccaaaatctgtttccaagaaactaaagagtgtattccgagtaccagatctgagtgggatgctgcaagttcttaaagagctgacagatgtccagtactactgggtggacgtgatgctgaatccaggcagtgccacttcgaatgttgctatttctgtggatcagagacaagtgaaaactgtacgcacctgcacatttaagaattcaaatccatgtgatttttctgcttttggtgtcttcggctgccaatatttctcttcggggaaatattactgggaagtagatgtgtctggaaagattgcctggatcctgggcgtacacagtaaaataagtagtctgaataaaaggaagagctctgggtttgcttttgatccaagtgtaaattattcaaaagtttactccagatatagacctcaatatggctactgggttataggattacagaatacatgtgaatataatgcttttgaggactcctcctcttctgatcccaaggttttgactctctttatggctgtgcctccctgtcgtattggggttttcctagactatgaggcaggcattgtctcatttttcaatgtcacaaaccacggagcactcatctacaagttctctggatgtcgcttttctcgacctgcttatccgtatttcaatccttggaactgcctagtccccatgactgtgtgcccaccgagctcctgagtgttctcattcctttacccacttctgcatagtagcccttgtgctgagactcagattctgcacctgag

SEQ ID NO: 4482 - DNA, 976 bp, Homo sapiens
tttattcttgtctgttctgcctcactcccgagctctactgactcccaaaagagcgcccaagaagaaaatggccataagtggagtccctgtgctaggatttttcatcatagctgtgctgatgagcgctcaggaatcatgggctatcaaagaagaacatgtgatcatccaggccgagttctatctgaatcctgaccaatcaggcgagtttatgtttgactttgatggtgatgagattttccatgtggatatggcaaagaaggagacggtctggcggcttgaagaatttggacgatttgccagctttgaggctcaaggtgcattggccaacatagctgtggacaaagccaacctggaaatcatgacaaagcgctccaagccctctcccagagactacagagaacgtggtgtgtgccctgggcctgactgtgggtctggtgggcatcattattgggaccatcttcatcatcaagggagtgcgcaaaagcaatgcagcagaacgcagggggcctctgtaaggcacatggaggtgatggtgtttcttagagagaagatcactgaagaaacttctgctttaatgactttacaaagctggcaatattacaatccttgacctcagtgaaagcagtcatcttcagcgttttccagccctatagccaccccaagtgtggttatgcctcctcgattgctccgtactctaacatctagctggcttccctgtctattgccttttcctgtatctattttcctctatttcctatcattttattatcaccatgcaatgcctctggaataaaacatacaggagtctgtctctgctatggaatgccccatggggcatctcttgtgtacttattgtttaaggtttcctcaaactgtgatttttctgaacacaataaactattttgatgatcttgggtggaaaaaaaaaaaaaaaaaaaaaaaaaaaaaaaaaaaaaaaaaaaaaaaaaaaaaaaag

SEQ ID NO: 4483 - DNA, 2628 bp, Homo sapiens
cagcaaacccggcctcaccttttcctgcccgaagcagaagattctcgcagtcctggtttctccctccagaagaccccccacccaaatcctctgtagctcctggtagtgccctgacccctgctgccaccgtccttcagagagcaacggaagagcttcccggagggcgaggaaaagagggaaagtagccagcaatgtcgaacgcaatgtataataagatgtggcatcagacccaagaagccctcggtgctttactcgataaagagcctcagaagatgattgaaccacaaagaaatcaggttttcatctttcaaacattagccaccttctacgtaaagtatgtgcagatctttagaaacctagagaatgtctacgaccagttcgtccacccccagaaacgaataccgatcaggaaagtcctggacggggtgatgggccgcatcctggagctgaagaacgagatggtggagctggaactcacggagttccattatttcgatgatatcctgcaggatctcaagctggccccccaacaattagatattcccatacccaagtattttttgaaggagaagttggaagtaataaaaggaagagagaaaattcttgctcaaatattagcggacagcggaatagatacatctgacatgaaataccctgtaaagagtatccctttcgatgaggctgttaaattaatccagattgctgagagggcacggcaaggtcgcctaagggctttattcatgaagcaaatctatctgcaagaatatagagcaaagcaatccaagatgcttggcaagaaagtgacagatacctgggctgctgcactccgcattcagaaggtttggcgacgtttccatcaacgtaaggaaactgaaaaactgagagaagaggagatgatcttcctgggtatgaatccacctcctctctttaatgaagtcagtgctacagtaatccaggctgaaaaggtggaccgcctgcggaatgaggtgcagataaagcatgaagaggactacagggaagccctggttaccatcaagaatgacctaaagttgatagaaggcgtggatatcaaggagaaccttcaagaccagatccggcattggttcatcgaatgcagaaatttaaccgggacatttcctgactaccctgacgttgaagaaggagggtcagctattattttttctgacaagaccatacaacaggaagaagacgaaaaatggaaaatgtcaccaagtctttttcttcctgcaatgaaggaaggatgtaacgcatacaaagaaatctggatgaaaaaagatgagtcttggaatttctctcaggactatgatccagaactgatcaaagaggagaaacgaaaagaattacagtcagagatcaggatacaggttgatgagttgatgagacaggaacttaaaaacttaaagctagctgtggacagagaaagggagcgcccagtgaaagcaggaaagaaaaaggacaagaaaggaaagaaaggcaaaaagaaagagaagaaggcaaagaaggataaagatctgacagctgacaggaccatcgagtctctgtataaggaactggtggaagaaggattactgatccaggctctgaaagtcaacctctctgattacattggtgagtacagctacctggggactactcttcgccaggtgtccatagaacccatgccctccctcctggatgtcagacagctcatcacattgtacggaatctggccattaggttctgcagcagtgcatgagaaagctcctttggtgaaatcgctactgttagccgggccgtctggggtagggaagaaaatgctggtccatgccatctgcaccgaaacgggagccaacctcttcaacttgtcctcctctaacattgctgggaaataccctggcaaaaatggcctccaaatgatgctgcatgcagtcttcaaggtggctcgacagctccagccctccgtggtgtggattgaagacacagaaaaaaccttctacaaaaaagttcccaacgcagaaaagatgaatgaacctaaacgcctgaaaaaacaccttccccaaatcctgaaactcctgaaaccagatgaccggattctgattgtggggaccacacggcgtcccttcgatgctgaactccaatctttctgcaaagtttaccagaaaattattttggtgcccagaccagactatgcttccagatacgttctgtggaagcaaatcattgaacgcaatggaggagtcctcaccagtgccttgaatgtcagctgcctggcgaaggtcactgacggcttcacccaaggacatatagtcgaagtggttaaaggcgtgctcacagatcagagaatccggcggcaaattcataaacctctcactgcagttgagtttattacggcgataaccagcatgaatccagtgtacaaagaggaagaagagagctttaagaactggtatgccaaaactcctctgggtaaaaaacgtgccttggcgataacaggaggcagcacagaaaaggcaaaggacaaagggaaaaggaaataaaagaaagagaaaaaggcaaaaaagaaaaagtaatgcctttctgaagaaccatgcttgagtctctctgggatggagaggaccccaactcgcc

SEQ ID NO: 4484 - DNA, 994 bp, Homo sapiens
gactttaaaaaatttaaatttcagcactcgatataagttttatttctatgcacaaacatcagcaggatcaggaagtcaaattacagaggaagcagtaacaactgtggatgaaggtaagatggcgatggcaagccggcaggtggatattgcaactcagggctggttcattggtctgatgtgtgctgttgctctccttatcttaattttgctgattgtttgcttcatcagaagaaacaagggtggtaaatatccagttaaagaaaaggaagatgcccatgctgaccctgaaatccagcctatgaaggaagatgatgggacatttggagaatacagtgatgcagaagaccacaagcctttgaaaaaaggaagtcgaactccttcagacaggactgtgaaaaaagaagatagtgacgacagcctagttgactatggagaaggggttaatggccagttcaatgaggatggctcctttattggacaatacagtggtaagaaagagaaagagccggctgaaggaaacgaaagctcagaggcaccttctcctgtcaacgccatgaattcctttgtttaatttttaagctctttgccaatattccatttctctagaatgtttatcctaagcacttgtttgtcagccctctcatactatgaacatatgggtagagagtatattttctgctgtatgttagtattatgagaatagttacagcaaaaacataactcagtcaaatgatatgttaatatgaactggaatgcaaagtgcatactttttcattcaaaatgggtattcttgatttcctcagaactgataaaaaataatgcaacatcaccaacagatcctgttatttcctctgcaggatacagttcaatatgatgcatgaaaaatgctccacatttaaaggacatacccgtgtatgttatgaaaacatggtttgatactttgtttatactaccctcagctgaacccctatatatgaattccgttttcattgtc

SEQ ID NO: 4485 - DNA, 2254 bp, Homo sapiens
gggctttaaaagtttactcgggccgggacgcagggcaaagcgagccatggctgtctacgtcgggatgctgcgcctggggaggctgtgcgccgggagctcgggggtgctgggggcccgggccgccctctctcggagttggcaggaagccaggttgcagggtgtccgcttcctcagtgcaaggggtgggatggaagctggcaggcagaggatttcagttcccagtagcttcactgcctctgcagcagcacattccagagaggtggatcgcatggtctccacgcccatcggaggcctcagctacgttcaggggtgcaccaaaaagcatcttaacagcaagactgtgggccagtgcctggagaccacagcacagagggtcccagaacgagaggccttggtcgtcctccatgaagacgtcaggttgacctttgcccaactcaaggaggaggtggacaaagctgcttctggcctcctgagcattggcctctgcaaaggtgaccggctgggcatgtggggacctaactcctatgcatgggtgctcatgcagttggccaccgcccaggcgggcatcattctggtgtctgtgaacccagcctaccaggctatggaactggagtatgtcctcaagaaggtgggctgcaaggcccttgtgttccccaagcaattcaagacccagcaatactacaacgtcctgaagcagatctgtccagaagtggagaatgcccagccaggggccttgaagagtcagaggctcccagatctgaccacagtcatctcggtggatgcccctttgccggggaccctgctcctggatgaagtggtggcggctggcagcacacggcagcatctggaccagctccaatacaaccagcagttcctgtcctgccatgaccccatcaacatccagttcacctcggggacaacaggcagccccaagggggccaccctctcccactacaacattgtcaacaactccaacattttaggagagcgcctgaaactgcatgagaagacaccagagcagttgcggatgatcctgcccaaccccctgtaccattgcctgggttccgtggcaggcacaatgatgtgtctgatgtacggtgccaccctcatcctggcctctcccatcttcaatggcaagaaggcactggaggccatcagcagagagagaggcaccttcctgtatggtacccccacgatgttcgtggacattctgaaccagccagacttctccagttatgacatctcgaccatgtgtggaggtgtcattgctgggtcccctgcacctccagagttgatccgagccatcatcaacaagataaatatgaaggacctggtggttgcttatggaaccacagagaacagtcccgtgacattcgcgcacttccctgaggacactgtggagcagaaggcagaaagcgtgggcagaattatgcctcacacggaggcccggatcatgaacatggaggcagggacgctggcaaagctgaacacgcccggggagctgtgcatccgagggtactgcgtcatgctgggctactggggtgagcctcagaagacagaggaagcagtggatcaggacaagtggtattggacaggagatgtcgccacaatgaatgagcagggcttctgcaagatcgtgggccgctctaaggatatgatcatccggggtggtgagaacatctaccccgcagagctcgaggacttctttcacacacacccgaaggtgcaggaagtgcaggtggtgggagtgaaggacgatcggatgggggaagagatttgtgcctgcattcggctgaaggacggggaggagaccacggtggaggagataaaagctttctgcaaagggaagatctctcacttcaagattccgaagtacatcgtgtttgtcacaaactaccccctcaccatttcaggaaagatccagaaattcaaacttcgagagcagatggaacgacatctaaatctgtgaataaagcagcaggcctgtcctggccggttggcttgactctctcctgtcagaatgcaacctggctttatgcacctagatgtccccagcacccagttctgagccaggcacatcaaatgtcaaggaattgactgaacgaactaagagctcctggatgggtccgggaactcgcctgggcacaaggtgccaaaaggcaggcagcctgcccaggccctccctcctgtccatcccccacattcccctgtctgtccttgtgatttggcataaagagcttctgttttctttggc

SEQ ID NO: 4486 - DNA, 2153 bp, Homo sapiens
ggtgggcccgctgctggtgtgcagggctggtgccttgggtgcagatggcaagcagaaaggggtggataaagaattctttcttctcttcactgtgttggatgagaacaagagctggtacagcaatgccaatcaagcagctgctatgttggatttccgactgctttcagaggatattgagggcttccaagactccaatcggatgcatgccattaatgggtttctgttctctaacctgcccaggctggacatgtgcaagggtgacacagtggcctggcacctgctcggcctgggcacagagactgatgtgcatggagtcatgttccagggcaacactgtgcagcttcagggcatgaggaagggtgcagctatgctctttcctcatacctttgtcatggccatcatgcagcctgacaaccttgggacatttgagatttattgccaggcaggcagccatcgagaagcagggatgagggcaatctataatgtctcccagtgtcctggccaccaagccacccctcgccaacgctaccaagctgcaagaatctactatatcatggcagaagaagtagagtgggactattgccctgaccggagctgggaacgggaatggcacaaccagtctgagaaggacagttatggttacattttcctgagcaacaaggatgggctcctgggttccagatacaagaaagctgtattcagggaatacactgatggtacattcaggatccctcggccaaggactggaccagaagaacacttgggaatcttgggtccacttatcaaaggtgaagttggtgatatcctgactgtggtattcaagaataatgccagccgcccctactctgtgcatgctcatggagtgctagaatctactactgtctggccactggctgctgagcctggtgaggtggtcacttatcagtggaacatcccagagaggtctggccctgggcccaatgactctgcttgtgtttcctggatctattattctgcagtggatcccatcaaggacatgtatagtggcctggtggggcccttggctatctgccaaaagggcatcctggagccccatggaggacggagtgacatggatcgggaatttgcattgttgttcttgatttttgatgaaaataagtcttggtatttggaggaaaatgtggcaacccatgggtcccaggatccaggcagtattaacctacaggatgaaactttcttggagagcaataaaatgcatgcaatcaatgggaaactctatgccaaccttaggggtcttaccatgtaccaaggagaacgagtggcctggtacatgctggccatgggccaagatgtggatctacacaccatccactttcatgcagagagcttcctctatcggaatggcgagaactaccgggcagatgtggtggatctgttcccagggacttttgaggttgtggagatggtggccagcaaccctgggacatggctgatgcactgccatgtgactgaccatgtccatgctggcatggagaccctcttcactgttttttctcgaacagaacacttaagccctctcaccgtcatcaccaaagagactgaaaaagcagtgccccccagagacattgaagaaggcaatgtgaagatgctgggcatgcagatccccataaagaatgttgagatgctggcctctgttttggttgccattagtgtcacccttctgctcgttgttctggctcttggtggagtggtttggtaccaacatcgacagagaaagctacgacgcaataggaggtccatcctggatgacagcttcaagcttctgtctttcaaacagtaacatctggagcctggagatatcctcaggaagcacatctgtagtgcactcccagcaggccatggactagtcactaaccccacactcaaaggggcatgggtggtggagaagcagaaggagcaatcaagcttatctggatatttctttctttatttattttacatggaaataatatgatttcactttttctttagtttctttgctctacgtgggcacctggcactaagggagtaccttattatcctacatcgcaaatttcaacagctacattatatttccttctgacacttggaaggtattgaaatttctagaaatgtatccttctcacaaagtagag

SEQ ID NO: 4487 - DNA, 1768 bp, Homo sapiens
gctaatgcatgttttccagggtcgctcctggcttcgtaccccttatttgacactgacatgcccccccaccccccgttgtgtctcctctcccagatgctcaaggtgtcagccgtactgtgtgtgtgtgcagccgcttggtgcagtcagtctctcgcagctgccgcggcggtggctgcagccggggggcggtcggacggcggtaattttctggatgataaacaatggctcaccacaatctctcagtatgacaaggaagtcggacagtggaacaaattccgagacgatgattatttccgcacttggagtccaggaaaacccttcgatcaggctttagatccagctaaggatccatgcttaaagatgaaatgtagtcgccataaagtatgcattgctcaagattctcagactgcagtctgcattagtcaccggaggcttacacacaggatgaaagaagcaggagtagaccataggcagtggaggggtcccatattatccacctgcaagcagtgcccagtggtctatcccagccctgtttgtggttcagatggtcatacctactcttttcagtgcaaactagaatatcaggcatgtgtcttaggaaaacagatctcagtcaaatgtgaaggacattgcccatgtccttcagataagcccaccagtacaagcagaaatgttaagagagcatgcagtgacctggagttcagggaagtggcaaacagattgcgggactggtccaaggcccttcatgaaagtggaagtcaaaacaagaagacaaaaacattgctgaggcctgagagaagcagattcgataccagcatcttgccaatttgcaaggactcacttggctggatgtttaacagacttgatacaaactatgacctgctattggaccagtcagagctcagaagcatttaccttgataagaatgaacagtgtaccaaggcattcttcaattcttgtgacacatacaaggacagtttaatatctaataatgagtggtgctactgcttccagagacagcaagacccaccttgccagactgagctcagcaatattcagaagcggcaaggggtaaagaagctcctaggacagtatatccccctgtgtgatgaagatggttactacaagccaacacaatgtcatggcagtgttggacagtgctggtgtgttgacagatatggaaatgaagtcatgggatccagaataaatggtgttgcagattgtgctatagattttgagatctccggagattttgctagtggcgattttcatgaatggactgatgatgaggatgatgaagacgatattatgaatgatgaagatgaaattgaagatgatgacgaagatgaaggggatgatgatgatggtggtgatgaccatgatgtatacatttgattgatgacagttgaaatcaataaattctacatttctaatatttacaaaaatgatagcctatttaaaattatcttcttccccaataacaaaatgattctaaacctcacatatattttgtataattatttgaaaaattgcagctaaagttatagaactttatgtttaaataagaatcatttgctttgagtttttatattccttacacaaaaagaaaatacatatgcagtctagtcagacaaaataaagttttgaagtgctactataataaatttttcacgagaacaaactttgtaaatcttccataagcaaaatgacagctagtgcttgggatcgtacatgttaattttttgaaagataattctaagtgaaattt

SEQ ID NO: 4488 - DNA, 3647 bp, Homo sapiens
gcttgctgctccagccttgccctcccagagctgccggacgctcgcgggtctcggaacgcatcccgccgcgggggcttcggccgtggcatgggcgccgcgggcctgctcggggttttcttggctctcgtcgcaccgggggtcctcgggatttcttgtggctctcctccgcctatcctaaatggccggattagttattattctacccccattgctgttggtaccgtgataaggtacagttgttcaggtaccttccgcctcattggagaaaaaagtctattatgcataactaaagacaaagtggatggaacctgggataaacctgctcctaaatgtgaatatttcaataaatattcttcttgccctgagcccatagtaccaggaggatacaaaattagaggctctacaccctacagacatggtgattctgtgacatttgcctgtaaaaccaacttctccatgaacggaaacaagtctgtttggtgtcaagcaaataatatgtgggggccgacacgactaccaacctgtgtaagtgttttccctctcgagtgtccagcacttcctatgatccacaatggacatcacacaagtgagaatgttggctccattgctccaggattgtctgtgacttacagctgtgaatctggttacttgcttgttggagaaaagatcattaactgtttgtcttcgggaaaatggagtgctgtcccccccacatgtgaagaggcacgctgtaaatctctaggacgatttcccaatgggaaggtaaaggagcctccaattctccgggttggtgtaactgcaaactttttctgtgatgaagggtatcgactgcaaggcccaccttctagtcggtgtgtaattgctggacagggagttgcttggaccaaaatgccagtatgtgaagaaattttttgcccatcacctccccctattctcaatggaagacatataggcaactcactagcaaatgtctcatatggaagcatagtcacttacacttgtgacccggacccagaggaaggagtgaacttcatccttattggagagagcactctccgttgtacagttgatagtcagaagactgggacctggagtggccctgccccacgctgtgaactttctacttctgcggttcagtgtccacatccccagatcctaagaggccgaatggtatctgggcagaaagatcgatatacctataacgacactgtgatatttgcttgcatgtttggcttcaccttgaagggcagcaagcaaatccgatgcaatgcccaaggcacatgggagccatctgcaccagtctgtgaaaaggaatgccaggcccctcctaacatcctcaatgggcaaaaggaagatagacacatggtccgctttgaccctggaacatctataaaatatagctgtaaccctggctatgtgctggtgggagaagaatccatacagtgtacctctgagggggtgtggacaccccctgtaccccaatgcaaagtggcagcgtgtgaagctacaggaaggcaactcttgacaaaaccccagcaccaatttgttagaccagatgtcaactcttcttgtggtgaagggtacaagttaagtgggagtgtttatcaggagtgtcaaggcacaattccttggtttatggagattcgtctttgtaaagaaatcacctgcccaccaccccctgttatctacaatggggcacacaccgggagttccttagaagattttccatatggaaccacggtcacttacacatgtaaccctgggccagaaagaggagtggaattcagcctcattggagagagcaccatccgttgtacaagcaatgatcaagaaagaggcacctggagtggccctgctcccctgtgtaaactttccctccttgctgtccagtgctcacatgtccatattgcaaatggatacaagatatctggcaaggaagccccatatttctacaatgacactgtgacattcaagtgttatagtggatttactttgaagggcagtagtcagattcgttgcaaagctgataacacctgggatcctgaaataccagtttgtgaaaaaggctgccagtcacctcctgggctccaccatggtcgtcatacaggtggaaatacggtcttctttgtctctgggatgactgtagactacacttgtgaccctggctatttgcttgtgggaaacaaatccattcactgtatgccttcaggaaattggagtccttctgccccacggtgtgaagaaacatgccagcatgtgagacagagtcttcaagaacttccagctggttcacgtgtggagctagttaatacgtcctgccaagatgggtaccagttgactggacatgcttatcagatgtgtcaagatgctgaaaatggaatttggttcaaaaagattccactttgtaaagttattcactgtcaccctccaccagtgattgtcaatgggaagcacacaggcatgatggcagaaaactttctatatggaaatgaagtctcttatgaatgtgaccaaggattctatctcctgggagagaaaaaattgcagtgcagaagtgattctaaaggacatggatcttggagcgggccttccccacagtgcttacgatctcctcctgtgactcgctgccctaatccagaagtcaaacatgggtacaagctcaataaaacacattctgcatattcccacaatgacatagtgtatgttgactgcaatcctggcttcatcatgaatggtagtcgcgtgattaggtgtcatactgataacacatgggtgccaggtgtgccaacttgtatcaaaaaagccttcatagggtgtccacctccgcctaagacccctaacgggaaccatactggtggaaacatagctcgattttctcctggaatgtcaatcctgtacagctgtgaccaaggctacctgctggtgggagaggcactccttctttgcacacatgagggaacctggagccaacctgcccctcattgtaaagaggtaaactgtagctcaccagcagatatggatggaatccagaaagggctggaaccaaggaaaatgtatcagtatggagctgttgtaactctggagtgtgaagatgggtatatgctggaaggcagtccccagagccagtgccaatcggatcaccaatggaaccctcccctggcggtttgcagatcccgttcacttgctcctgtcctttgtggtattgctgcaggtttgatacttcttaccttcttgattgtcattaccttatacgtgatatcaaaacacagagaacgcaattattatacagatacaagccagaaagaagcttttcatttagaagcacgagaagtatattctgttgatccatacaacccagccagctgatcagaagacaaactggtgtgtgcctcattgcttggaattcagcggaatattgattagaaagaaactgctctaatatcagcaagtctctttatatggcctcaagatcaatgaaatgatgtcataagcgatcacttcctatatgcacttattctcaagaagaacatctttatggtaaagatgggagcccagtttcactgccatatactcttcaaggactttctgaagcctcacttatgagatgcctgaagccaggccatggctataaacaattacatggctct

SEQ ID NO: 4489 - DNA, 1378 bp, Homo sapiens; identical to SEQ ID NO: 1912

SEQ ID NO: 4490 - DNA, 1928 bp, Homo sapiens
agtagacttgaatatgcctctgggcaaagaagcagagctaacgaggaaagggatttaaagagtttttcttgggtgtttgtcaaacttttattccctgtctgtgtgcagaggggattcaacttcaatttttctgcagtggctctgggtccagccccttacttaaagatctggaaagcatgaagactgggctttttttcctatgtctcttgggaactgcagctgcaatcccgacaaatgcaagattattatctgatcattccaaaccaactgctgaaacggtagcacccgacaacactgcaatccccagtttaagggctgaagctgaagaaaatgaaaaagaaacagcagtatccacagaagacgattcccaccataaggctgaaaaatcatcagtactaaagtcaaaagaggaaaaccaagaacaacctagaaattattcacatcatcagttgaacaggagcagtaaacatagccaaggcctaagggatcaaggaaaccaagagcaggatccaaatatttccaatggagaagaggaagaagaaaaagagccaggtgaagttggtacccacaatgataaccaagaaagaaagacagaattgcccagggagcatgctaacagcaagcaggaggaagacaatacccaatctgatgatattttggaagagtctgatcaaccaactcaagtaagcaagatgcaggaggatgaatttgatcagggtaaccaagaacaagaagataactccaatgcagaaatggaagaggaaaatgcatcgaacgtcaataagcacattcaagaaactgaatggcagagtcaagagggtaaaactggcctagaagctatcagcaaccacaaagagacagaagaaaagactgtttctgaggctctgctcatggaacctactgatgatggtaataccacgcccagaaatcatggagttgatgatgatggcgatgatgatggcgatgatggcggcactgatggccccaggcacagtgcaagtgatgactacttcatcccaagccaggcctttctggaggccgagagagctcaatccattgcctatcacctcaaaattgaggagcaaagagaaaaagtacatgaaaatgaaaatataggtaccactgagcctggagagcaccaagaggccaagaaagcagagaactcatcaaatgaggaggaaacgtcaagtgaaggcaacatgagggtgcatgctgtggattcttgcatgagcttccagtgtaaaagaggccacatctgtaaggcagaccaacagggaaaacctcactgtgtctgccaggatccagtgacttgtcctccaacaaaaccccttgatcaagtttgtggcactgacaatcagacctatgctagttcctgtcatctattcgctactaaatgcagactggaggggaccaaaaaggggcatcaactccagctggattattttggagcctgcaaatctattcctacttgtacggactttgaagtgattcagtttcctctacggatgagagactggctcaagaatatcctcatgcagctttatgaagccaactctgaacacgctggttatctaaatgagaagcagagaaataaagtcaagaaaatttacctggatgaaaagaggcttttggctggggaccatcccattgaccttctcttaagggactttaagaaaaactaccacatgtatgtgtatcctgtgcactggcagtttagtgaacttgactaacaccctatggatagagtcttgacacattctgaacttgctcctctgcgagcatctctggtgcccatggaacactgcataacccgtttctttgaggagtgtgaccccaacaaggataagcacatcaccctgaaggagtggggccactgctttggaattaaagaagaggacatagatgaaaatctcttgttttgaacgaag

SEQ ID NO: 4491 - DNA, 1032 bp, Homo sapiens
gagtggacggctcgagacggcggcgcgtgcagcagctccagaaagcagcgagttggcagagcagggctgcatttccagcaggagctgcgagcacagtgctggctcacaacaagatgctcaaggtgtcagccgtactgtgtgtgtgtgcagccgcttggtgcagtcagtctctcgcagctgccgcggcggtggctgcagccggggggcggtcggacggcggtaattttctggatgataaacaatggctcaccacaatctcccagtatgacaaggaagtcggacagtggaacaaattccgagacgaagtagaggatgattatttccgcacttggagtccaggaaaacccttcgatcaggctttagatccagctaaggatccatgcttaaagatgaaatgtagtcgccataaagtatgcattgctcaagattctcagactgcagtctgcattagtcaccggaggcttacacacagtgcaaactagaatatcaggcatgtgtcttaggaaaacagatctcagtcaaatgtgaaggacattgcccatgtccttcagataagcccaccagtacaagcagaaatgttaagagagtactctgagtgctatggaaccctatcaagaaacaaagtttatttcattattgtgctatgattataagttaactgatttaaggaaaaagtattattgattaagaattaatgtatgccattttccaagtgacaaataatttagttttaacgtttaattttgtatgatggaatttttttatatcctctgaattatggaatggattttcaatgagaaacagattaacatcagtgtattaatatactcttgcaacatgcacgcttctccgtaactaatatagtgtattcataaatggtaagttcttctgtaattttgtttaattggagccatggaaaaataaaattaagtcagtttattggcaagtgttgcataattatttataataaaaattaagttttactcatttggattatttgaaatacattcttggattaaattaatgtgtctg

SEQ ID NO: 4492 - DNA, 1669 bp, Homo sapiens
aggacagcttggagatagggcccggaattgcgggcgtcactctgctcctgcgacctagccaggcgtgagggagtgacagcagcgcattcgcgggacgagagcgatgagtgagaacgccgcaccaggtctgatctcagagctgaagctggctgtgccctggggccacatcgcagccaaagcctggggctccctgcagggccctccagttctctgcctgcacggctggctggacaatgccagctccttcgacagactcatccctcttctcccgcaagacttttattacgttgccatggatttcggaggtcatgggctctcgtcccattacagcccaggtgtcccatattacctccagacttttgtgagtgagatccgaagagttgtggcagccttgaaatggaatcgattctccattctgggccacagcttcgctcttttgtcccccaggtggcgtcgtgggcggaatgtttttctgtaccttccccgagatggtggataaacttatcttgctggacacgccgctctttctcctggaatcagatgaaatggagaacttgctgacctacaagcggagagccatagagcacgtgctgcaggtagaggcctcccaggagccctcgcacgtgttcagcctgaagcagctgctgcagaggttactgaagagcaatagccacttgagtgaggagtgcggggagcttctcctgcaaagaggaaccacgaaggtggccacaggcagagaacagcattgacttcatcagcagggagctgtgtgcgcattccatcaggaagctgcaggcccatgtcctgttgatcaagtaagtctggacccatccccttcagccacccgccaaggagacatgggcgccaggaatctccgggagggggccctggcatgaggctccaagttctctgcgtgtcgaccacatcgctaaggctcaagatcttttttgggaagcccccctggcagcagggtcatggaaggaggaaggtcagaggaggggagggctcgggcagcaggggatgggccggggctgtcccatgcctttccacaggtgtcagcggggggcatgcccaggtaaggctccataaccagtgagcccagtctcggctgactgcaacctctgtctcctggattcaaacgattctcctgcctcagcctcccgagtagctgggactacaggcgcccgccaccaggcctggcttatttttgtatttttagtagagacgaggtttcgccatgttggccaggctgctctccatctcctgacctcatgatccgcccgcctcggcctcccagtgttgggattacaggcgtgagccaccgtgcgtggcccaccatagacgatttttaagccataaaaagaaacgaagcactgacacgggctccagcatggatgagcctttaaaacatcgcgctaagtggacgaattcagacacaaccgtctacgtgttgtatggctgcattcacgttcaagtcaagtccaaatagggcacactgcagagacaaagccagagcagtccacggatattttgattcaagacagaattactctgagaaggagtccctgtcgttcatgatagacacgatgaaatccaccctcaaagagcagttccagtttgtggaagtcccaggcaatcactgtgtccacatgagcgaaccccagcacgt

SEQ ID NO: 4493 - DNA, 1460 bp, Homo sapiens
atttttccagcaggagctgcgagcacagtgctggctcacaacaagatgctcaaggtgtcagccgtactgtgtgtgtgtgcagccgcttggtgcagtcagtctctcgcagctgccgcggcggtggctgcagccggggggcggtcggacggcggtaattttctggatgataaacaatggctcaccacaatctctcagtatgacaaggaagtcggacagtggaacaaattccgagactgcaaactagaatatcaggcatgtgtcttaggaaaacagatctcagtcaaatgtgaaggacattgcccatgtccttcagataagcccaccagtacaagcagaaatgttaagagagcatgcagtgacctggagttcagggaagtggcaaacagattgcgggactggttcaaggcccttcatgaaagtggaagtcaaaacaagaagacaaaaacattgctgaggcctgagagaagcagattcgataccagcatcttgccaatttgcaaggactcacttggctggatgtttaacagacttgatacaaactatgacctgctattggaccagtcagagctcagaagcatttaccttgataagaatgaacagtgtaccaaggcattcttcaattcttgtgacacatacaaggacagtttaatatctaataatgagtggtgctactgcttccagagacagcaagacccaccttgccagactgagctcagcaatattcagaagcggcaaggggtaaagaagctcctaggacagtatatccccctgtgtgatgaagatggttactacaagccaacacaatgtcatggcagtgttggacagtgctggtgtgttgacagatatggaaatgaagtcatgggatccagaataaatggtgttgcagattgtgctatagattttgagatctccggagattttgctagtggcgattttcatgaatggactgatgatgaggatgatgaagacgatattatgaatgatgaagatgaaattgaagatgatgatgaagatgaaggggatgatgatgatggtggtgatgaccatgatgtatacatttaattgatgacagttgaaatcaataaattctacatttctaatatttacaaaaatgatagcctatttaaaattatcttcttccccaataacaaaatgattctaaacctcacatatattttgtataattatttgaaaaattgcagctaaagttatagaactttatgtttaaataagaatcatttgctttgagtttttatattccttacacaaaaagaaaatacatatgcagtctagtcagacaaaataaagttttgaagtgctactataataagtttttcacgagaacaaactttgtaaatcttccataagcaaaatgacagctagtgcttgggatcgtacatgttaattttctgaaagataattctaagtgaaatttaaaataaataaatttttaatgacct

SEQ ID NO: 4494 - DNA, 1898 bp, Homo sapiens
ggtgctgcagggctgctcgtccatcgggctgcgcctggtgctcgagtacctctacacggccaacgtgaccctgtccctggacacggtggaggaggtgctgtcggtcagcaagatcctgcacatcccccaggtcaccaagctctgcgtgcagttcctcaacgaccagatctcggtgcagaactacaagcaggtgtgcaagatcgccgcgctgcacggcctggaggagaccaagaagctggccaacaagtacctggtggaggatgtgctgctgctcaacttcgaggagatgcgcgccctgctggactcgctgccgccccccgtggagtcggagctggcgctcttccagatgtccgtgctgtggctggagcacgaccgcgagacccgcatgcagtatgcgcctgacctcatgaagcgcctccgcttcgccctcatcccggccccggagctggtggagcgggtccagtcagtggatttcatgcgaaccgacccagtctgccagaagctgctgctggacgccatgaactaccacctgatgcccttcaggcagcactgcaggcagagcctggccagcagaattcgctctaacaagaaaatgctgttattggttggagggctgcctcctggaccggaccggctccccagcaatttggttcagtattacgacgatgaaaagaagacatggaaaatactcacaattatgccatacaacagtgcccaccactgcgttgtggaggtggaaaacttcttgttcgtgttgggtggagaggaccagtggaatccgaatggaaaacacagtacaaattttgtcagccgatatgatcctcgatttaatagctggattcaacttccacccatgcaggaaagaagagccagtttctatgcatgtcggttggacaagcatttatacgtaattggtggaaggaatgaaactggctacttgtccagcgtggagtgctataacctagaaacgaatgaatggcgctatgtgtcctctttgccacagcctctggcggctcatgcgggagcagtgcacaatgggaaaatatacatttcagggggtgtacacaatggagaatatgtcccatggctatattgctatgacccagtaatggatgtctgggctcgaaaacaagatatgaacacaaaacgtgcaattcacactttggctgtaatgaatgatcgcttgtatgcaattggaggaaatcatttgaaaggtttctcccaccttgatgtaatgcttgtggaatgctatgacccaaaaggtgaccagtggaatatactccaaactcccattttggagggtcgaagtggccctggctgtgcagtgcttgatgacagcatttaccttgtgggaggctacagctggagtatgggggcctacaagtcatctacaatatgctattgtccagagaaaggaacctggacagaactcgaaggagatgtagcagaaccgttggcaggccctgcctgtgtgacagttattctgccctcttgtgtaccatacaacaaataacaccaggaaactctggaatgaacagtatcacattctaggaagcaatggcaggtgacatcactattataataggaacaatgcattctaatggtacaactgccaaaacccacccttggtttctgatgatttataagtaactacaaaagaaagagacctgttcttgaacagatactatgtctataactcagatcgcaccaaacttcctgtggtgacagactcttccatttcagactggttttaacttatcccagctttacaaaaactcttcatgtgaatcttaacttgcaaaaggagaaagataaaatacagaagactggccccagagagacctcagatcagtattgtgcattgtagtctacctgcatgtgatctatgttgacatttc

SEQ ID NO: 4495 - DNA, 3529 bp, Homo sapiens
acacatactttgatgccaactacagcaagttgcaagaccatttctctgctgaaactcctttattctgttagtttgcagaattactctcctatgatggcacagaaatcacaaggatctgacaaccttcaggaaggccaggaaaagagcaagagagagatcctgaagtgcaccaaaagcgcgtgggatccgctggatgagtggctgccccctgaccctgaggaggaaagccagagtctcaccatccccatgctggaagattccaagcaagaaagtattcagcagtggctggactctggattctttgtctctgcaaatgaaaactttcaacaagtcattgaccgcactgtttctttgtatgaacaagggatggttcaaatgactgtgaaagactacatgagatctttgcatcagttttcagaaactcccatcctatccagagggaccagtttcaactcttgctattctactgcaagtgtaccacaaagcattcctgaatggctggaattttgggagatagatccagtggagattctcttggatctggggtttggtgctgatgagccagacatctgcatgcaaatcccagccagattccttggttgtggctcagcagccagaggaatcaacatccgtgtttttcttgaagctcaaaagcagcgaatggacattgagaaccccaacttgtacggtcgtttccgacagctggaaatcctggaccatgtgaccaatgccttctcatctctgctgagtgatgtcagcatcctgccaaacagagctgaagagaaagctggaggagagagtgtgcaaagaacctcagtgagtgccgccaaagagcatcgaagaagaatgggtaaactcttaaggagagcttccaaacagaacatcaggcgggattgtaacccagaggtatcagagtccttcaaggtgaaggatgaagtttttgtcccctttacaaaaccatgggattgtggagcagagctagcagcaacctcaatcaaccacaagcaaaatcatttgtctctgtcagtagaacatcagtctctccaagcctgtgatgatttgctaccttatcctcctcatggtcttctgagcaagcagtggccttgctcatctatgccggccaagcaggctcctccttcctgtgtgtctgaggggtcagtcaagggcagaactcagaaggagaacttatttcagactaacaagctcaagagcttgtctcgtcttgcaggcaaaggaccagactcatttgaaatggaagaggtccaaagctttgaagaagagactggtaatcctcttgacatgacttcaggaactgtaggtgccagggtggacagagcaaatagctgccagtctgacagcagcgggttcctggaggagccgctggaaccgctgcccctccagatgccttccttgccaaacagccagagtcctgctgagaatggaggtagaaagccaagagatcagagccacagcttagtatcatcccaggactgtcagctagagtcggatgggccagattccaaaagtagggcgagcatgtctttttcaagccaagaagtgaatgccttggaacaaagggcctcagtatctgtgatggaggaagagtttctgcttgaggccatggaggggccaccagagctgtatatcccagacatggcctgtgccaagaccaccacgaggggagaatgcccaaggaaagacagccatctgtggcagcttctgccaatgccccatgctgagtatgaggtcaccagacccacagccacttccaaatatgatcatcctctggggtttatggtaacccacgtcacagaaatgcaggacagttttgtgaggcctgagggagctggcaaagtgcaaagccaccacaatgagtctcaaaggtcacctggaaatgatcatactcaagacaagttccttcatgttgactctgaggccccacgagaagaggaaagcagtggattctgtcctcacaccaaccacagcttactcgtaccagaaagctcatcacagtgtatccccaagcacagtgaaatcacaccttatgcaactgaccttgctcaaacatctgaaaagctcattccccacctccataaactgcctggagatcctgcccaggtgaagtcaaggtctggtactttgggtcagatactacctgggacagaagctgagatggaaaaccttcctctaaatactggcagctccaggtctgtaatgacccagatgtcctccagcctggtgtcggctgctcagagggctgtggccttggggactggtcccagaggaacatctttagaatgcactgtgtgtgatcctgttaccgcaacagaaacaagactggggacaaaagcaagacagttaaatgatgcttccattcagacttcagctctaagcaacaagaccttgacacatgggccccagcccctcaccaaatccgtctctctagactcaggcttctctagtatctgcccaatgggcacctgccatgctatacctgcccactgctgcatctgctatcatcaccaccctcactgccacggggagaggcaaagccctggccctgaaccctcagtctgtaggcactgcctgtgttcactaactggtcaccaggaagcccagttcatgacgactttgaaagcccttcaggacactacagtgagggagctatgttcctgcacagtccatgagatggaagccatgaagacgatatgccaaagtttccgggagtatttagaagaaattgaacagcaccttatgggacagcaggccctcttttccagggacatgtcagaggaggaaagggaggaggccgagcaactgcaaacgttacgtgaggccctgaggcagcaggtggcagagttggaatttcagttaggagaccgggctcagcaaatcagagaagggattttactgcagctggaggttctcacagcagagccacctgaacactattcaaatctgcatcaatataactggatagaagaaagcaatgggcagacttcatgttctaaaatccacccaggcatggccccgaggactgtgtttcctcccgatgatggccaggaggctccctgttcaggtgaattattgtctgcagagctggatcccttttttttttcttcaaaagcaaataactctgctaaagatgaaaaaataaaatcaaaagactttctgaagacacaagactctggtctgttgtaattgtttttctttgttgagaaaataatcagtttccagagtataacacatgtcgaacaaaatagaacatttgtaaagaggttagagtatcaaagtggtgcccctttgagaagaaaaagttttagagtgttttcatgtggaatggtgggttgcatacgtaatttcaaattgtaatttaaaacaacaaattgttcatgatgtgcgagaattgtaggttattaaaagccttgttaaattgtttttcttgaaaattgagagaacaggaacagaagccaaaatatggacggcacctttctctagcccaaactcagcctctaattgcctgatctta

SEQ ID NO: 4496 - DNA, 1749 bp, Homo sapiens
atttccagcaggagctgcgagcacagtgctggctcacaacaagatgctcaaggtgtcagccgtactgtgtgtgtgtgcagccgcttggtgcagtcagtctctcgcagctgccgcggcggtggctgcagccggggggcggtcggacggcggtaattttctggatgataaacaatggctcaccacaatctctcagtatgacaaggaagtcggacagtggaacaaattccgagactaagaagaaaaacgattatttgacaggacagtagtgatgatcacacaagatcacatccacatgtcttctgggctcagtcaggatgattatttccgcacttggagtccaggaaaacccttcgatcaggctttagatccagctaaggatccatgcttaaagatgaaatgtagtcgccataaagtatgcattgctcaagattctcagactgcagtctgcattagtcaccggaggcttacacacaggatgaaagaagcaggagtagaccataggcagtggaggggtcccatattatccacctgcaagcagtgcccagtggtctatcccagccctgtttgtggttcagatggtcatacctactcttttcagtgcaaactagaatatcaggcatgtgtcttaggaaaacagatctcagtcaaatgtgaaggacattgcccatgtccttcagataagcccaccagtacaagcagaaatgttaagagagcatgcagtgacctggagttcagggaagtggcaaacagattgcgggactggttcaaggcccttcatgaaagtggaagtcaaaacaagaagacaaaaacattgctgaggcctgagagaagcagattcgataccagcatcttgccaatttgcaaggactcacttggctggatgtttaacagacttgatacaaactatgacctgctattggaccagtcagagctcagaagcatttaccttgataagaatgaacagtgtaccaaggcattcttcaattcttgtgacacatacaaggacagtttaatatctaataatgagtggtgctactgcttccagagacagcaagacccaccttgccagactgagctcagcaatattcagaagcggcaaggggtaaagaagctcctaggacagtatatccccctgtgtgatgaagatggttactacaagccaacacaatgtcatggcagtgttggacagtgctggtgtgttgacagatatggaaatgaagtcatgggatccagaataaatggtgttgcagattgtgctatagattttgagatctccggagattttgctagtggcgattttcatgaatggactgatgatgaggatgatgaagacgatattatgaatgatgaagatgaaattgaagatgatgatgaagatgaaggggatgatgatgatggtggtgatgaccatgatgtatacatttaattgatgacagttgaaatcaataaattctacatttctaatatttacaaaaatgatagcctatttaaaattatcttcttccccaataacaaaatgattctaaacctcacatatattttgtataattatttgaaaaattgcagctaaagttatagaactttatgtttaaataagaatcatttgctttgagtttttatattccttacacaaaaagaaaatacatatgcagtctagtcagacaaaataaagttttgaagtgctactataataagtttttcacgagaacaaactttgtaaatcttccataagcaaaatgacagctagtg

SEQ ID NO: 4497 - DNA, 4334 bp, Homo sapiens
attctgccccagctgatgtttgagccagcatgtcgcggaggaagcaagcgaagcctcaacatttccaatccgaccccgaagtggcctcgctcccccggcgagatggagacacagaaaagggtcaaccgagtcgccctactaagagcaaggatgcccacgtctgtggccggtgctgtgccgagttctttgaattatcagatcttctgctccacaagaagaactgtactaaaaatcaattagttttaatcgtaaatgaaaatccagcctccccacccgaaaccttctcccccagcccccctcctgataatcctgatgaacaaatgaatgacacagttaacaaaagcggcagccacagcagtaccgccccaagcagcagcagcagcagcagcagcagcagcggcggcggcggcagctcctccacaggtacctcagcgatcacaacctctctacctcaactcggggacctgacaacactgggcaacttctccgtaatcaacagcaacgtcatcatcgagaacctccagagcaccaaggtggcggtggcccagttctcccaggaagcgaggtgcggcggggcctctgggggcaagctggccgtcccagccctcatggaacaactcctagctctgcagcagcagcagatccaccagctgcaattgatcgaacagattcgtcaccaaatattgctgttggcttctcataatgcagacttgccaacatcttctagtccttctcaaggtactttacgaacatctgccaaccccttgtccacgctaagttcccatttatctcagcagctggcagcagcagctggattggcacagagcctcgccagccaatctgccagcattagtggtgtgaaacagctacccccaatccagctacctcagagcagttctggcaacaccatcattccatccaacagcggctcttctcccaatatgaacatattggcagcggcagttaccaccccgtcctctgaaaaagtggcttcaagtgctggggcctcccatgtcagcaacccagcggtctcatcatcgtcctcaccagcttttgcaataagcagtttattaagtcctgcgtctaatccacttctacctcagcaagcctccgctaactcggttttccccagccctttgcccaacatcggaacaactgcagaggatttaaactccttgtctgccttggcccagcaaagaaaaagcaagccaccaaatgtcactgcctttgaagcgaaaagtacttccgatgaggcattcttcaaacacaagtgcaggttctgcgcgaaggtctttgggagtgacagtgccttgcagatccacttgcgttcccataccggagagaggccattcaagtgcaacatctgcgggaacaggttctccaccaaggggaatctgaaagtccactttcagcgccacaaagagaaataccctcatatccagatgaacccctatcctgtgcctgagcatttggacaatatccccacgagtactggcatcccatatggcatgtccatccctccagagaagccagtcaccagctggctagacaccaaaccagtcctgcctactctgaccacttcagtcggcctgccgttgcccccaaccctcccaagcctcatacccttcatcaagacggaagagccagcccccatccccatcagccattctgccaccagccccccaggctcagtcaaaagtgactccgggggccctgagtcagccacaagaaacctaggtgggctcccagaggaagccgaagggtccactctgccaccctctggtggcaaaagcgaagagagtggcatggtcaccaactcagtcccgacggcgagcagtagcgtcctgagctccccagcggcagactgcggccccgcgggcagtgccaccaccttcaccaaccctttgttgccgctcatgtccgagcagttcaaggccaagtttccttttgggggactcctggactcagctcaggcatcagagacgtccaagcttcagcaactggtagaaaacattgacaagaaggccactgaccccaatgagtgcatcatctgccaccgggttctcagctgccagagcgccttgaaaatgcactacaggacacacactggggagaggccctttaagtgtaagatctgtggccgggctttcaccacgaaagggaatcttaaaacccactacagtgtccatcgtgctatgcccccgctcagagtccagcattcctgccccatctgccagaagaagttcacgaacgctgtggtcctgcagcagcacatccgaatgcatatgggaggccagatccccaacaccccagtccccgacagctactctgagtccatggagtctgacacaggttcctttgatgagaaaaattttgatgacctagacaacttctctgatgaaaacatggaagactgtcctgagggcagcatccctgatacacctaagtctgcagacgcctcccaagacagcttatcctcttcgcctttgcccctcgagatgtcgagcatcgctgctttggaaaatcagatgaagatgatcaatgctggcctggcagagcagctacaggccagcctgaagtcagtggagaatgggtccatcgagggggatgtcctgaccaatgattcatcctcagtgggtggtgacatggaaagccaaagtgctggcagcccagccatctcagagtctacctcttccatgcaggctctgtccccgtccaacagcacgcaggagttccacaagtcacccagcattgaggagaaaccacagagagcggtcccaagcgagtttgccaatggtttgtctcccaccccagtgaatggtggggctttggatttgacatctagtcacgcagagaaaatcatcaaagaagattctttggggatcctcttcccttttagagaccggggtaaatttaaaaacactgcttgtgacatttgtggcaaaacatttgcttgtcagagtgccttggacattcactatagaagtcataccaaagagagaccatttatttgcacagtttgcaatcgtggcttttccacaaagggtaatttgaagcagcacatgttgacacatcagatgcgagatctgccatcccagctctttgagcccagttccaaccttggccccaatcagaactcagcggtgattcccgccaactcgttgtcatctctcatcaagacagaggtcaacggcttcgtgcatgtttctcctcaggacagtaaggacacccccaccagtcacgtcccgtctgggcctctgtcttcctctgccacatccccagttctgctccctgctctgcccaggagaactcccaagcagcactactgcaacacatgtggcaaaaccttctcctcatcgagtgccctgcagattcacgagagaactcacactggagagaaaccctttgcttgcactatttgtggaagagctttcacgactaaaggcaatcttaaggtacacatgggcactcacatgtggaatagcacccctgcacgacggggtcggcggctctctgtggatggccccatgacatttctaggaggcaatcccgtcaagttcccagaaatgttccagaaggatttggcggcaagatcaggaagtggggatccttccagcttctggaatcagtatgcagcagcgctctccaacgggctggcgatgaaggccaacgagatctccgtcattcagaacggtggcatccctccaattcctggaagcctcggcagtgggaacagctcacctattagtgggctgacgggaaacctggagaggctccagaactcagagcccaatgctcccctggccggcctggagaaaatggcaagcagtgagaacggaaccaacttccgcttcacccgcttcgtggaggacagcaaggagatcgtcacgagttaaagcagctcgggctggagacatagcattcattcctgttcagaatgcgacctatggtggcctcctactccttgccccccaccccgccccgccccttccttctgttccccagatctatgaactacaacattatgaagacattcttttgtaccttgttcaactttagagttctaagaaagcttatttattagcgatataaccttgctttgcaaacagaatgcaagcgttaactttggtcttctgtattttggactaaatactaattgactagagtgctgtaaacttgctgtaacatttatggcaattgcaagttgccctgctaggcagttgtaatctggcattaacttattttctatatccagtttaatatgaatctggtgttgatgcaatgcctcagtgatgcattagatctctaataaagtctgtatatacatgtacact

SEQ ID NO: 4498 - DNA, 1677 bp, Homo sapiens
gtagtcataaaggtctctttgccaagttactgccctctcaagctgcttccagtgaatgctacacacctgcaccatggtttgtctgacatccttagccaagatcaggattggctatgttggtacttacatatcctcatgagaattgtggttctggtactagtttggtaaagaaattattaaacctagctgatgcttgaaggtagttggattaacaggaaagaaaagagacttcttttctagccaagatgaaagatacacaagacattcaggaagcttcgaaggcaatgcagaataaagtccatgagcaggaagataagaatgagaaacaaaaacaaagagaagacaaacttggagtatattctttagtacatttttccccaaagatgttgggttcagttgccacaacactgccattgtcatcttcaaattccagtggaatgcctcttggttactatctgtctagtcctcagattagtagagtaactatatcaacaactggacaattgacttctaaagctactgtaggtagctgttccagagtggaaaacagcttggatgccagccccttctcagttccgaagaaacaggatgaatcacccatgattggggatggagaagattatttcctttctttgtttggtgattcaaagaaacttacagcacactcaaactacactcagaaaactttaaaatacttttctatgattcttgaagaagttggccaatttacctccagttctcttggagatgttgaaatagctgaagtgaatgtcaagggtttgttcgtgaagctcattaactcttcccttgacaaagaaatggcaattggagatcatattctccagcaaaatgtgaatggacaaaccatttctttgtaccgattccttccaaacatcgtaatgcaggcaaattccacagtaacagtgtgggcagcagcatctgaagcaaagcatcaacctccatcagattttctttggaaggaacaagacaagtttagagcaagtcctgattgtataacaatcctgtgcaaaccgaacggtcaagccattgcgtggtacacccctatccactggaagcaagcgtgggaaaaattagatgctgacgttgaatttaacagatgttcagtagtatctccaacattccgaaagcgtgtgtttcagtggacagcatctacagctacaataactaaagaaaaacaagatcaacctaagaaagatatctcaaattatcaggtggaacaagctcaagttcttcttaagagagagaaggaaatcccaccaaccgttttccctaatcgcagcccttggtgccagaatccctatgtctctgcacatccttactgtcctctgattgaaccacacaatacatccaccgctggaggcagattggatagacagcccaggtctcggtcaaccagacctaatcgagcctcagggtctaagaaaaagaagacatctgagtcacaaaagcaataagcagtcaactcaacctttaaagtaatctagtccaccctcaaccagctactagaaaagcaaaagagaactcaaatccctgaggcctgctctgcaacctccctgctattccatgagagggtgaagacatcacatttctatatggaaaaaggatccaaaatttgtattgctgtagaattggtgaattatagatgcttgatgaaat

SEQ ID NO: 4499 - DNA, 1308 bp, Homo sapiens
actctgctcctgcgacctagccaggcgtgagggagtgacagcagcgcattcgcgggacgagagcgatgagtgagaacgccgcaccaggtctgatctcagagctgaagctggctgtgccctggggccacatcgcagccaaagcctggggctccctgcagggccctccagttctctgcctgcacggctggctggacaatgccagctccttcgacagactcatccctcttctcccgcaagacttttattacgttgccatggatttcggaggtcatgggctctcgtcccattacagcccaggtgtcccatattacctccagacttttgtgagtgagatccgaagagttgtgacaggtggcgtcgtgggcggaatgtttttctgtaccttccccgagatggtggataaacttatcttgctggacacgccgctctttctcctggaatcagatgaaatggagaacttactgacctacaagcggagagccatagagcacgtgctgcaggtagaggcctcccaggagccctcgcacgtgttcagcctgaagcagctgctgcagaggttactgaagagcaatagccacttgagtgaggagtgcggggagcttctcctgcaaagaggaaccacgaaggtggccacagagatggagtttcgccatgttgcccaggctggtctcgaactcctgaactcaagcgatcctactgactcgacctcccaaaatggtaggattacaggtctggttctgaacagagaccagaggctcgcctgggcagagaacagcattgacttcatcagcagggagctgtgtgcgcattccatcaggaagctgcaggcccatgtcctgttgatcaagtaagtctggacccatccccttcagccacccgccaaggagacatgggcgccaggaatctccgggagggggccctggcatgaggctccaagttctctgcgtgtcgaccacatcgctaaggctcaagatcttttttgggaagcccccctggcagcagggtcatggaaggaggaaggtcagaggaggggagggctcgggcagcaggggatgggccggggctgtcccatgcctttccacaggtgtcagcggggggcatgcccaggtaaggctccataaccagtgagcccagtctcggctgactgcaacctctgtctcctggattcaaacgattctcctgcctcagcctcccgagtagctgggactacaggcgcccgccaccaggcctggcttatttttgtatttttagtagagacgaggtttcgccatgttggccaggctgctctccatctcctgacctcatgat

SEQ ID NO: 4500 - DNA, 1510 bp, Homo sapiens
atttccagcaggagctgcgagcacagtgctggctcacaacaagatgctcaaggtgtcagccgtactgtgtgtgtgtgcagccgcttggtgcagtcagtctctcgcagctgccgcggcggtggctgcagccggggggcggtcggacggcggtaattttctggatgataaacaatggctcaccacaatctctcagtatgacaaggaagtcggacagtggaacaaattccgagacgatgaaagaagcaggagtagaccataggcagtggaggggtcccatattatccacctgcaagcagtgcccagtggtctatcccagccctgtttgtggttcagatggtcatacctactcttttcagtgcaaactagaatatcaggcatgtgtcttaggaaaacagatctcagtcaaatgtgaaggacattgcccatgtccttcagataagcccaccagtacaagcagaaatgttaagagagcatgcagtgacctggagttcagggaagtggcaaacagattgcgggactggttcaaggcccttcatgaaagtggaagtcaaaacaagaagacaaaaacattgctgaggcctgagagaagcagattcgataccagcatcttgccaatttgcaaggactcacttggctggatgtttaacagacttgatacaaactatgacctgctattggaccagtcagagctcagaagcatttaccttgataagaatgaacagtgtaccaaggcattcttcaattcttgtgacacatacaaggacagtttaatatctaataatgagtggtgctactgcttccagagacagcaagacccaccttgccagactgagctcagcaatattcagaagcggcaaggggtaaagaagctcctaggacagtatatccccctgtgtgatgaagatggttactacaagccaacacaatgtcatggcagtgttggacagtgctggtgtgttgacagatatggaaatgaagtcatgggatccagaataaatggtgttgcagattgtgctatagattttgagatctccggagattttgctagtggcgattttcatgaatggactgatgatgaggatgatggagacgatattatgaatgatgaagatgaaattgaagatgatgatgaagatgaaggggatgatgatgatggtggtgatgaccatgatgtatacatttgattgatgacagttgaaatcaataaattctacatttctaatatttacaaaaatgatagcctatttaaaattatcttcttccccaataacaaaatgattctaaacctcacatatattttgtataattatttgaaaaattgcagctaaagttatagaactttatgtttaaataagaatcatttgctttgagtttttatattccttacacaaaaagaaaatacatatgcagtctagtcagacaaaataaagttttgaagtgctactataataaatttttcacgagaacaaactttgtaaatcttccataagcaaaatgacagctagtgctt

SEQ ID NO: 4501 - DNA, 1692 bp, Homo sapiens
agacggacactgtgccggggcgagctgacaggagttcacggctgcgatagaacatggagatgtcatgggcgcgacagagcctggcggggataccagcagcgtgtgatgagttccacccgttcatcgaggcactgctgcctcacgtccgcgctttctcctacacctggttcaacctgcaggcgcggaagcgcaagtacttcaagaagcatgaaaagcggatgtcgaaggacgaggagcgggcggtgaaggacgagctgctgggcgagaagcccgagatcaagcagaagtgggcatcccggctgctggccaagctgcgcaaggacatccggcccgagttccgcgaggacttcgtgctgaccatcacgggcaagaagcccccctgctgcgtgctctccaaccccgaccagaagggcaagatccggcggattgactgcctgcgccaggctgacaaggtgtggcggctggacctggtcatggtgattttgtttaaggggatccccctggaaagtactgatggggagcggctctacaagtcgcctcagtgctcgaaccccggcctgtgcgtccagccacatcacattggagtcacaatcaaagaactggatctttatctggcttactttgtccacactccggaatccggacaatcagatagttcaaaccagcaaggagatgcggacatcaaaccactgcccaacgggcacttaagtttccaggactgttttgtgacttccggggtctggaatgtgacggagctggtgagagtatcacagactcctgttgcaacagcatcagggcccaacttctccctggcggacctggagagtcccagctactacaacatcaaccaggtgaccctggggcggcggtccatcacctcccctccttccaccagcaccaccaagcgccccaagtccatcgatgacagtgagatggagagccctgttgatgacgtgttctatcccgggacaggccgttccccagcagctggcagcagccagtccagcgggtggcccaacgatgtggatgcaggcccggcttctctaaagaagtcaggaaagctggacttctgcagtgccctctcctctcagggcagctccccgcgcatggctttcacccaccacccgctgcctgtgcttgctggagtcagaccagggagcccccgggccacagcatcagccctgcacttcccctccacgtccatcatccagcagtcgagcccgtatttcacgcacccgaccatccgctaccaccaccaccacgggcaggactcactgaaggagtttgtgcagtttgtgtgctcggatggctcgggccaggccaccggacagcccaacggtagcggccagggcaaagtcccggggtcatttttgctaccgccgccgcctccagtggccagacctgtgccccttcctatgcctgattccaaatccaccagcactgccccagacggcgccgccttgactcctccatcaccttcattcgcaacgacaggcgcctcctctgccaaccggtttgtcagcatcggaccccgggacggcaactttctgaacatcccacagcagtctcagtcctggttcctctgataagatcgacaaaagaaacaacaaaatgagaagaagaggttcctcgaaaggggggagaagaaattttgagaatggaaaaatcccccagcccagcccagccccaccg

SEQ ID NO: 4502 - DNA, 1442 bp, Homo sapiens
agagagaaaaagtaaaagaccgaagaaggaggctggagagaccaggatccttccagctgaacaaagtcagccacaaagcagactagccagccggctacaattggagtcagagtcccaaagacatgggcttgttagagtgctgtgcaagatgtctggtaggggccccctttgcttccctggtggccactggattgtgtttctttggggtggcactgttctgtggctgtggacatgaagccctcactggcacagaaaagctaattgagacctatttctccaaaaactaccaagactatgagtatctcatcaatgtgatccatgccttccagtatgtcatctatggaactgcctctttcttcttcctttatggggccctcctgctggctgagggcttctacaccaccggcgcagtcaggcagaaggggaggggttccagaggccaacatcaagctcattctttggagcgggtgtgtcattgtttgggaaaatggctaggacatcccgacaagtttgtgggcatcacctatgccctgaccgttgtgtggctcctggtgtttgcctgctctgctgtgcctgtgtacatttacttcaacacctggaccacctgccagtctattgccttccccagcaagacctctgccagtataggcagtctctgtgctgatgccagaatgtatggtgttctcccatggaatgctttccctggcaaggtttgtggctccaaccttctgtccatctgcaaaacagctgagttccaaatgaccttccacctgtttattgctgcatttgtgggggctgcagctacactggtttccctgctcaccttcatgattgctgccacttacaactttgccgtccttaaactcatgggccgaggcaccaagttctgatcccccgtagaaatccccctttctctaatagcgaggctctaaccacacagcctacaatgctgcgtctcccatcttaactctttgcctttgccaccaactggccctcttcttacttgatgagtgtaacaagaaaggagagtcttgcagtgattaaggtctctctttggactctcccctcttatgtacctcttttagtcattttgcttcatagctggttcctgctagaaatgggaaatgcctaagaagatgacttcccaactgcaagtcacaaaggaatggaggctctaattgaattttcaagcatctcctgaggatcagaaagtaatttcttctcaaagggtacttccactgatggaaacaaagtggaaggaaagatgctcaggtacagagaaggaatgtctttggtcctcttgccatctataggggccaaatatattctctttggtgtacaaaatggaattcattctggtctctctattaccactgaagatagaagaaaaaagaatgtcagaaaaacaataagagcgtttgcccaaatctgcctattgcagc

SEQ ID NO: 4503 - DNA, 1426 bp, Homo sapiens
agagagaaaaagtaaaagaccgaagaaggaggctggagagaccaggatccttccagctgaacaaagtcagccacaaagcagactagccagccggctacaattggagtcagagtcccaaagacatggactatgagtatctcatcaatgtgatccatgccttccagtatgtcatctatggaactgcctctttcttcttcctttatggggccctcctgctggctgagggcttctacaccaccggcgcagtcaggcagatctttggcgactacaagaccaccatctgcggcaagggcctgagcgcaacggtaacagggggccagaaggggaggggttccagaggccaacatcaagctcattctttggagcgggtgtgtcattgtttgggaaaatggctaggacatcccgacaagtttgtgggcatcacctatgccctgaccgttgtgtggctcctggtgtttgcctgctctgctgtgcctgtgtacatttacttcaacacctggaccacctgccagtctattgccttccccagcaagacctctgccagtataggcagtctctgtgctgacgccagaatgtatggtgttctcccatggaatgctttccctggcaaggtttgtggctccaaccttctgtccatctgcaaaacagctgagttccaaatgaccttccacctgtttattgctgcatttgtgggggctgcagctacactggtttccctgctcaccttcatgattgctgccacttacaactttgccgtccttaaactcatgggccgaggcaccaagttctgatcccccgtagaaatccccctttctctaatagcgaggctctaaccacacagcctacaatgctgcgtctcccatcttaactctttgcctttgccaccaactggccctcttcttacttgatgagtgtaacaagaaaggagagtcttgcagtgattaaggtctctctttggactctcccctcttatgtacctcttttagtcattttgcttcatagctggttcctgctagaaatgggaaatgcctaagaagatgacttcccaactgcaagtcacaaaggaatggaggctctaattgaattttcaagcatctcctgaggatcagaaagtaatttcttctcaaagggtacttccactgatggaaacaaagtggaaggaaagatgctcaggtacagagaaggaatgtctttggtcctcttgccatctataggggccaaatatattctctttggtgtacaaaatggaattcattctggtctctctattaccactgaagatagaagaaaaaagaatgtcagaaaaacaataagagcgtttgcccaaatctgcctattgcagctgggagaagggggtcaaagcaaggatctttcacccacagaaagagagcactgaccccgatggcgatggactactgaagcccta

SEQ ID NO: 4504 - DNA, 2166 bp, Homo sapiens
aaaacggccagcctgaggagctgctgcgagggtccgcttcgtctttcgagagtgactcccgcggtcccaaggctttccagagcgaacctgtgcggctgcaggcaccggcgtgttgagtttccggcgttccgaaggactgagctcttgtcgcggatcccgtccgccgtttccagcccccagtctcagagcggagcccacagagcagggcaccggcatggccaaagccgcggcgatcggcatcgacctgggcaccacctactcctgcgtgggggtgttccaacacggcaaggtggagatcatcgccaacgaccagggcaaccgcaccacccccagctacgtggccttcacggacaccgagcggctcatcggggatgcggccaagaaccaggtggtgcagtcggacatgaagcactggcctttccaggtgatcaacgacggagacaagcccaaggtgcaggtgagctacaagggggagaccaaggcattctaccccgaggagatctcgtccatggtgctgaccaagatgaaggagatggccgaggcgtacctgggctacccggtgaccaacgcggtgatcaccgtgccggcctacttcaacgactcgcagcgccaggccaccaaggatgcgggtgtgatcgcggggctcaacgtgctgcggatcatcaacgagcccacggccgccgccatcgcctacggcctggacagaacgggcaagggggagcgcaacgtgctcatctttgacctgggcgggggcaccttcgacgtgtccatcctgacgatcgacgacggcatcttcgaggtgaaggccacggccggggacacccacctgggtggggaggactttgacaacaggctggtgaaccacttcgtggaggagttcaagagaaaacacaagaaggacatcagccagaacaagcgagccgtgaggcggctgcgcaccgcctgcgagagggccaagaggaccctgtcgtccagcacccaggccagcctggagatcgactccctgtttgagggcatcgacttctacacgtccatcaccagggcgaggttcgaggagctgtgctccgacctgttccgaagcaccctggagcccgtggagaaggctctgcgcgacgccaagctggacaaggcccagattcacgacctggtcctggtcgggggctccacccgcatccccaaggtgcagaagctgctgcaagacttcttcaacgggcgcgacctgaacaagagcatcaaccccgacgaggctgtggcctacggggcggcggtgcaggcggccatcctgatgggggacaagtccgagaacgtgcaggacctgctgctgctggacgtggctcccctgtcgctggggctggagacggccggaggcgtgatgactgccctgatcaagcgcaactccaccatccccaccaagcagacgcagatcttcaccacctactccgacaaccaacccggggtgctgatccaggtgtacgagggcgagagggccatgacgaaagacaacaatctgttggggcgcttcgagctgagcggcatccctccggcccccaggggcgtgccccagatcgaggtgaccttcgacatcgatgccaacggcatcctgaacgtcacggccacggacaagagcaccggcaaggccaacaagatcaccatcaccaacgacaagggccgcctgagcaaggaggagatcgagcgcatggtgcaggaggcggagaagtacaaagcggaggacgaggtgcagcgcgagagggtgtcagccaagaacgccctggagtcctacgccttcaacatgaagagcgccgtggaggatgaggggctcaagggcaagatcagcgaggcggacaagaagaaggttctggacaagtgtcaagaggtcatctcgtggctggacgccaacaccttggccgagaaggacgagtttgagcacaagaggaaggagctggagcaggtgtgtaaccccatcatcagcggactgtaccagggtgccggtggtcccgggcctggcggcttcggggctcagggtcccaagggagggtctgggtcaggccctaccattgaggaggtggattaggggcctttgttctttagtatgtttgtctttgaggtggactgttgggactcaaggactttgctgctgttttcctatgtcatttctgcttcagctct

SEQ ID NO: 4505 - DNA, 1700 bp, Homo sapiens
gtgcccgctcgggctgctgcggctggggcttgcttccttatacccacctctcctcctctgggtctgcgtgtgtatgctcaaggtgtcagccgtactgtgtgtgtgtgcagccgcttggtgcagtcagtctctcgcagctgccgcggcggtggctgcagccggggggcggtcggacggcggtaattttctggatgataaacaatggctcaccacaatctctcagtatgacaaggaagtcggacagtggaacaaattccgagacgatgattatttccgcacttggagtccaggaaaacccttcgatcagggatgaaagaagcaggagtagaccataggcagtggaggggtcccatattatccacctgcaagcagtgcccagtggtctatcccagccctgtttgtggttcagatggtcatacctactcttttcagtgcaaactagaatatcaggcatgtgtcttaggaaaacagatctcagtcaaatgtgaaggacattgcccatgtccttcagataagcccaccagtacaagcagaaatgttaagagagcatgcagtgacctggagttcagggaagtggcaaacagattgcgggactggttcaaggcccttcatgaaagtggaagtcaaaacaagaagacaaaaacattgctgaggcctgagagaagcagattcgataccagcatcttgccaatttgcaaggactcacttggctggatgtttaacagacttgatacaaactatgacctgctattggaccagtcagagctcagaagcatttaccttgataagaatgaacagtgtaccaaggcattcttcaattcttgtgacacatacaaggacagtttaatatctaataatgagtggtgctactgcttccagagacagcaagacccaccttgccagactgagctcagcaatattcagaagcggcaaggggtaaagaagctcctaggacagtatatccccctgtgtgatgaagatggttactacaagccaacacaatgtcatggcagtgttggacagtgctggtgtgttgacagatatggaaatgaagtcatgggatccagaataaatggtgttgcagattgtgctatagattttgagatctccggagattttgctagtggcgattttcatgaatggactgatgatgaggatgatgaagacgatattatgaatgatgaagatgaaattgaagatgatgatgaagatgaaggggatgatgatgatggtggtgatgaccatgatgtatacatttgattgatgacagttgaaatcaataaattctacatttctaatatttacaaaaatgatagcctatttaaaattatcttcttccccaataacaaaatgattctaaacctcacatatattttgtataattatttgaaaaattgcagctaaagttatagaactttatgtttaaataagaatcatttgctttgagtttttatattccttacacaaaaagaaaatacacatgcagtctagtcagacaaaataaagttttgaagtgctactataataagtttttcacgagaacaaactttgtaaatcttccataagcaaaatgacagctagtgcttgggatcgtacatgttaattttctgaaagataattctaagtgaaatttaaaataaataaatttttaatgacctgggtcttaaggatttaggaaaaatatgcatgctttaattgca

SEQ ID NO: 4506 - DNA, 1588 bp, Homo sapiens
gcatttccagcaggagctgcgagcacagtgctggctcacaacaagatgctcaaggtgtcagccgtactgtgtgtgtgtgcagccgcttggtgcagtcagtctctcgcagctgccgcggcggtggctgcagccggggggcggtcggacggcggtaattttctggatgataaacaatggctcaccacaatctctcagtatgacaaggaagtcggacagtggaacaaattccgagacctttagatccagctaaggatccatgcttaaagatgaaatgtagtcgccataaagtatgcattgctcaagattctcagactgcagtctgcattagtcaccggaggcttacacacaggatgaaagaagcaggagtagaccataggcagtggaggggtcccatattatccacctgcaagcagtgcccagtggtctatcccagccctgtttgtggttcagatggtcatacctactcttttcagtgcaaactagaatatcaggcatgtgtcttaggaaaacagatctcagtcaaatgtgaaggacattgcccatgtccttcagataagcccaccggtacaagcagaaatgttaagagagcatgcagtgacctggagttcagggaagtggcaaacagattgcgggactggttcaaggcccttcatgaaagtggaagtcaaaacaagaagacaaaaacattgctgaggcctgagagaagcagattcgataccagcatcttgccaatttgcaaggactcacttggctggatgtttaacagacttgatacaaactatgacctgctattggaccagtcagagctcagaagcatttaccttgataagaatgaacagtgtaccaaggcattcttcaattcttgtgacacatacaaggacagtttaatatctaataatgagtggtgctactgcttccagagacagcaagacccaccttgccagactgagctcagcaatattcagaagcggcaaggggtaaagaagctcctaggacagtatatccccctgtgtgatgaagatggttactacaagccaacacaatgtcatggcagtgttggacagtgctggtgtgttgacagatatggaaatgaagtcatgggatccagaataaatggtgttgcagattgtgctatagattttgagatctccggagattttgctagtggcgattttcatgaatggactgatgatgaggatgatgaagacgatattatgaatgatgaagatgaaattgaagatgatgatgaagatgaaggggatgatgatgatggtggtgatgaccatgatgtatacatttgattgatgacagttgaaatcaataaattctacatttctaatatttacaaaaatgatagcctatttaaaattatcttcttccccaataacaaaatgattctaaacctcacatatattttgtataattatttgaaaaattgcagctaaagttatagaactttatgtttaaataagaatcatttgctttgagtttttatattccttacacaaaaagaaaatacatatgcagtctagtcagacaaaataaagttttgaagtgctactataataaatttttcacgagaacaaac

SEQ ID NO: 4507 - DNA, 1583 bp, Homo sapiens
aggtcggtgcgcgcttctcccgaggtggaacgggcggcagtcaagcgccggcgttctctgccatcaccctttccttgccggccggcacttcggctgcagagttttgcccacgcttcgagacttagggagcagaatttgcccactcatctggtataactggttctgatggctgggaataaaggaagaggacgtgctgcttatacctttaatattgaggctgttggatttagcaaaggtgaaaagttacctgatgtagtgttgaaaccacccccactatttcctgatacagattataaaccagtgccactgaaaacaggagaaggtgaagaatatatgctggctttgaaacaggagttgagagaaacaatgaaaagaatgccttattttattgaaacacctgaagaaagacaagatattgaaaggtatagtaaaagatacatgaaggtatacaaggaagaatggataccagattggagaagacttccaagagagatgatgccaagaaataaatgtaaaaaagcaggcccaaaacccaaaaaggcaaaagacgcaggcaaaggcacaccactcactaatactgaagatgtgttgaaaaaaatggaggaattggaaaaaagaggtgatggtgaaaaatcagatgaggaaaatgaagagaaagaaggaagcaaagagaaaagtaaagaaggtgatgatgacgatgacgatgatgccgcagaacaggaggaatatgatgaagaagagcaagaagaggaaaatgactacattaattcatactttgaagatggagatgattttggcgcagacagtgatgacaacatggatgaggcaacctattaggcatgaaatttttcaaaaaatatttttatgatgcagcttctgaacatttggacagacttgatttgtattttatttctgataaggaataagtacttgtttctgttgttttggacaaatagttgttaccaaaatattcaaaaccactttgagtttacatactagttaccttaaaaattattccctgacactctgacattccttctaaacacctctgccatctctcttatgtactctcatgggtttttttgtatgatttgaatatgaatgtgcctaaagaatttttgctctcttaatctatgtatacatacttgaacaaatcattcttgcttaactgctgatcttttgtaaaactattgctagtcataatggatttctataacctgaaagttgatataatacagcacgtggagcactttaaaaacaaagaaacttgaaaataattttattttttacctttacatggtgtgttctagactactgcattatgactacataaacctacctgagctcttacaagtacagaattgtgagacagaggttttgtgatggaaaacatacacatagggaaaaataccaaactgagcaatataaatttcacagctcacatcttagccagtacaaagaaactttcacatggggtgaatattataatacttgaatttgagacttaatactgtatatgaattaatcatcccactgtaataactgacatcttcaaatagttgggcttatgaaaaatttgacta

SEQ ID NO: 4508 - DNA, 3169 bp, Homo sapiens
gttccagtgatcaagtggaagaaagatggcattcatctggccttgggaatggatgaaaggaagcagcaactttcaaatgggtctctgctgatacaaaacatacttcattccagacaccacaagccagatgagggactttaccaatgtgaggcatctttaggagattctggctcaattattagtcggacagcaaaagttgcagtagcagactaggtgtcatgtgatataactggacccaggagaatgaccccacaactgaaagatttttatgaaggatgatttactattctccaacgtactgacatttttctacagcccaatcattgctggggagaccactgaggttcctttcacagacagaatctgtcacagccttcatgggagacacagtgctactcaagtgtgaagtcattggggagcccatgccaacaatccactggcagaagaaccaacaagacctgactccaatcccaggtgactcccgagtggtggtcttgccctctggagcattgcagatcagcggactccaaccgggggacattggaatttaccgatgctcagctcgaaatccagccagctcaagaacaggaaatgaagcagaagtcagaattttatcagatccaggactgcatagacagctgtattttctgcaaagaccatccaatgtagtagccattgaaggaaaagatgctgtcctggaatgttgtgtttctggctatcctccaccaagttttacctggttacgaggcgaggaagtcatccaactcaggtctaaaaagtattctttattgggtggaagcaacttgcttatctccaatgtgacagatgatgacagtggaatgtatacctgtgttgtcacatataaaaatgagaatattagtgcctctgcagagctcacagtcttggttccgccatggtttttaaatcatccttccaacctgtatgcctatgaaagcatggatattgagtttgaatgtacagtctctggaaagcctgtgcccactgtgaattggatgaagaatggagatgtggtcattcctagtgattattttcagatagtgggaggaagcaacttacggatacttggggtggtgaagtcagatgaaggcttttatcaatgtgtggctgaaaatgaggctggaaatgcccagaccagtgcacagctcattgtccctaagcctgctatcccaagctccagtgtcctcccttcggctcccagagatgtggtccctgtcttggtttccagccgatttgtccgtctcagctggcgcccacctgcagaagcgaaagggaacattcaaactttcacggtctttttctccagagaaggtgacaacagggaacgagcattgaatacaacacagcctgggtcccttcagctcactgtgggaaacctgaagccagaagccatgtacacctttcgagttgtggcttacaatgaatggggaccgggagagagttctcaacccatcaaggtggccacacagcctgagttgcaagttccagggccagtagaaaacctgcaagctgtatctacctcacctacctcaattcttattacctgggaaccccctgcctatgcaaacggtccagtccaaggttacagattgttctgcactgaggtgtccacaggaaaagaacagaatatagaggttgatggactatcttataaactggaaggcctaaaaaaattcaccgaatatagtcttcgattcttagcttataatcgctatggtccgggcgtctctactgatgatataacagtggtaacactttctgacgtgccaagtgccccgcctcagaacgtctccctggaagtggtcaattcaagaagtatcaaagttagctggctgcctcctccatcaggaacacaaaatggatttattaccggctataaaattcgacacagaaagacgacccgcaggggtgagatggaaacactggagccaaacaacctctggtacctattcacaggactggagaaaggaagtcagtacagtttccaggtgtcagccatgacagtcaatggtactggaccaccttccaactggtatactgcagagactccagagaatgatctagatgaatctcaagttcctgatcaaccaagctctcttcatgtgaggccccagactaactgcatcatcatgagttggactcctcccttgaacccaaacatcgtggtgcgaggttatattatcggttatggcgttgggagcccttacgctgagacagtgcgtgtggacagcaagcagcgatattattccattgagaggttagagtcaagttcccattatgtaatctccctaaaagcttttaacaatgccggagaaggagttcctctttatgaaagtgccaccaccaggtctataaccgatctctccacccccatgctcccaccagtaggtgtacaggctgtggctcttacccatgatgctgtgagggtcagctgggcagacaactctgtccctaagaaccaaaagacgtctgaggtgcgactttacaccgtccggtggagaaccagcttttctgcaagtgcaaaatacaagtcagaagacacaacatctctaagttacacagcaacaggcctcaaaccaaacacaatgtatgaattctcggtcatggtaacaaaaaacagaaggtccagtacttggagcatgactgcacatgccaccacgtatgaagcagcccccacctctgctcccaaggacttgacagtcattactagggaagggaagcctcgtgccgtcattgtgagttggcagcctcccttggaagccaatgggaaaattactgcttacatcttattttataccttggacaagaacatcccaattgatgactggattatggaaacaatcagtggtgataggcttactcatcaaatcatggatctcaaccttgatactatgtattactttcgaattcaagcacgaaattcaaaaggagtggggccactctctgatcctatcctcttcaggactctgaaagtggaacaccctgacaaaatggctaatgaccaagacactggcgtgacgattaatcttgttaatgaagttctgcttggctgaggctgcggctctgataaggaagatgtaaattttcttgagaggaaattgttttgtctccattctgaaggaccaattaaaatgtcaagcttctttgtatg

SEQ ID NO: 4509 - DNA, 3826 bp, Homo sapiens
atcttgactgcctgttaaacttacctatgtggagcctcatttcaaagcacgaacgcctagagattctgcttgattggttacactgggactgcccagaccctggagttctttcgagagtcccagataactgtgattgcggccgaggctgagaatcaccgcttagaagcctcagctgtgattggctaccttctcccatcaccccagagtttttaaagctgggagccaggtaccctgcaaaacccaaaatgtgtatttcctgttctgtcgcctatcacacctggcccgggtggtctaggaagggaattgcacattaatctcacctggggagattcagcaagccgtaattctccaaagcccactgaagcccaattacagccaaatccctgaggatggggcccaggtgatgtcaaggaaacacaggctggaagcaagacctgacctgagggagttcttcagccttaacctaaggtctcatactcggagcactatgacatcgccccagctagagtggactctgcagacccttctggagcagctgaacgaggatgaattaaagagtttcaaatcccttttatgggcttttcccctcgaagacgtgctacagaagaccccatggtctgaggtggaagaggctgatggcaagaaactggcagaaattctggtcaacacctcctcagaaaattggataaggaatgcgactgtgaacatcttggaagagatgaatctcacggaattgtgtaagatggcaaaggctgagatgatggaggacggacaggtgcaagaaatagataatcctgagctgggagatgcagaagaagactcggagttagcaaagccaggtgaaaaggaaggatggagaaattcaatggagaaacaatctttggtctggaagaacaccttttggcaaggagacattgacaatttccatgacgacgtcactctgagaaaccaacggttcattccattcttgaatcccagaacacccaggaagctaacaccttacacggtggtgctgcacggccccgcaggcgtggggaaaaccacgctggccaaaaagtgtatgctggactggacagactgcaacctcagcccgacgctcagatacgcgttctacctcagctgcaaggagctcagccgcatgggcccctgcagttttgcagagctgatctccaaagactggcctgaattgcaggatgacattccaagcatcctagcccaagcacagagaatcctgttcgtggtcgatggccttgatgagctgaaagtcccacctggggcgctgatccaggacatctgcggggactgggagaagaagaagccggtgcccgtcctcctggggagtttgctgaagaggaagatgttacccagggcagccttgctggtcaccacgcggcccagggcactgagggacctccagctcctggcgcagcagccgatctacataagggtggagggcttcctggaggaggacaggagggcctatttcctgagacactttggagacgaggaccaagccatgcgtgcctttgagctaatgaggagcaacgcggccctgttccagctgggctcggcccccgcggtgtgctggattgtgtgcacgactctgaagctgcagatggagaaaggggaggacccggtccccacctgcctcacccgcacggggctgttcctgcgtttcctctgcagccggttcccgcagggcgcacagctgcggggcgcgctgcggacgctgagcctcctggccgcgcagggcctgtgggcgcagatgtccgtgttccaccgagaggacctggaaaggctcggggtgcaggagtccgacctccgtctgttcctggacggagacatcctccgccaggacagagtctccaaaggctgctactccttcatccacctcagcttccagcagtttctcactgccctgttctacgccctggagaaggaggagggggaggacagggacggccacgcctgggacatcggggacgtacagaagctgctttccggagaagaaagactcaagaaccccgacctgattcaagtaggacacttcttattcggcctcgctaacgagaagagagccaaggagttggaggccacttttggctgccggatgtcaccggacatcaaacaggaattgctgcaatgcaaagcacatcttcatgcaaataagcccttatccgtgaccgacctgaaggaggtcttgggctgcctgtatgagtctcaggaggaggagctggcgaaggtggtggtggccccgttcaaggaaatttctattcacctgacaaatacttctgaagtgatgcattgttccttcagcctgaagcattgtcaagacttgcagaaactctcactgcaggtagcaaagggggtgttcctggagaattacatggattttgaactggacattgaatttgaaaggtgcacttacctaaccattccgaactgggctcggcaggatcttcgctctcttcgcctctggacagatttctgctctctcttcagctcaaacagcaacctcaagtttctggaagtgaaacaaagcttcctgagtgactcttctgtgcggattctttgtgaccacgtaacccgtagcacctgtcatctgcagaaagtggagattaaaaacgtcacccctgacaccgcgtaccgggacttctgtcttgctttcattgggaagaagaccctcacgcacctgaccctggcagggcacatcgagtgggaacgcacgatgatgctgatgctgtgtgacctgctcagaaatcataaatgcaacctgcagtacctgaggttgggaggtcactgtgccaccccggagcagtgggctgaattcttctatgtcctcaaagccaaccagtccctgaagcacctgcgtctctcagccaatgtgctcctggatgagggtgccatgttgctgtacaagaccatgacacgcccaaaacacttcctgcagatgttgtcgttggaaaactgtcgtcttacagaagccagttgcaaggaccttgctgctgtcttggttgtcagcaagaagctgacacacctgtgcttggccaagaaccccattggggatacaggggtgaagtttctgtgtgagggcttgagttaccctgattgtaaactgcagaccttggtgttacagcaatgcagcataaccaagcttggctgtagatacctctcagaggcgctccaagaagcctgcagcctcacaaacctggacttgagtatcaaccagatagctcgtggattgtggattctctgtcaggcgttagagaatccaaactgtaacctaaaacacctacgcctctggagctgctccctcatgcctttctattgtcagcatcttggatctgctctcctcagcaatcagaagcttgaaactctggacctgggccagaatcatttgtggaagagtggcataattaagctctttggggttctaagacaaagaactggatccttgaagatactcaggttgaagacctatgaaactaatttggaaatcaagaagctgttggaggaagtgaaagaaaagaatcccaagctgactattgattgcaatgcttccggggcaacggcacctccgtgctgtgactttttttgctgagcagcctgggatcgctctacgaattacacaggaagcgggattcgggtctctaagatgtcttatgaatgcaggtcagagggtcacatgttaacactagagtctgtcgagaggtaggatttgacactggttttctcactatttttgggagattctgcacgagtcacgcacccccttcacatgacgctatgtactttctcacagggataataaagttagagcactctc

SEQ ID NO: 4510 - DNA, 1206 bp, Homo sapiens
agcagcagcagcagcagcccctgctctcccgccgcccggagaggctctgcagccatgaagccaaccgtcccgagccttcaataccccaggtcccaaactacaggctgtcgatgacgatcccagactggctccaggcgatccagaattacatgaagaccctacaatataatcacacagggacccagttctttgaaattaggaaaatgagaccgctgagtgggttaatggaaacagcaaaagaaatgacccgagagtccttgcctatcaaatgccttgaagctgtcatcctgggcatctacttaaccaatgggcagccttccattgagcggttccccatcagctttaaaacctacttctcaggaaactactttcaccacgttgtgctggggatttactgcaatggccgctatggctcattgggcatgagccgcagggctgagctgatggacaagccattgacttttcggactctgagtgacctcatctttgactttgaggactcttacaagaaatacctgcacacagtcaagaaggtcaagattgggctgtacgtcccccatgagcctcatagcttccagcccattgagtggaagcagctggtcctcaacgtctcaaagatgctgagggctgacataaggaaggagctggagaaatatgccagggacatgagaatgaagatcctgaaacctgcaagtgcccactctccgacccaagtgagaagccggggaaaatccctgtcccccagaaggagacaggcaagccccccgaggaggctcggccggcgagagaagtcgcctgcactgcctgaaaagaaggtggctgatctgagcactctgaatgaagtgggctatcaaatccgaatttagccaagccataccggccagcaagagggtttctgtggtgcttctctctgcactttacccagcatcttcaggaggaactgcaactatttattaagaacttgtgaattttatttttaaggattcacctggaaatagaatctgagtgggtggtaaccattagctttaaaaaattcactaaaaggcaccatgaaaaggctgaagtaataagccccactggggttggactatgtccctcactcaagatcttaaggataaccgtaactgaagttttatatttttccatttacctactttcttttacttgctttgaacattatgcctcaccaatagtaaatgttcatga

SEQ ID NO: 4511 - DNA, 3147 bp, Homo sapiens
aacagatctggacccaagcctaataaaggtgacataaataaaggtgtcataaagacagggcatggcacacgcttataaggggcatgagcatctcagggctgccagaatggcttttgctgagtgcatagcaccagcgtgcgtcatgtcttggctgcgtttctggggcccatggcccctccttacgtggcaactattgtctttactagtcaaggaggctcagcctctggtgtgggtcaaggacccgctccagctgacctctaaccccctggggccacctgagccctggtcttcccgctcctcccatctcccatgggcatctccccatgcacctgctcccccagcagccccgggggactttgattacctggggccctctgcttcttcgcagatgtcagccctgcctcaggaaccaactgaaaatttggctccattcctgaaggaattggattcagctggagagctgcccctggggccagagccgttcttggctgcacatcaggacttaaatgacaagcggactccagaagaaaggctcccagaggtggttccgcttctcaaccgggatcagaaccaggccctagttcagcttcctcgcctcaagtgggttcaaactacagatctagatcgggctgcaggtcatcaggcagatgaaatacttgttccactagacagtaaggtttcaagaccaaccaaatttgttgtttcgcccaagaacctgaagaaagatctagctgaacgttggagccttcctgagattgttgggattccacaccaattatccaaacctcagcgtcagaaacagactttgccagatgattatttgagtatggacacactgtatcccggcagcctacctccagaactccgggtgaacgcagatgagcctccagggcctcctgagcaagttggactttctcaattccatctagagcccaaaagtcaaaatccagagacccttgaagacatccagtcctcttcactccaggaagaagccccagcgcagcttctacagctccctcaggaggtagaaccttcaacccagcaggaggccccagctctgcctccagagtcctctatggagagtctagctcaaactccactgaatcatgaagtgacagttcaacctccaggtgaggatcaagctcattataatttgcccaagtttacagtcaaacctgcagatgtggaggttaccatgacttcagagcctaaaaatgagacagaatctacccaagcccagcaggaggccccaattcagcctcccgaggaggcggaaccttcttctacagccctgaggactacagatcctcctccagaacaccctgaggtgacacttccaccttcagacaagggtcaggctcagcattcacacctgactgaagccacagttcaacctctggacctggagcttagcataactacagagcctactacagaggttaaaccgtctccaaccacggaggaaacctcagctcagcctccagacccggggcttgccataactccagaacccactacagagattggacattccacagccctggagaagactagagctcctcatccagaccaggttcagactctgcatcgaagcctgactgaagtcacaggtccacctacaaagttagaatcttcgcaggattcattggtgcagtctgaaactgcaccagaggaacagaaggcctccacaagcaccaacatatgtgagctctgcacctgcggagatgagactctgtcatgtgttggtctcagcccaaagcagaggctccgccaagtgcctgtgccagagcccgacacctacaatggcatcttcaccaccttaaatttccaaggaaactatatttcataccttgatggaaatgtatggaaagcatacagttggaccgagaaactaattctcagtgaaaattatttgactgaattacctaaggattcatttgaaggcctgctatacctccagtatttagatttatcctgcaataaaatacgatatattgaaagacaaacatttgaatcactaccatttttgcagtatataaatctgggctgcaatttaattacaaaactgagccttggaacatttcaggcctggcacggaatgcagtttttacacaacttaattctcaatcgcaatcctctgactactgtcgaagatccatatctctttgaactgccggcattaaaatatctagacatgggaacaacacacatcacacttacaacacttaagaacattctcacgatgactgttgaactggaaaaactgatcttacctagccatatggcctgctgcctctgccaatttaaaaatagcattgaggctgtctgcaagacagtcaagctgcattgcaacactgcatgtctgactaacagcatacattgtcctgaagaagcatctgtagggaatccagaaggagcgttcatgaagatgttacaagcccggaagcagcacatgagcactcagctgactattgagtcggaggcgccctcagacagcagtggcatcaacttgtcaggctttgggggtgatcagcttgaaattcagctaaccgagcagctacggtccctcatccccaacgaggatgtgagaaagttcatgtctcatgttatccggaccttgaaaatggaatgttcagaaacacatgtgcaagggagctgtgccaagctcatgttgcgaacaggcctcctgatgaagcttctcagcgagcagcaggaagcaaaggcattgaatgtagaatgggatacggaccaacaaaaaacaaattatattaatgagaacatggaacagaatgaacagaaagagcagaagtcaagtgagctcatgaaagaagttccaggagatgactataagaacaaactcatcttcgcaatatctgtgactgtaatactaataattttgattataattttttgtcttatagaggtgaattcacataaaagggcatcagaaaaatacaaagacaacccatcaatatcaggagcctgagcatgagttaaagcatgtggatggcctggagctatgtttttaaaattgttattaaatattggttttttacttaaatcaatgaaaactttctttactttgtggttgtgttcctcaaaatgagaatttttaacaataataaaaataaagcttgttagatcatt

SEQ ID NO: 4512 - DNA, 1910 bp, Homo sapiens
gggcccgctgctggtgtgcagggctggtgccttgggtgcagatggcaagcagaaaggggtggataaagaattctttcttctcttcactgtgttggatgagaacaagagctggtacagcaataccaatcaagcagctgctatgttggatttccgactgctttcagaggatattgagggcttccaagactccaatcggatgcatgtcattaatgggtttctgttctctaacctgcccaggctggacatgtgcaagggtgacacagtggcctggcacctgctcggcctgggcacagagactgatgtgcatggagtcatgttccagggcaacactgtgcagcttcagggcatgaggaagggtgcagctatgctctttcctcatacctttgtcatggccatcatgcagcctgacaaccttgggacatttgagatttattgccaggcaggcagccatcgggaatcagggatgagggcaatctataatgtctcccagtgtcctggccaccaagccacccctcgccaacgctaccaagctgcaagaatctactataccatggcagaagaagtagagtgggactattgccctgaccggagctgggaacgggaatggcacaaccagtctgagaaggacagttatggttacattttcctgagcaacaaggatgggctcctgggttccagatacaagaaagctgtattcagggaatacactgatggtacattcaggatccctcggccaaggactggaccagaagaacacttgggaatcttgggtccacttatcaaaggtgaagttggtgatatcctgactgtggtattcaagaataatgccagccgcccctactctgtgcatgctcatggagtgctagaatctactactgtctggccactggctgctgagcctggtgaggtggtcacttatcagtggaacatcccagagaggtctggccctgggcccaatgactctgcttgtgtttcctggatctattattctgcagtggatcccatcaaggacatgtatagtggcctggtggggcccttggctatctgccaaaagggcatcctggagccccatggaggacggagtgacatggatcgggaatttgcattgttgttcttgatttttgatgaaaataagtcttggtatttggaggaaaatgtggcaacccatgggtcccaggatccaggcagtattaacctacaggatgaaactttcttggagagcaataaaatgcatgcaatcaatgggaaactctatgccaaccttaggggtcttaccatgtaccaaggagaacgagttgcctggtacatgctggccatgggccaagatgtggatctacacaccatccactttcatgcagagagcttcctctatcggaatggcgagaactaccgggcagatgtggtggatctgttcccagggacttttgaggttgtggagatggtggccagcaaccctgggacatggctgatgcactgccatgtgactgaccatgtccatgctggcatggagaccctcttcactgttttttctcgaacagaacacttaagccctctcaccgtcatcaccaaagagactgaaaaagcagtgccccccagagacattgaagaaggcaatgtgaagatgctgggcatgcagatccccataaagaatgttgagatgctggcctctgttttggttgccattagtgtcacccttctgctcgttgttctggctcttggtggagtggtttggtaccaacatcgacagagaaagctacgacgcaataggaggtccatcctggatgacagcttcaagcttctgtctttcaaacagtaacatctggagcctggagatatcctcaggaagcacatctgtagtgcactcccagcaggccatggactagtcactaaccccacactcaaaggggcat

SEQ ID NO: 4513 - DNA, 2247 bp, Homo sapiens
gttttggccggaaaggcttaccatgagttgccagggctgagagagatggagaaggattcgcggcggtgacagattaaattccccagttacattatagacttggagacttgtccttgtgtggacgggagccggaaagccttgagaacttattcctcgacccggacatggcacaggagaaaatgaaactaggtttcaagtcgctgccgagttccactaccgcagacggcaacattctgagaagagtcaacagtgcccctttgatcaatggacttggttttaattcacaggtgttgcaagctgacatgttaagaattaggacaaacagaacaacatttaggaatcgacgctctctgttgttgccacctcctccctttcatggttccatcagccgccttcatcaaatcaaacagtctccctctgatgccgagcggaagctggactgtactgctgccatctcggctcactgcaacctccctgcctgattctcctgcctcagcctgccgagtgcctgcgattgcaggcgcgcgcagccacacctgactggttttcgtatttttttggtggagacggggtttcgctgtgttggccgggctggtctccagctcctaaccgcaagtgatctgccagcctcggcctcccgaggtgccgggattgcagacggagtctggttcactcagtgctcaatggtgcccaggctggagtgcagtggcgtgatctcggctcgctacaacctccacctcccagccgcctgccttggcctcccaaagtgccgagattgcagcctctgcccggccgccaccccgtctgggaagtgaggagcatctctgcctggccgcccatcgtctggggggtgaggagcccctctgcctggctgcccagtctggaaagtgaggagcgtctctgcccggccgccatcccatctaggaagtgaggagcgcctcttcccggccgccatcccatctaggaagtgaggagcgtctctgccccgctgccccgtctgggatgtgaggagcgcctctgcccggccgcgaccccgtctgggaggtgaggagcatctctgcccggccgccccgtctgagaagtgaggagaccctccgcctggcaaccgccccgtctgagaagtgaggagcccctccgcccagcagccgccccgtctgagaagtgaggagcccctccgcccggcagccacaccgtctgggaagtgaggagcgtctctgcccggcagccaccccgtccgggagggaggtgggggtcagcccccgccaggccagccgccccatccgggaggaagaagccatggatttaataaatagagaaacaatgtctgaatggaagctacaaagtgagatacagataagtcactcttgggaagaaggcttgaaactgaatgacaatggcttacagaaatcatcctctctaaagtgcattgatttaactccagtatcctcaatggcttcttccatcaagaagactgggaagcagtgtttctctccatcattacaaacttgtgtgagttgcactggttcgccttcaagtcctattcccagtcctatgcaacaatacatcataagaagtcaaaatcctaccaacattattagaccaagtatccttggaccattaaaaagaaaaggtgaaatggcatttcaatatcaaccaaaaaagattttccaaggcacaaccaacatgctttcttctgatacttcccaactgtcagaaaataatgtgtatctacttccagctacttttgatggaaacgacagcaatgctggatcttctggtaattcgtcagctgaaatcggcactgtcacaaactctcctgtgtcaccttctgatactggttctcatttgttctagtagacaaactttcaactaaatgattcacccatcccaagactttctcaccagtggagaaacacacacatcaagcaaaccaagtcagagcaatgagaattgtactgtataatttaaactatctcctatttatcttttttcctcaatttcctaaaattctatttatctacagaacttgcgtgtataattcttgtgtacatccttaaatttaatgtaataacatgttaaagatgttttccaaatcagaaccatgttgaagatacaagcgtaaattgttaggctgctattttctagaaaatgctgtaccttgactttttaaaataatcttatgaaacataattctgataaaatataattgttcaattaacaaagtaaaatgatgtttgacaattatgt

SEQ ID NO: 4514 - DNA, 1107 bp, Homo sapiens
ctctccgactactcaccccgagtgtaaagaaccttcggctcgcgtgcttctgagctgctgtggatggcctcggctctctggactgtccttccgagtaggatgtcactgagatccctcaaatggagcctcctgctgctgtcactcctgagtttctttgtgatgtggtacctcagccttccccactacaatgtgatagaacgcgtgaactggatgtacttctatgaaatccatttggatgtctgccaactgagacgtgtgattgcagcccatggcttttcttccaaggagatcatcactttttggcaggtcatgctaaggaacaccacataccattattaacttcacattctacaaaaagcctagaaggacaggatactttgtggaaagtgttaaataaagtaggtactgtggaaaattcatggggaggtcagtgtgctggcttacactgaactgaaactcatgaaaaacccagactggagactggagggttacacttgtgatttattagtcaggcccttcaaagatgatatgtggaggaattaaatataaaggaattggaggtttttgctaaagaaattaataggaccaaacaatttggacatgtcattctgtagactagaatttcttaaaagggtgttactgagttataagctcactaggctgtaaaaacaaaacaatgtagagttttatttattgaacaatgtagtcacttgaaggttttgtgtatatcttatgtggattaccaatttaaaaatatatgtagttctgtgtcaaaaaacttcttcactgaagttatactgaacaaaattttacctgtttttggtcatttataaagtacttcaagatgttgcagtatttcacagttattattatttaaaattacttcaactttgtgtttttaaatgttttgacgatttcaatacaagataaaaaggatagtgaatcattctttacatgcaaacattttccagttacttaactgatcagtttattattgatacatcactccattaatgtaaagtcataggtcattattgcatatcagtaatctcttggactttgttaaatattttactgtggtaatatagagaagaattaaagcaagaa

SEQ ID NO: 4515 - DNA, 2508 bp, Homo sapiens
gtctgtcgcccgaggcggccgccgctgcaccttcaccgcgtacccgggacccgcccgcccgcgggagcttataatatgactcgatggaggaaaatttgataagcatgagagaagaccattcttttcatgttcgttacagaatggaagcttcttgcctagagctggccttggaaggggaacgtctatgtaaatcaggagactgccgcgctggcgtgtcattctttgaagctgcagttcaagttggaactgaagacctaaaaacacttagcgctatttacagccagttgggcaatgcttatttctatttgcatgattatgccaaagcattagaatatcaccatcatgatttaacccttgcaaggactattggagaccagctgggggaagcgaaagctagtggtaatctgggaaacaccttaaaagttcttgggaattttgacgaagccatagtttgttgtcagcgacacctagatatttccagagagcttaatgacaaggtgggagaagcaagagcactttacaatcttgggaatgtgtatcatgccaaagggaaaagttttggttgccctggtccccaggatgtaggagaatttccagaagaagtgagagatgctctgcaggcagccgtggatttttatgaggaaaacctatcattagtgactgctttgggtgaccgagcggcacaaggacgtgcctttggaaatcttggaaacacacattacctccttggcaacttcagggatgcagttatagctcatgagcagcgtctccttattgcaaaagaatttggagataaagcagctgaaagaagagcatatagcaaccttggaaatgcatatatatttcttggtgaatttgaaactgcctcggaatactacaagaagacactactgttggcccgacagcttaaagaccgagctgtagaagcacagtcttgttacagtcttggaaatacatatactttacttcaagactatgaaaaggccattgattatcatctgaagcacttagcaattgctcaagagctgaatgatagaattggtgaaggaagagcatgttggagcttaggaaatgcatacacagcactaggaaatcatgatcaagcaatgcattttgctgaaaagcacttggaaatttcaagagaggttggggataaaagtggtgaactaacagcacgacttaatctctcagaccttcaaatggttcttggtctgagctacagcacaaataactccataatgtctgaaaatactgaaattgatagcagtttgaatggtgtacgccccaagttgggacgccggcatagtatggaaaatatggaacttatgaagttaacaccagaaaaggtacagaactggaacagtgaaattcttgctaagcaaaaacctcttattgccaaaccttctgcaaagctactctttgtcaacagactgaaggggaaaaaatacaaaacgaattcctccactaaagttctccaagatgccagtaattctattgaccaccgaattccaaattctcagaggaaaatcagtgcagatactattggagatgaagggttctttgacttattaagccgatttcaaagcaataggatggatgatcagagatgttgcttacaagaaaagaactgccatacagcttcaacaacaacttccactccccctaaaatgatgctaaaaacatcatctgttcctgtggtatcccccaacacggatgagtttttagatcttcttgccagctcacagagtcgccgtctggatgaccagagggctagtttcagtaatttgccagggcttcgtctaacacaaaacagccagtcggtacttagccacctgatgactaatgacaacaaagaggctgatgaagatttctttgacatccttgtaaaatgtcaaggatccagattagatgatcaaagatgtgctccaccacctgctaccacaaagggtccgacagtaccagatgaagactttttcagccttattttacggtcccagggaaagagaatggatgaacagagagttcttttacaaagagatcaaaacagagacactgactttgggctaaaggactttttgcaaaataatgctttgttggagtttaaaaattcagggaaaaaatcggcagaccattagttactatggatttattttttttcctttcaaacacggtaaggaaacaatctattacttttttccttaaaaggagaatttatagcactgtaatacagcttaaaatatttttagaatgatgtaaatagttaaccttcagtagtctattaaggcattaatacttctctggacatgcgcgtttgagggtggaggggtcctgtaaggtgcttcatcgtctgtgattactgcttgggatgtgttctttggcagcttgtgagattactttacctagtgtttataaagtaggaagttaagtgaatcatagattagaatttaatactcttatggaaataattttttaacatcttaattgacaatggcgtttttttatacataa

SEQ ID NO: 4516 - DNA, 1475 bp, Homo sapiens
ggcgatgctggaggttcgctagccgaagcggctgcatctggcgccgcgtctgccccgcgtgctcggagcggattctgcccgccgtccccggagccctcggcgccccgctgagcccgcgatcacttcctccctgtgaccaaccggcgctgcaggttagagcctggcaatgccgtttgggtgtgtgactctgggtgacaagaagaactataaccagccatcggaggtgactgacagatatgatttgggacaggtcatcaagactgaggagttttgtgaaatcttccgggccaaggacaagacgacaggcaagctgcacacctgcaagaagttccagaagcgggacggccgcaaggtgcggaaagctgccaagaacgagataggcatcctcaagatggtgaagcatcccaacatcctacagctggtggatgtgtttgtgacccgcaaggagtactttatcttcctggagctgaatctcaagctggagaacctggtttactacaaccggctgaagaactcgaagattgtcatcagtgacttccatctggctaagctagaaaatggcctcatcaaggagccctgtgggacccccgagtatctggccccagaggtggtaggccggcagcggtatggacgccctgtggactgctgggccattggagtcatcatgtacatcctgctttcaggcaacccacctttctatgaggaggtggaagaagatgattatgagaaccatgataagaatctcttccgcaagatcctggctggtgactatgagtttgactctccatattgggatgatatttcgcaggcagccaaagacctggtcacaaggctgatggaggtggagcaagaccagcggatcactgcagaagaggccatctcccatgagtggatttctggcaatgctgcttctgataagaacatcaaggatggtgtctgtgcccagattgaaaagaactttgccagggccaagtggaagaaggctgtccgagtgaccaccctcatgaaacggctccgggcaccagagcagtccagcacggctgcagcccagtcggcctcagccacagacactgccacccccggggctgcagaccgtagtgccaccccagccacatatggaagtgccaccccagccactgatggcagtgtcaccccagccaccgatggaagcatcactccagccactgatgggagtgtcaccccagccactgacaggagcgctactccagccactgatgggagagccacaccagccacagaagagagcactgtgcccaccacccaaagcagtgccgtgctggccaccaaggcagctgccacccctgagccggctatggcccagccggacagcacagccccagagggcgccacaggccaggctccaccctctagtaaaggggaagaggctgctggttatgcccaggagtctcaaagggaggaggccagctgagtaggcagcctggtgagggggggca

SEQ ID NO: 4517 - DNA, 1538 bp, Homo sapiens
gggaactgggccgctgggccagcccctgcgtcggggggcaagatggcagcccaggctttggcgctgctgagagaggtagcgaggctggaagcgccgctggaggagctacgcgcgcttcactccgtgctgcaggcagtgccgctcaacgagcttcgccagcaagcggcggagctgcgcctcggcccgctcttctccctgcttaacgagaaccatagggaaaagactactttgtgtgtatccattctggagagattgctccaagctatggaaccggttcacgtggcccggaacctcagggttgacctgcagaggggactaattcaccctgatgattctgtaaaaatcctcactctttcccagattggaagaattgttgaaaattctgatgctgttactgagattctaaataatgctgaattactaaaacaaattgtttattgcattggtggagagaatctatctgtagcaaaagcgctaattatagagatttcttccgtgtcaccagaatctttaaactactgtaccacaagtggattggtaacccagctcctgagagagctgactggtgaggatgtgttggtcagagccacctgtatagaaatggtgacatcactggcatatactcatcatgggcgacaatatcttgctcaagaaggagtaattgaccaaatttctaatataattgttggggcagattcagaccctttctctagcttctatctgccaggattcgtgaagttttttggaaacctggctgtcatggatagtcctcaacagatctgtgagcgttatcctatctttgtggaaaaagtctttgaaatgatagaaagtcaggaccccactatgattggtgtagctgtagacacagttggaatcttgggatccaatgttgaaggaaaacaggttttacagaaaacaggaactcgctttgaacgcttgcttatgagaataggacatcaatcaaagaatgccccagtggagctaaaaattagatgtttggatgcaatttcatctcttctgtacttaccacctgagcagcagactgatgaccttctgaggatgacagaatcctggttttcttctttatctcgggacccactggagctcttccgtggcattagtagtcagcccttccctgaactacactgtgctgccttaaaagtgtttacggccattgcaaaccaaccctgggctcagaaacttatgtttaacagtccaggttttgtagaatatgtggtggaccggtctgtggagcatgacaaagcttcaaaggatgccaaatatgaactagtgaaagcacttgccaattccaagacaattgcagaaatctttgggaacccaaattatttgaggctcagaacttacctgagtgaagggccatactatgtgaaacctgtttccacgacagcagtagaaggagccgaatgatttcttctagagctcatgtagaggaccacgttttgaccaaaacttctcctaaggcatttgactccatctatatttcacaaaagagacttcctttccccaagaattatcat

SEQ ID NO: 4518 - DNA, 1679 bp, Homo sapiens
atactcagtcacacaagccatagcaggaaacagcgagcttgcagcctcaccgacgagtctcaactaaaagggactcccggagctaggggtggggactcggcctcacacagtgagtgccggctattggacttttgtccagtgacagctgagacaacaaggaccacgggaggaggtgtaggagagaagcgccgcgaacagcgatcgcccagcaccaagtccgcttccaggctttcggtttctttgcctccatcttgggtgcgccttcccggcgtctaggggagcgaaggctgaggtggcagcggcaggagagtccggccgcgacaggacgagtgctgatggcagagattggtgaggatttggataaatctgatgtgtcctcattaattttcctcatgaaggattacatgggccgaggcaagataagcaaggagaagagtttcttggaccttgtggttgagttggagaaactaaatctggttgccccagatcaactggatttattagaaaaatgcctaaagaacatccacagaatagacctgaagacaaaaatccagaagtacaagcagtctgttcaaggagcagggacaagttacaggaatgttctccaagcagcaatccaaaagagtctcaaggatccttcaaataacttcaggctccataatgggagaagtaaagaacaaagacttaaggaacagcttggcgctcaacaagaaccagtgaagaaatccattcaggaatcagaagcttttttgcctcagagcatacctgaagagagatacaagatgaagagcaagcccctaggaatctgcctgataatcgattgcattggcaatgagacagagcttcttcgagacaccttcacttccctgggctatgaagtccagaaattcttgcatctcagtatgcatggtatatcccagattcttggccaatttgcctgtatgcccgagcaccgagactacgacagctttgtgtgtgtcctggtgagccgaggaggctcccagagtgtgtatggtgtggatcagactcactcagggctccccctgcatcacatcaggaggatgttcatgggagattcatgcccttatctagcagggaagccaaagatgttttttattcagaactatgtggtgtcagagggccagctggaggacagcagcctcttggaggtggatgggccagcgatgaagaatgtggaattcaaggctcagaagcgagggctgtgcacagttcaccgagaagctgacttcttctggagcctgtgtactgcggacatgtccctgctggagcagtctcacagctcaccgtccctgtacctgcagtgcctctcccagaaactgagacaagaaagaaaacgcccactcctggatcttcacattgaactcaatggctacatgtatgattggaacagcagagtttctgccaaggagaaatattatgtctggctgcagcacactctgagaaagaaacttatcctctcctacacataagaaaccaaaaggctgggcgtagtggctcacgcctgtagtcccagcactttgggaggccaaggagggcagatcacttcaggtcaggagttcgagaccagcctggccaacatggtggacgctgtccctggtaaagatacagaaattagctgggtgtgggtgtgggtacctgtgttcccagttacttgggag

SEQ ID NO: 4519 - DNA, 2610 bp, Homo sapiens
attttcttagcgtttctggagattacaacatcctgcggttccgtttctgggaactttactgatttatctcccccctcacacaaataagcattgattcctgcatttctgaagatctcaagatctggactactgttgaaaaaaatttccagtgaggctcacttatgtctgtaaagatgggaaaaaaatacaagaacattgttctactaaaaggattagaggtcatcaatgattatcattttagaatggttaagtccttactgagcaacgatttaaaacttaatttaaaaatgagagaagagtatgacaaaattcagattgctgacttgatggaagaaaagttccgaggtgatgctggtttgggcaaactaataaaaattttcgaagatataccaacgcttgaagacctggctgaaactcttaaaaaagaaaagttaaaagtaaaaggaccagccctatcaagaaagaggaagaaggaagtggatgctacttcacctgcaccctccacaagcagcactgtcaaaactgaaggagcagaggcaactcctggagctcagaacccgaaaacagtggccaaatgtcaggtaactcccagaagaaatgttctccaaaaacgcccagtgatagtgaaggtactgagtacaacaaagccatttgaatatgagaccccagaaatggagaaaaaaataatgtttcatgctacagtggctacacagacacagttcttccatgtgaaggttttaaacaccagcttgaaggagaaattcaatggaaagaaaatcatcatcatatcagattatttggaatatgatagtctcctagaggtcaatgaagaatctactgtatctgaagctggtcctaaccaaacgtttgaggttccaaataaaatcatcaacagagcaaaggaaactctgaagattgatattcttcacaaacaagcttcaggaaatattgtatatggggtatttatgctacataagaaaacagtaaatcagaagaccacaatctacgaaattcaggatgatagaggaaaaatggatgtagtggggacaggacaatgtcacaatatcccctgtgaagaaggagataagctccaacttttctgctttcgacttagaaaaaagaaccagatgtcaaaactgatttcagaaatgcatagttttatccagataaagaaaaaaacaaacccgagaaacaatgaccccaagggcatgaagctaccccaggaacagagtcagcttccaaatccttcagaggccagcacaaccttccctgagagccatcttcggactcctcagatgccaccaacaactccatccagcagtttcttcaccaagaaaagtgaagacacaatctccaaaatgaatgacttcatgaggatgcagatactgaaggaagggagtcattttccaggaccgttcatgaccagcataggcccagctgagagccatccccacactcctcagatgcctccatcaacaccaagcagcagtttcttaaccacgaaaagtgaagacacaatctccaaaatgaatgacttcatgaggatgcagatactgaaggaagggagtcattttccaggaccgttcatgactagcataggcccagctgagagccatccccacactcctcagatgtctccatcaacaccaagcagcagtttcttaaccacgttgaaaccaagactgaagactgaacctgaagaagtttccatagaagacagtgcccagagtgacctcaaagaagtgatggtgctgaacgcaacagaatcatttgtatatgagcccaaagagcagaagaaaatgtttcatgccacagtggcaactgagaatgaagtcttccgagtgaaggtttttaatattgacctaaaggagaagttcaccccaaagaagatcattgccatagcaaattatgtttgccgcaatgggttcctggaggtatatcctttcacacttgtggctgatgtgaatgctgaccgaaacatggagatcccaaaaggattgattagaagtgccagcgtaactcctaaaatcaatcagctttgctcacaaactaaaggaagttttgtgaatggggtgtttgaggtacataagaaaaatgtaaggggtgaattcacttattatgaaatacaagataatacagggaagatggaagtggtggtgcatggacgactgaccacaatcaactgtgaggaaggagataaactgaaactcacctgctttgaattggcaccgaaaagtgggaataccggggagttgagatctgtaattcatagtcacatcaaggtcatcaagaccaggaaaaacaagaaagacatactcaatcctgattcaagtatggaaacttcaccagactttttcttctaaaatctggatgtcattgacgataatgtttatggagataaggtctaagtgcctaaaaaaatgtacatatacctggttgaaatacaacactatacatacacaccaccatatatactagctgttaatcctatggaatggggtattgggagtgcttttttaatttttcatagtttttttttaataaaatggcatattttgcatctacaacttctataatttgaaaaaataaataaacattatcttttttgtg

SEQ ID NO: 4520 - DNA, 2944 bp, Homo sapiens
aatacaaagcatgcttgtgagacagaattcctccttagacatgccggtcaacttacagaagagaaccgcaatgagataaaaaatggcactatccttcgattaaccacatctccagctcagaacgcccagcagctccatgaacgaatccagtcctcgagtatggatgccaagctggaagccctgaaggacttggccagcctctcccgggatgtcacgtttgcccaggagtttataaacctggacggtatctctctcctcacgcagatggtggagagcggcactgagcgataccagaaattgcagaagatcatgaagccttgctttggagacatgctgtccttcaccctgacggccttcgttgagctgatggaccatggcatagtgtcctgggatacattttcggtggcgttcattaagaagatagcaagttttgtgaacaagtcagccatagacatctcgatcctgcagcggtccttggccattttggagtcgatggtgctcaatagccatgacctctaccagaaagtggcgcaggagatcaccatcggccagctcattccacacctgcaagggtcagatcaagaaatccaaacctatactattgcagtgattaatgcgcttttcctgaaggctcctgatgagaggaggcaggagatggcgaatattttggctcagaagcaactgcgttccatcattttaacacatgtcatccgagcccagcgggccatcaacaatgagatggcgcaccagctgtatgttctacaagtgctcacctttaacctcctggaagacaggatgatgaccaaaatggacccccaggaccaggctcagagggacatcatatttgaacttcgaagaattgcttttgatgctgagtctgaacctaacaacagcagtggcagcatggagaaacgcaagtccatgtacacgcgagattataagaagcttgggttcattaatcatgtcaaccctgccatggacttcacgcagactccacctgggatgttggctctggacaacatgctgtactttgccaagcaccaccaagatgcctacatccggattgtgcttgagaacagtagtcgagaagacaagcatgaatgtccctttggccgcagtagtatagagctgaccaagatgctatgtgagatcttgaaagtgggcgagttgcctagtgagacctgcaacgacttccacccgatgttcttcacccacgacagatcctttgaggagtttttctgcatctgtatccagctcctgaacaagacatggaaggaaatgagggcaacttctgaagacttcaacaaggtaatgcaggtggtgaaggagcaggttatgagagcacttacaaccaagcctagctccctggaccagttcaagagcaaactgcagaacctgagctacactgagatcctgaaaatccgccagtccgagaggatgaaccaggaagatttccagtcccgcccgattttggaactaaaggagaagattcagccagaaatcttagagctgatcaaacagcaacgcctgaaccgccttgtggaagggacctgctttaggaaactcaatgcccggcggaggcaagacaagttttggtattgtcggctttcgccaaatcacaaagtcctgcattacggagacttagaagagagtcctcagggagaagtgccccacgattccttgcaggacaaactgccggtggcagatatcaaagccgtggtgacgggaaaggactgccctcatatgaaagagaaaggtgcccttaaacaaaacaaggaggtgcttgaactcgctttctccatcttgtatgactcaaactgccaactgaacttcatcgctcctgacaagcatgagtactgtatctggacggatggactgaatgcgctactcgggaaggacatgatgagcgacctgacgcggaatgacctggacaccctgctcagcatggaaatcaagctccgcctcctggacctggaaaacatccagatccctgacgcacctccgccgattcccaaggagcccagcaactatgacttcgtctatgactgtaactgaagtggccgggcccagacatgccccttcccttgggcaggaaagccagcagccccagactgcccaaaaacttgcccaccagaccaagggcagagccccaaggcccctgtctggaggaaatggcctagctatttgatgagaagaccaaaccccacatcctcctttcccctctctctagaatcatctcgcaccaccagttacacttgaattaagatctgcgctcaaatctcctcccacctctctccctgcttttgccttgctctgttcctctttggtcccaagagcagcagccgcagcctcctcgtgatcctccctagcataaatttcccaaacagtccacaggtcccatgcccactttgcgtctgcactgtgatcgtgacaaatcttccctcctcaccagctagtctggggtttcctctccctgccccaggccagaactgccttcttcatttccacccacgctcccagcctcttagctgaaagcacaaatggtgaaatcagtagtctcgctccatctctaatagactaaacctaaatgcctctaggacggactgttgctatccaagcgtttggtgttaccttctcctgggaggtcctgctgcaactcaagttccacaggatggtcaagctgtcagacatccaagtttacatcattgtaattattactggtatttacaatttgcaagagttttgggttagttttttttttttttttgctttgtctttgtacaaaagagtctaacattttttgccaaacagatatatatttaatgaaaagaagagatacataaatgtgtgaatttccagtttttttttaattattttaatcccaaacatcttcctgaaaataacattcccttaaacatgctgtggaataaaatggattgtgatg

SEQ ID NO: 4521 - DNA, 2490 bp, Homo sapiens
gcaaccagcgggccgaggcggcggcgccagcggcgccttaaatagcatccagagccggcgcagggcagggagtgggctgcagtgacagccggcggcggagcggccggtccacggaggagaattcagcttagagaactatcaacacaggacaatgcaagcccatgagctgttccggtattttcgaatgccagagctggttgacttccgacagtacgtgcgtactcttccgaccaacacgcttatgggcttcggagcttttgcagcactcaccaccttctggtacgccacgagacccaaacccctgaagccgccatgcgacctctccatgcagtcagtggaagtggcgggtagtggtggtgcacgaagatccgcactacttgacagcgacgagcccttggtgtatttctatgatgatgtcacaacattatacgaaggtttccagaggggaatacaggtgtcaaataatggcccttgtttaggctctcggaaaccagaccaaccctatgaatggctttcatataaacagtgggtgattattgaacaaggatgctttgcttattcgatggtgatcgttccactttatgatacccttggaaatgaagccatcacgtacatagtcaacaaagctgaactctctctggtttttgttgacaagccagagaaggccaaactcttattagagggtgtagaaaataagttaataccaggccttaaaatcatagttgtcatggatgcctacggcagtgaactggtggaacgaggccagaggtgtggggtggaagtcaccagcatgaaggcgatggaggacctgggaagagccaacagacggaagcccaagcctccagcacctgaagatcttgcagtaatttgtttcacaagtggaactacaggcaaccccaaaggagcaatggtcactcaccgaaacatagtgagcgattgttcagcttttgtgaaagcaacagagaatacagtcaatccttgcccagatgatactttgatatctttcttgcctctcgcccatatgtttgagagagttgtagagtgtgtaatgctgtgtcatggagctaaaatcggatttttccaaggagatatcaggctgctcatggatgacctcaaggtgcttcaacccactgtcttccccgtggttccaagactgctgaaccggatgtttgaccgaattttcggacaagcaaacaccacgctgaagcgatggctcttggacttcgcctccaagaggaaagaagcagagcttcgcagcggcatcatcagaaacaacagcctgtgggaccggctgatcttccacaaagtacagtcgagcctgggcggaagagtccggctgatggtgacaggagccgccccggtgtctgccactgtgctgacgttcctcagagcagccctgggctgtcagttttatgaaggatatggacagacagagtgcactgccgggtgctgcctaaccatgcctggagactggaccgcaggccatgttggggccccgatgccgtgcaatttgataaaacttgttgatgtggaagaaatgaattacatggctgccgagggcgagggcgaggtgtgtgtgaaagggccaaatgtatttcagggctacttgaaggacccagcgaaaacagcagaagctttggacaaagacggctggttacacacaggggacattggaaaatggttaccaaatggcaccttgaaaattatcgaccggaaaaagcacatatttaagctggcacaaggagaatacatagcccctgaaaagattgaaaatatctacatgcgaagtgagcctgttgctcaggtgtttgtccacggagaaagcctgcaggcatttctcattgcaattgtggtaccagatgttgagacattatgttcctgggcccaaaagagaggatttgaagggtcgtttgaggaactgtgcagaaataaggatgtcaaaaaagctatcctcgaagatatggtgagacttgggaaggattctggtctgaaaccatttgaacaggtcaaaggcatcacattgcaccctgaattattttctatcgacaatggccttctgactccaacaatgaaggcgaaaaagccagagctgcggaactatttcaggtcgcagatagatgacctctattccactatcaaggtttagtgtgaagaagaaagctcagaggaaatggcacagttccacaatctcttctcctgctgatggccttcatgttgttaattttgaatacagcaagtgtagggaaggaagcgttcgtgtttgacttgtccattcggggttcttctcataggaatgctagaggaaacagaacactgccttacagtcacctcatgttgcagaccatgtttatggtaatacacactttccaaaatgagccttaaaaattgtaaaggggatactataaatgtgctaagttatttgagacttcctcagtttaaaaagtgggttttaaatcttctgtctccctgtttttctaatcaaggggttag

SEQ ID NO: 4522 - DNA, 1398 bp, Homo sapiens
ttttctggatgataaacaatggctcaccacaatctctcagtatgacaaggaagtcggacagtggaacaaattccgagacgatgattatttccgcacttggagtccaggaaaacccttcgatcaggctttagatccagctaaggatccatgcttaaagatgaaatgtagtcgccataaagtatgcattgctcaagattctcagactgcagtctgcattagtcaccggaggcttacacacaggatgaaagaagcaggagtagaccataggcagtggaggggtcccatattatccacctgcaagcagtgcccagtggtctatcccagccctgtttgtggttcagatggtcatacctactcttttcagtgcaaactagaatatcaggcatgtgtcttaggaaaacagatctcagtcaaatgtgaaggacattgcccatgtccttcagataagcccaccagtacaagcagaaatgttaagagaggattcgataccagcatcttgccaatttgcaaggactcacttggctggatgtttaacagacttgatacaaactatgacctgctattggaccagtcagagctcagaagcatttaccttgataagaatgaacagtgtaccaaggcattcttcaattcttgtgacacatacaaggacagtttaatatctaataatgagtggtgctactgcttccagagacagcaagacccaccttgccagactgagctcagcaatattcagaagcggcaaggggtaaagaagctcctaggacagtatatccccctgtgtgatgaagatggttactacaagccaacacaatgtcatggcagtgttggacagtgctggtgtgttgacagatatggaaatgaagtcatgggatccagaataaatggtgttgcagattgtgctatagattttgagatctccggagattttgctagtggcgattttcatgaatggactgatgatgaggatgatgaagacgatattatgaatgatgaagatgaaattgaagatgatgatgaagatgaaggggatgatgatgatggtggtgatgaccatgatgtatacatttgattgatgacagttgaaatcaataaattctacatttctaatatttacaaaaatgatagcctatttaaaattatcttcttccccaataacaaaatgattctaaacctcacatatattttgtataattatttgaaaaattgcagctaaagttatagaactttatgtttaaataagaatcatttgctttgagtttttatattccttacacaaaaagaaaatacatatgcagtctagtcagacaaaataaagttttgaagtgctactataataaatttttcacgagaacaaactttgtaaatcttccataagcaaaatgacagctagtgctt

SEQ ID NO: 4523 - DNA, 3352 bp, Homo sapiens
agacacaaggagaggcttggagagagcagacgccttctggattcaagaagacgagtccaagcatctgaacggggatgagagaagtggcagtaattacaggcggatcccatggggccggaggcctgcaccaccgcgagatgtggccattttacaagaaagggctaataagttggtgaaatacctgttggttaaggaccagacaaagatccccatcaaacgctcagacatgctgagggatgtcatccaagaatatgatgaatatttcccagaaatcattgaacgagcaagctacactctggagaagatgtttcgagtcaatctgaaagaaattgataagcaaagtagcttgtatattctcatcagcactcaggaatcctctgcaggcatactgggaacgaccaaggacacacccaagctgggtctcctcatggtgattctgagtgtcatttttatgaatggcaacaaggccagtgaggctgtcatctgggaggtgctgcgcaagttggggctgcgccctggggtgaggcattcactctttggggaagtgaggaagctcatcacagacgagtttgtgaagcagaagtacctggagtacaagagggtccctaacagcagaccacctgaatatgagttcttctggggcttgcgctcctaccacgagactagcaagatgaaagtcctcaagtttgcatgcagggtgcagaagaaagaccccaaggactgggctgtgcagtaccgcgaggcagtggagatggaagtccaagctgcagctgtggctgtggctgaggctgaagccagggctgaggcaagagcccaaatggggattggagaggaagctgtggctgggccctggaattgggatgacatggatatcgactgcctaacaagggaagagttaggcgatgatgctcaggcctggagcagattttcatttgaaattgaggccagagcccaagaaaatgcagatgccagcaccaacgtcaacttcagcagaggagctagtaccagggctggcttcagcgatggtgctagtattagcttcaatggtgcacccagctccagtggtggcttcagtggtggacctggcattacctttggtgttgcacccagcaccagtgccagcttcagcaatacagccagcattagctttggtggtacactgagcactggctccagcttcagcagcgcagccagcattagctttggttgtgcacacagcaccagcactagtttcagcagtgaagccagcattagctttggtggcatgccttgtaccagtgccagctttagtggtggagtcagctctggttttagtggcccactcagcaccagtgccactttcagtggtggagccagctctggctttggaggcacactcagcaccacggctggctttagtggtgtactcagcactagcaccagctttggcagtgcacccacaacgagcacagtcttcagtagtgcgcttagcaccagcactggctttggaggcatactcagcaccagtgtctgttttggtggctctcccagctccagtggtagctttggtggtacactcagtaccagtatctgcttcggtggctctccctgcaccagcactggctttggaggcacacttagcaccagtgtctcctttggtggctcttccagcaccagtgccaattttggtggtacactaagtaccagcatctgctttgatggctctcccagcactggtgctggctttggtggtgctctcaacaccagtgccagctttggcagtgtgctcaacaccagtactggttttggtggtgctatgagcaccagtgctgactttggcggtacactaagcaccagtgtctgctttggtggctctcctggcaccagtgtcagctttggcagtgcactcaacaccaatgctggttatggtggtgctgtcagcaccaacactgactttggtggtacactaagcaccagcgtctgttttggtggctctcccagcaccagtgctggctttggtggtgcactcaacaccaatgccagctttggctgtgccgtcagcaccagtgccagcttcagtggtgctgtcagcaccagtgcttgcttcagtggtgcaccaatcaccaaccctggctttggcggtgcatttagcaccagtgctggcttcggtggggcacttagtaccgctgctgacttcggtggtactcccagcaacagcattggctttggtgctgctcccagcaccagtgtcagctttggtggtgctcatggcaccagcctctgttttggtggagctcccagcaccagcctctgctttggcagtgcatctaatactaacctatgctttggtggccctcctagcaccagtgcctgctttagtggtgctaccagccctagtttttgtgatggacccagcaccagtaccggtttcagctttggcaatgggttaagcaccaatgctggatttggtggtggactgaacaccagtgctggctttggtagtggcctaggcaccagtgctggcttcagtggtggcctaagcacaagttctggctttgatggtgggctaggtaccagcgctggcttcggtggaggaccaggcaccagcactggttttggtggtggactgggcaccagtgctggcttcagtggcggactgggcaccagtgctggctttggtggtggactggtcactagtgatggctttggtggtggactgggcaccaatgctagtttcggcagcacacttggcaccagtgctggctttagtggtggcctcagcaccagcgatggctttggcagtaggcctaatgccagcttcgacagaggactgagtaccatcattggctttggcagtggttccaacaccagcactggctttactggcgaacccagcaccagcacgggcttcagtagtggacccagttctattgttggcttcagcggtggaccaagcactggtgttggcttctgcagtggaccaagcaccagtggcttcagcggtggaccgagcacaggagctggcttcggcggtggaccaaacactggtgctggctttggtggtggaccgagcaccagtgctggctttggcagtggagccgccagtcttggtgcctgtggcttctcgtatggctagtgaggtttcagatttattccccatgtttacagataccgctaataaattgcagtagtccttcccatggagccaaagtacatccttggaatctttgtccacacagcagtcaaggcagttatggccaatcagctgagggtgtcatgtgatggaaaaatctgtttgctgttcctgctttattgtttgctttctgtgtgctgtcatattttggtatcagagttacattaaatttgcaaaatg

SEQ ID NO: 4524 - DNA, 3588 bp, Homo sapiens
tgaagcccttgaccactatagactcaaacatcaccttgtttttccactcattcaacacttttttttttaaattatctaataggttggcactcatcatgagcccctgttctcattctgcaaatggtgaagctctctattgtcctgaccccacagttcctgtcccatgaccagggccagctcaccaaggagctgcagcagcatgtaaagtcagtgacatgcccatgcgagtacctgaggaaggttatcaatactctggctgaccatcatcatcgtgggactgactttggtggaagtccttggttacatgtcattattgcgtttccgacaagttataaagttgtcattaccctctggatagtttacctttgggtgtctctcctgaagactatcttctggtctcgaaatggacatgatggatccacggatgtacagcagagagcctggaggtccaaccgccgtagacaggaagggctgaggtccatttgtatgcacacaaagaaaagagtttcttcctttcgaggaaataaaattggcctgaaagacgtcattactctacggagacatgtggaaacaaaagttagagctaaaatccgtaagaggaaggtgacaacgaaaatcaaccatcatgacaaaatcaatggaaagaggaagaccgccagaaaacagaaaatgtttcaacgtgcgcaagagttgcggcggcgagcagaggactaccacaaatgcaaaatccccccttctgcaagaaaggctctttgcaactgggtcagaatggcggcagcggagcatcgtcattcttcaggattgccctactggccctacctcacagctgaaactttaaaaaacaggatgggccaccagccacctcctccaactcaacaacattctataactgataactccctgagcctcaagacacctcccgagtgtctgctcactccccttccaccctcagcggatgataatctcaagacacctcccgagtgtgtgctcactccccttccaccctcagcggatgataatctcaagacacctcccgagtgtgtgctcactccccttccaccctcagcggatgataatctcaagacacctcctgagtgtctgctcactccccttccaccctcagcggatgataatctcaagacacctcccgagtgtctgctcactccccttccaccctcagctctaccctcagctccaccctcagcggatgataatctcaagacacgtgccgagtgtctgctccatccccttccaccctcagcggatgataatctcaagacaccttccgagcgtcagctcactccccttccaccctcagctccaccctcagcagatgataatatcaagacacctgccgagcgtctgcgggggccgcttccaccctcagcggatgataatctcaagacaccttccgagcgtcagctcactccccttccaccctcagctccaccctcagcagatgataatatcaagacacctgctgagcgtctgcgggggccgcttccaccctcagcggatgataatctcaagacaccttccgagcgtcagctcactccccttccaccctcagctccaccctcagcagatgataatatcaagacacctgccgagcgtctgcgggggccgcttccaccctcagcggatgataatctcaagacaccttccgagcgtcagctcactgcccttccaccctcagcagatgataatatcaagacacctgccgagcgtctgcgggggccgcttccaccctcagcggatgataatctcaagacaccttccgagcgtcagctcactccccttccaccctcagctccaccctcagcagatgataatatcaagacacctgccttccaccctcagcggatgatctcaagacaccttccgagcgtcagctcactccccttccaccctcagctccaccctcagcagatgataatatcaagatacctgctgagcgtctgcggattccgcttccaccatcagccgatgataatctcaagacaccttccgagcgtcagctcactccccttccaccctcagctccaccctcagcagatgataatatcaagacacctgccgagcgtctgcgggggccgcttccaccctgagcggatgataatctcaagacaccttccgagcgtcagctcactccccttccaccctcagctccaccctcagcagatgataatatcaagacacctgccgagcgtctgcgggggccgcttccaccctcagcagatgataatctcaagacaccttccgagcgtcagctcactccccttccaccctcagctccaccctcagcagatgataatatcaagacacctgccgagcgtctgcgggggccgcttccaccctcagcggatgataatctcaagacaccttccgagcgtcagctcactccccttccaccctcagctccaccctcagcagatgataatatcaagacacctgccgagcgtctgcgggggccgcttccaccctcagcagatgataatctcaagacaccttccgagcgtcagctcactccccttccaccctcagctccaccctcagcagatgataatatcaagacacctgccgagcgtctgcgggggccgcttccaccctcagcggatgataatctcaagacaccttccgagcgtcagctcactccctttccaccctcagctccaccctcagcagatgataatatcaagacacctgccgagcgtctgcggggagcgtctgcgggggccgcttccaccctcagcggatgataatctcaagacaccttccgagcgtcagctcactccccttccaccctcagctccaccctcagcagatgataatgtcaagacacctgccgagcgtctgcgggggccgcttccaccctcagcggacgataatctcaagacaccttccgagcgtcagctcactccccttccaccctcagctccaccctcagcagatgataatatcaagacacctgccgagcgtctgcgggggccgcttccaccctcagcggatgataatctcaagacaccttccgagcgtcagctcactccccttccaccctcagctccaccctcagcagatgataatatcaagacacctgccgagcgtctgcgggggccgcttccaccctcagccgatgataatctcaagacacctcccttagctactcaggaggctgaggcagaaaaaccacgcaaacccaagaggcagagggcggctgagatggaaccacctcccgaacccaagaggcggagggtcggtgacgtggaaccgtcacgcaaacccaagaggcggagggccgctgacgtggaaccatcatcacccgaacccaagaggcggagggtcggtgatgtggaaccgtcacgcaaacccaagaggcggagggccgctgacgtggaaccatcatcacccgaacccaagaggcggagggtcggtgacgtggaaccgtcacgcaaacccaagaggcggagggccgctgacgtggaaccatcattacccgaacccaagaggcggaggttgagctgagaagaggccagtgcactcaagcctgagcaataagaataaaaccgagtagaacaaaataaaaaattc

SEQ ID NO: 4525 - DNA, 3687 bp, Homo sapiens
agaagaggaggggacggctgtcatcaatgaagtcatattcataatctagtcctctctccctctgtttctgtactctgggtgactcagagagggaagagattcagccagcacactcctcgcgagcaagcattactctactgactggcagagacaggagaggtagatgtccacgcccacagaccctggtgcgatgccccacccagggccttcgccggggcctgggccttcccctgggccaattcttgggcctagtccaggaccaggaccatccccaggttccgtccacagcatgatggggccaagtcctggacctccaagtgtctcccatcctatgccgacaatggggtccacagacttcccacaggaaggcatgcatcaaatgcataagcccatcgatggtatacatgacaaggggattgtagaagacatccattgtggatccatgaagggcactggtatgcgaccacctcacccaggcatgggccctccccagagtccaatggatcaacacagccaaggttatatgtcaccacacccatctccattaggagccccagagcacgtctccagctgcagcagaagcagagccgcatcagccccatccagaaaccgcaaggcctggaccccgtggaaattctgcaagagcgggaatacagacttcaggcccgcatagctcataggatacaagaactggaaaatctgcctggctctttgccaccagatttaagaaccaaagcaaccgtggaactaaaagcacttcggttactcaatttccagcgtcagctgagacaggaggtggtggcctgcatgcgcagggacacgaccctggagacggctctcaactccaaagcatacaaacggagcaagcgccagactctgagagaagctcgcatgaccgagaagctggagaagcagcagaagattgagcaggagaggaaacgccgtcagaaacaccaggaatacctgaacagtattttgcaacatgcaaaagattttaaggaatatcatcggtctgtggccggaaagatccagaagctctccaaagcagtggcaacttggcatgccaacactgaaagagagcagaagaaggagacagagcggattgaaaaggagagaatgcggcgactgatggctgaagatgaggagggttatagaaaactgattgatcaaaagaaagacaggcgtttagcttaccttttgcagcagaccgatgagtatgtagccaatctgaccaatctggtttgggagcacaagcaagcccaggcagccaaagagaagaagaagaggaggaggaggaagaagaaggctgaggagaatgcagagggtggggagtctgccctgggaccggatggagagcccatagatgagagcagccagatgagtgacctccctgtcaaagtgactcacacagaaaccggcaaggttctgttcggaccggaagcacccaaagcaagtcagctggacgcctggctggaaatgaatcctggttatgaagttgcccctagatctgacagtgaagagagtgattctgattatgaggaagaggatgaggaagaagagtccagtaggcaggaaaccgaagagaaaatactcctggatccaaatagcgaagaagtttctgagaaggatgctaagcagatcattgagacagctaagcaagacgtggatgatgaatacagcatgcagtacagtgccaggggctcccagtcctactacaccgtggctcatgccatctcggagagggtggagaaacagtctgccctcctaattaatgggaccctaaagcattaccagctccagggcctggaatggatggtttccctgtataataacaacttgaacggaatcttagccgatgaaatggggcttggaaagaccatacagaccattgcactcatcacttatctgatggagcacaaaagactcaatggcccctatctcatcattgttcccctttcgactctatctaactggacatatgaatttgacaaatgggctccttctgtggtgaagatttcttacaagggtactcctgccatgcgtcgctcccttgtcccccagctacggagtggcaaattcaatgtcctcttgactacttatgagtatattataaaagacaagcacattcttgcaaagattcggtggaaatacatgatagtggacgaaggccaccgaatgaagaatcaccactgcaagctgactcaggtcttgaacactcactatgtagcccccagaaggatcctcttgactgggaccccgctgcagaataagctccctgaactctgggccctcctcaacttcctcctcccaacaatttttaagagctgcagcacatttgaacaatggttcaatgctccatttgccatgactggtgaaagggtggacttaaatgaagaagaaactatattgatcatcaggcgtctacataaggtgttaagaccatttttactaaggagactgaagaaagaagttgaatcccagcttcccgaaaaagtggaatatgtgatcaagtgtgacatgtcagctctgcagaagattctgtatcgccatatgcaagccaaggggatccttctcacagatggttctgagaaagataagaaggggaaaggaggtgctaagacacttatgaacactattatgcagttgagaaaaatctgcaaccacccatatatgtttcagcacattgaggaatcctttgctgaacacctaggctattcaaatggggtcatcaatggggctgaactgtatcgggcctcagggaagtttgagctgcttgatcgtattctgccaaaattgagagcgactaatcaccgagtgctgcttttctgccagatgacatctctcatgaccatcatggaggattattttgcttttcggaacttcctttacctacgccttgatggcaccaccaagtctgaagatcgtgctgctttgctgaagaaattcaatgaacctggatcccagtatttcattttcttgctgagcacaagagctggtggcctgggcttaaatcttcaggcagctgatacagtggtcatctttgacagcgactggaatcctcatcaggatctgcaggcccaagaccgagctcaccgcatcgggcagcagaacgaggtccgggtactgaggctctgtaccgtgaacagcgtggaggaaaagatcctcgcggccgcaaaatacaagctgaacgtggatcagaaagtgatccaggcgggcatgtttgaccaaaagtcttcaagccacgagcggagggcattcctgcaggccatcttggagcatgaggaggaaaatgaggaagaagatgaagtaccggacgatgagactctgaaccaaatgattgctcgacgagaagaagaatttgacctttttatgcggatggacatggaccggcggagggaagatgcccggaacccgaaacggaagccccgtttaatggaggaggatgagctgccctcctggatcattaaggatgacgctgaagtagaaaggctcacctgtgaagaagaggaggagaaaatatttgggagggggtcccgccagcgccgtgacgtggactacagtgacgccctcacggagaagcagtggctaagggccatcgaagacggcaatttggaggaaatggaagaggaagtacggcttaagaagcgaaaaagacgaagaaatgtaaataaaattccagtaatttcg

SEQ ID NO: 4526 - DNA, 1794 bp, Homo sapiens
ataaacaaggaacccgactggttagacagattttgtttttcttcttcccgcgcgctttagctccctgtcctttggtcgcatttgtgggcgcgcggcacgcagccgggaggccgaggactcggagttcacctgcaggaaagtatgcctcagactcctcccttttcagcaatgtttgacagcagtggttacaatcgaaacctctatcagtctgcagaggacagctgtggagggttgtattaccatgacaacaacctcctctctggatccctggaagcactcatccagcacttagtacctaatgtggattactatccagataaccagatgagaaaaattgcacccaaaatccttcaactcctcacggaatggacggaaacatttccctatgattttcgggatgaaagaatgatgagaaacttaaaagatctggctcaccgaatagccagtggcgaagagacatacagaaagaatgtccagaaatgatgcagtgtctgatccgcaagcttgctgcgctcagccagtacgaagaagtcctggcaaaaatcagctccacatccacagatcggctcacagttctcaagaccaagccacagtctatacaaagggatatcattactgtctgcaacgacccttacacgttggcccagcagctgactcatatagagctggagaggctcaattatattgggccagaagaatttgttcaggcgttcgtgcagaaggaccctttggataatgacaagagttgctacagtgaacggaagaaaacacgaaacttagaagcttacgtggaatggtttaatcgcctcagctacttggttgctacagaaatctgtatgcctgttaagaaaaaacaccgagcaagaatgattgagtatttcattgacgtagctcgggagtgttttaacattggcaacttcaactccttgatggcgataatctctggtatgaatatgagcccagtctctcgactaaaaaaaacttgggccaaagtgaagactgcaaaatttgacattcttgagcatcagatggacccttcaagcaatttctataattatcgaacagctcttcgtggggcagcacaaaggtctttaactgctcatagtagtagagaaaagattgtgataccattcttcagtctcttaatcaaagatatttatttcctcaatgagggttgtgccaaccgccttcccaatggccatgtcaattttgagaaattttgggaactggccaaacaagtgagtgaatttatgacatggaaacaagtggagtgtccatttgagagggaccggaagatcttgcagtatctgctcacagtaccagtcttcagtgaagatgctctctacttggcttcttatgagagtgaaggacctgaaaatcatatagagaaagacagatggaagtctttaaggtcgagcctcttaggcagagtttaacacatgggagctgcctgcctgctgctgctgctgcttcctgcagatcatggaggggctggcctttgttttctggcatcttgtaccacgaacactcatgaagaccctgcagtcattggagcacccgggtcagcaaagcacacaagctcactcaagaccagatggagaacttatttcctgcagctgacagatatactcagattttgtgagactgaaatgttcactgaagacacttgagaaagaatcctctaaaaatcccggctctgcacattattcatctcctggaatttccatgtgaatcacagctctgcacctggatggagttttcttttgtgtgtgtgtgttttttttaatttggttg

SEQ ID NO: 4527 - DNA, 1983 bp, Homo sapiens
atttttccacccagcaggatgggtgatgctgagagctgcctgctcagacaacagacacgcgaggtcaggaagaagccgcttataaattaccgcttccttcgcgccgccgccaacgccgagccccgaggaccgcaagcccagaggacaagctgcgccaagagggagtgcggagcgttcacccagcgggtcagagagcgagcgggcaggcagcccccggccggcggaacccggcacagccgagcagagcgcgggcggcgccgcagccaccccagatccagaaccagaaccacagcccttctgaggagctcccaaacaaagcaaggagatggccaccaaggagaagctgcagtgtctgaaagatttccacaaggacatcctgaagccctcaccagggaagagcccaggcacgcggcctgaggacgaggctgagggaaaacctccgcagagggagaagtggtctagcaagatcgactttgtgctctctgtggctggcggcttcgtgggcttgggcaacgtctggcgcttcccgtacctctgctacaagaatggtggaggtgcgtttctcataccgtattttattttcctgtttgggagcggcctgcctgtgtttttcttggagatcatcataggccagtacacctctgaagggggcatcacctgttgggaaaagatctgccccttgttctctggtatcggctatgcctccgttgtaattgtgtccctcctgaatgtctactacatcgtcatcctggcctgggccacatactacctgttccagtccttccagaaggagctgccctgggcacactgcaaccacagctggaacacacctcactgcatggaggacaccatgcgcaagaacaagagtgtctggatcaccatcagctccaccaacttcacctcccctgtcatcgagttctgggggcgcaacgtgctgagcttgtcccctgtaatcgaccacccaggctctctgaaatgggacctcgctctctgccttcttttagtctggctagtgtgtttcttctgcatctggaagggcgtcaggtccactgggaaggtcgtctacttcacagccacttttccattcgccatgctcctggtgctgctggtccgagggctgacgctgccgggcgcgggcgcaggcatcaagttctatctgtatcctgacatcacccgccttgaggacccacaggtgtggattgacgctgggactcagatattcttctcttatgccatctgcctgggggctatgacctcgctggggagctacaacaagtacaagtataactcgtacaggtcctggcctggccttcattgcctacccaaaagctgtgacaatgatgccgctgcccacattttggtccattcttttttttattatgcttctcttgcttggactggatagccagtttgttgaagttgaaggacagatcacatccttggttgatctttacccatccttcctaaggaagggttatcgtcgggaaatcttcatcgccttcgtgtgtagcatcagctacctgctggggctgacgatggtgacggagggtggcatgtatgtgtttcagctctttgactactatgcagctagcggtgtatgccttttgtgggttgcattctttgaatgttttgttattgcctggatatatggtgagtacagattttttcatgtcctttctcaaggctctcctttgggcttctctacttagaagcttcagaagcagagaatactaacaggaattcaatttgagttgaacagtaggccctccctacctagactacacaaataatctcactgtagccacactgaagatcctcctggtgctaaaggtgtgaggtgtgactggatgttttcacagattcagaacttggttgtgcaggacctggaatactccttttttatctccttgaggccttgggtttgagtttgggctgtgcctaagattgcacacctagggtttggagtgtgcctcagattgccag

SEQ ID NO: 4528 - DNA, 1003 bp, Homo sapiens
acaccctccgcctggacgcagcagccaccgccgcgtccctctctccacgaggctgccggcttaggacccccagctccgacatgtcgccctctggtcgcctgtgtcttctcaccatcgttggcctgattctccccaccagaggacagacgttgaaagataccacgtccagttcttcagcagacgcaactatcatggacattcaggtcccgacacgagccccagatgcagtctacacagaactccagcccacctctccaaccccaacctggcctgctgatgaaacaccacaaccccagacccagacccagcaactggaaggaacggatgggcctctagtgacagatccagagacacacaagagcaccaaagcagctcatcccactgatgacaccacgacgctctctgagagaccatccccaagcacagacgtccagacagacccccagaccctcaagccatctggttttcatgaggatgaccccttcttctatgatgaacacaccctccggaaacgggggctgttggtcgcagctgtgctgttcatcacaggcatcatcatcctcaccagtgagaactggggttgggtgggaaggacaccaagaccaggagggggacttatgacggagggctgggttctcaaaggtccctgggcaattttgttttaaatgaggtatctattagctgcatatccatacaaaccaccacagaattcagtggtttaaaataatgaccatttattgagctctcaataccacagtttggaaacataggctgggctcagctgggtgattcttctggtctcaactggatttactcttgcatctgagttcagttgtgggtcagcaggaaactttgtttctggggtgccttggctctttgccacatcatcttatccttcactaagctagcctgggcttgttcgcatggtggtggcagggatctaagatagcgtgaatgcatgcaggctcagaactggccattatcacttctgcctcattccata

SEQ ID NO: 4529 - DNA, 1407 bp, Homo sapiens
gaaagttacctgtggccgcccaagtccgccactttctgctctgtgtctgcccattgccacgatccaggaggactccgcgccgcccggccgcctccgagctcgggccccatgtgaggggcccccccttatcccacctttccggctaggtgagggcgcgagcgggcgagcgagcgagagtggtgaggggggacggaaaagcagaattacctgtagctcttgttctgccatctcgggcgctctcacacaccttcacctgcacagacttgaaagtccagtttcaccagaggctgaggctccaggaaaaggggagcaagttcattggatcaaacatgtcacaagagtcggacaataataaaagactagtggccttagtgcccatgcccagtgaccctccattcaatacccgaagagcctacaccagtgaggatgaagcctggaagtcatacttggagaatcccctgacagcagccaccaaggccatgatgagcattaatggtgatgaggacagtgctgctgccctcggcctgctctatgactactacaaggttcctcgagacaagaggctgctgtctgtaagcaaagcaagtgacagccaagaagaccaggagaaaagaaactgccttggcaccagtgaagcccagagtaatttgagtggaggagaaaaccgagtgcaagtcctaaagactgttccagtgaacctttccctaaatcaagatcacctggagaattccaagcgggaacagtacagcatcagcttccccgagagctctgccatcatcccggtgtcgggaatcacggtggtgaaagctgaagatttcacaccagttttcatggccccacctgtgcactatccccggggagatggggaagagcaacgagtggttatctttgaacagactcagtatgacgtgccctcgctggccacccacagcgcctatctcaaagacgaccagcgcagcactccggacagcacatacagcgagagcttcaaggacgcagccacagagaaatttcggagtgcttcagttggggctgaggagtacatgtatgatcagacatcaagtggcacatttcagtacaccctggaagccaccaaatctctccgtcagaagcagggggagggccccatgacctacctcaacaaaggacagttctatgccataacactcagcgagaccggagacaacaaatgcttccgacaccccatcagcaaagtcagggtaggggccacatttctcagataaagtacaaaggaatccgatgaacggaatggctacctcacagccttgtggaatggcatggaaaaaaaataaaaccttcaacataaataattctagaacgaatgtcagagagttggggcaagagcacttattggctcgtagttgatcattgtaatcagtaaccagt

SEQ ID NO: 4530 - DNA, 2485 bp, Homo sapiens
acacggagcggcgcccgggagctatgagccatgaagccgcccggcagcagctcgcggcagccgcccctggcgggctgcagccttgccggcgcttcctgcggcccccaacgcggccccgccggctcggtgcctgcctgcgcccagcgctccgcattggaatgaaactgcagaaaaaaatttgggagtcctggcagatgaagacaatacattgcaacagaatagcagcagtaatatcagttacagcaatgcaatgcagaaagaaatcacactgccttcaagactcatatattacatcaaccaagactcggaaagcccttatcacgttcttgacacaaaggcaagacaccagcaaaaacataataaggctgtccatctggcccaggcaagcttccagattgaagccttcggctccaaattcattcttgacctcatactgaacaatggtttgttgtcttctgattatgtggagattcactacgaaaatgggaaaccacagtactctaagggtggagagcactgttactaccatggaagcatcagaggcgtcaaagactccaaggtggctctgtcaacctgcaatggacttcatggcatgtttgaagatgataccttcgtgtatatgatagagccactagagctggttcatgatgagaaaagcacaggtcgaccacatataatccagaaaaccttggcaggacagtattctgagcaaatgaagaatctcactatggaaagaggtgaccagtggccctttctctctgaattacagtggttgaaaagaaggaagagagcagtgaatccatcacgtggtatatttgaagaaatgaaatatttggaacttatgattgttaatgatcacaaaacgtataagaagcatcgctcttctcatgcacataccaacaactttgcaaagtccgtggtcaaccttgtggattctatttacaaggagcagctcaacaccagggttgtcctggtggctgtagagacctggactgagaaggatcagattgacatcaccaccaaccctgtgcagatgctccatgagttctcaaaataccggcagcgcattaagcagcatgctgatgctgtgcacctcatctcgcgggtgacatttcactataagagaagcagtctgagttactttggaggtgtctgttctcgcacaagaggagttggtgtgaatgagtatggtcttccaatggcagtggcacaagtattatcgcagagcctggctcaaaaccttggaatccaatgggaaccttctagcagaaagccaaaatgtgactgcacagaatcctggggtggctgcatcatggaggaaacaggggtgtcccattctcgaaaattttcaaagtgcagcattttggagtatagagactttttacagagaggaggtggagcctgccttttcaacaggccaacaaagctatttgagcccacggaatgtggaaatggatacgtggaagctggggaggagtgtgattgtggttttcatgtggaatgctatggattatgctgtaagaaatgttccctctccaacggggctcactgcagcgacgggccctgctgtaacaatacctcatgtctttttcagccacgagggtatgaatgccgggatgctgtgaacgagtgtgatattactgaatattgtactggagactctggtcagtgcccaccaaatcttcataagcaagacggatatgcatgcaatcaaaatcagggccgctgctacaatggcgagtgcaagaccagagacaaccagtgtcagtacatctggggaacaaaggctgcagggtctgacaagttctgctatgaaaagctgaatacagaaggcactgagaagggaaactgcgggaaggatggagaccggtggattcagtgcagcaaacatgatgtgttctgtggattcttactctgtaccaatcttactcgagctccacgtattggtcaacttcagggtgagatcattccaacttccttctaccatcaaggccgggtgattgactgcagtggtgcccatgtagttttagatgatgatacggatgtgggctatgtagaagatggaacgccatgtggcccgtctatgatgtgtttagatcggaagtgcctacaaattcaagccctaaatatgagcagctgtccactcgattccaaggatgaaggacccaaggcctgttttctgaagcggacgaagtgcaaatcatatccaaagcatagaaaatgtcaagaagagaaggttcgatcctactcagcaaggccccatctgaatcagctgcgctggatggacaccgccttgcactgttggattctgggtatgacatactcgcagcagtgttactggaactattaagtttgtaaacaaaacctttgggtggtaatgactacggagctaaagttggggtgacaaggatggggtaaaagaaaactgtctcttttggaaataatgtcaaagaacacctttcaccacctgtcagtaaacggggga

SEQ ID NO: 4531 - DNA, 1504 bp, Homo sapiens
gagagggccaagaaatcgggcgccggcaccggcaaacagcagcacccgagcaaaccccagcaagatgcggaggctgcctcggcggagcagaggaaccacacgctgatcatggagcagcatccagttggacttccccgaaccacaggccccatgcagtcctccgtgcccccaggctcaggtggcatggtctcaggagccagtcccgcaggccccggcttcctgggcagccagccccaagcagccatcatgaagcagatgctcattgatcagcgggcccagttgatagagcagcagaagcaacagttcctgcgggagcaaaggcagcagcagcagcagcagcagcagattttggcggaacagcagttgcagcaatcacatctatcccggcagcacctccagccacagcggaatccatacccagtgcagcaggtcaatcagtttcaaggttctccccaggatatagcagccgtaagaagccaagcagccctccagagcatgcgaacgtcacggctgatggcacagaacgcaggcatgatgggaataggaccctcccagaaccctgggacgatggccaccgcagctgcgcagtcggagatgggactggccccttatagcaccacgcctaccagccaaccaggaatgtacaatatgagcacaggcatgacccaaatgttgcagcatccaaaccaaagtggcatgagcatcacacataaccaagcccagggaccgaggcaacctgcctctgggcagggggttggaatggtgagtggctttggtcagagcatgctggtgaactcagccattacccagcaacatccacagatgaaagggccagtaggccaggccttgcctaggccccaagcccctccaaggctgcagagccttatgggaacagtccagcaaggagcacaaagctggcaacagaggagcttgcagggcatgcctgggaggactagtggagaattgggaccattcaacaatggcgccagctaccctcttcaagctgggcagccgagactgaccaagcagcacttcccacagggactgagccagtcagtcgtggatgctaacacgggcacagtgaggaccctcaacccagctgccatgggtcggcagatgatgccatcgctcccggggcagcaaggcaccagccaggcgaggccaatggtcatgtctggcctgagccagggagtcccaggcatgccagcgttcagccagcacccagcacagcagcagatacccagtggcagctttgctccaagcagccagagccaagcctatgagcggaatgcccctcaggacgtgtcatacaattacagtggcgacggagctgggggttccttccctggcctcccggacggtgcagaccttgtggactccatcatcaaaggcgggccaggggacgagtggatgcaggagcttgatgaattgtttggtaacccctaatcaagagaggccccaagatccacaactcgagtggttaaagcttaaaaagtgaaaaaga

SEQ ID NO: 4532 - DNA, 923 bp, Homo sapiens
attcttttattcttgtctgttctgcctcactcccgagctctactgactcccaaaagagcgcccaagaagaaaatggccataagtggagtccctgtgctaggatttttcatcatagctgtgctgatgagcgctcaggaatcatgggctatcaaagaagaacatgtgatcatccaggccgagttctatctgaatcctgaccaatcaggcgagtttatgtttgactttgatggtgatgagattttccatgtggatatggcaaagaaggagacggtctggcggcttgaagaatttggacgatttgccagctttgaggctcaaggtgcattggccaacatagctgtggacaaagccaacctggaaatcatgacaaagcgctccaactatactccgatcaccaatgtacctccagaggtaactgtgctcacgaacagccctgtggaactgagagagcccaacgtcctcatctgtttcatcatcaagggagtgcgcaaaagcaatgcagcagaacgcagggggcctctgtaaggcacatggaggtgatggtgtttcttagagagaagatcactgaagaaacttctgctttaatgactttacaaagctggcaatattacaatccttgacctcagtgaaagcagtcatcttcagcgttttccagccctatagccaccccaagtgtggttatgcctcctcgattgctccgtactctaacatctagctggcttccctgtctattgccttttcctgtatctattttcctctatttcctatcattttattatcaccatgcaatgcctctggaataaaacatacaggagtctgtctctgctatggaatgccccatggggcatctcttgtgtacttattgtttaaggtttcctcaaactgtgatttttctgaacacaataaactattttgatgatcat

SEQ ID NO: 4533 - DNA, 1711 bp, Homo sapiens
aaaaaaaaaaaaaaaaaaaaaaaaatctggtttacaccggctcctgccctgccttcactcttctcccctgattcaagactcctctgctttggactgaagcactgcaggagtttgtgaccaagaacttcaagagtcaagacagaaggaagccaagggagcagtgcaatggatttctcagtaaaggtagacatagagaaggaggtgacctgccccatctgcctggagctcctgacagaacctctgagcctagattgtggccacagcttctgccaagcctgcatcactgcaaagatcaaggagtcagtgatcatctcaagaggggaaagcagtggcagaagagagatgtctgtgagcaccatggaaaaaaactccagatcttctgtaaggaggatggaaaagtcatttgctgggtttgtgaactgtctcaggaacaccaaggtcaccaaacattccgcataaacgaggtggtcaaggaatgtcaggaaaagctgcaggtagccctgcagaggctgataaaggaggatcaagaggctgagaagctggaagatgacatcagacaagagagaaccgcctggaagaattatatccagatcgagagacagaagattctgaaagggttcaatgaaatgagagtcatcttggacaatgaggagcagagagagctgcaaaagctggaggaaggtgaggtgaatgtgctggataacctggcagcagctacagaccagctggtccagcagaggcaggatgccagcacgctcatctcagatctccagcggaggttgaggggatcgtcagtagagatgctgcaggatgtgattgacgtcatgaaaaggagtgaaagctggacattgaagaagccaaaatctgtttccaagaaactaaagagtgtattccgagtaccagatctgagtgggatgctgcaagttcttaaagagctgacagatgtccagtactactgggtggacgtgatgctgaatccaggcagtgccacttcgaatgttgctatttctgtggatcagagacaagtgaaaactgtacgcacctgcacatttaagaattcaaatccatgtgatttttctgcttttggtgtcttcggctgccaatatttctcttcggggaaatattactgggaagtagatgtgtctggaaagattgcctggatcctgggcgtacacagtaaaataagtagtctgaataaaaggaagagctctgggtttgcttttgatccaagtgtaaattattcaaaagtttactccagatatagacctcaatatggctactgggttataggattacagaatacatgtgaatataatgcttttgaggactcctcctcttctgatcccaaggttttgactctctttatggctgtgcctccctgtcgtattggggttttcctagactatgaggcaggcattgtctcatttttcaatgtcacaaaccacggagcactcatctacaagtcctctggatgtcgcttttctcgacctgcttatccgtatttcaatccttggaactgcctagtccccatgactgtgtgcccaccgagctcctgagtgttctcattcctttacccacttctgcatagtagcccttgtgctgagactcagattctgcacctgagttcatctctactgagaccatctcttcctttctttccccttcttttacttagaatgtctttgtattcatttgctagggcttccatagc

SEQ ID NO: 4534 - DNA, 1434 bp, Homo sapiens
ttcctgttgccgcgatccgggccgggagctgcgggcgcccgggcgcccgaggcttcccggtgcgctccgccaggtcagtcatcgctagagggttattattgacatttactcatcataaaatgtgatgtcagcctaccagctcggagtgcagttcctggtttccagtttacaacattgaccagttgctaacatgttatctctgaggaacttggaatgataaatacagccatacttaaatagaagattcttggccgtgtagataaggaaaataagataaggcaatatttttgaactattctataatagaaatgaggatatatacacaaaatgacccaatgctgttttcttagggtgcatcctttgtttttctggttttggtcttttcatcacaggatggcattagctctgtgtctgcaggtgctgtgcagcctgtgtggctggctctcgctctatatttctttctgccacctgaataagcaccgaagctatgagtggagctgccgcctggtcaccttcacccatggagtcctctctataggcctctccgcttatattggcttcattgatggcccatggccttttacccacccaggctcacccaatacacctctccaagttcatgtcctgtgtctcaccttgggctacttcatcttcgacttgggctggtgcgtctactttcagtctgagggtgccttgatgctggctcatcacacattgagtatcttgggcattatcatggcccttgtgcttggggagtctggcacagaggtcaatgcagtcccctttggaagtgagcttaccaaccccttgctacagatgcgctggtttctccgggaaacagggcactatcacagtttcactggagatgtagtggacttcctctttgtggctctgttcacaggagtgaggattggtgtgggagcttgcctccttttctgtgaaatggtctcccccacgcctaagtggtttgtgaaggctgggggagtagcgatgtatgctgtgtcttggtgtttcatgtttagcatctggcgctttgcatggaggaagagcatcaagaagtaccatgcttggagaagcaggcggagtgaggaacggcagctgaaacacaacggacatctcaaaatacactagccaaggcttgctccagattatggattgggttaagtcagccatgggaaccaggttggaaatatgactgttacataattacacttataacaaacttaggtttcaataaagggctaaatgtattgatcaatttggtcagtcttcaagccgagcatataccagtattaaaacactaacttctacagtagcacagttgtagaaagtgagaatactccatggtagttgggaataagtgagaactgtgaagtgagtacaactggcatttgttttcatttgtggtgaccctgggtcctcctgtccctggga

SEQ ID NO: 4535 - DNA, 3310 bp, Homo sapiens
gtttccttcaggaactttcagatggctcaggagtggagcttttgtggcagttcctgacaggataaggacaagaagcaacacacagaagagaaggaaaaagaaagaaaactgaccaatatgagtgttagtttgcagaattactctcctatgatggcacagaaatcacaaggatctgacaaccttcaggaaggccaggaaaagagcaagagagagatcctgaagtgcaccaaaagcgcgtgggatccgctggatgagtggctgccccctgaccctgaggaggaaagccagagtctcaccatccccatgctggaagattccaagcaagaaagtattcagcagtggctggactctggattctttgtctctgcaaatgaaaactttcaacaagtcattgaccgcactgtttctttgtatgaacaagggatggttcaaatgactgtgaaagactacatgagatctttgcatcagttttcagaaactcccatcctatccagaggtaccagtttcaactcttgctattctactgcaagtgtaccacaaagcattcctgaatggctggaattttgggagatagatccagtggagattctcttggatctggggtttggtgctgatgagccagacatctgcatgcaaatcccagccagattccttggttgtggctcagcagccagaggaatcaacatccgtgtttttcttgaagctcaaaagcagcgaatggacattgagaaccccaacttgtacggtcgtttccgacagctggaaatcctggaccatgtgaccaatgccttctcatctctgctgagtgatgtcagcatcctgccaaacagagctgaagagaaagctggaggagagagtgtgcaaagaacctcagtgagtgccgccaaagagcatcgaagaagaatgggtaaactcttaaggagagcttccaaacagaacatcaggcgggattgtaacccagaggtatcagagtccttcaaggtgaaggatgaagtttttgtcccctttacaaaaccatgggattgtggagcagagctagcagcaacctcaatcaaccacaagcaaaatcatttgtctctgtcagtagaacatcagtctctccaagcctgtgatgatttgctaccttatcctcctcatggtcttctgagcaagcagtggccttgctcatctatgccggccaagcaggctcctccttcctgtgtgtctgaggggtcagtcaagggcagaactcagaaggagaacttatttcagactaacaagctcaagagcttgtctcgtcttgcaggcaaaggaccagactcatttgaaatggaagaggtccaaagctttgaagaagagactggtaatcctcttgacatgacttcaggaactgtaggtgccagggtggacagagcaaatagctgccagtctgacagcagcgggttcctggaggagccgctggaaccgctgcccctccagatgccttccttgccaaacagccagagtcctgctgagaatggaggtagaaagccaagagatcagagccacagcttagtatcatcccaggactgtcagctagagtcggatgggccagattccaaaagtagggcgagcatgtctttttcaagccaagaagtgaatgccttggaacaaagggcctcagtatctgtgatggaggaagagtttctgcttgaggccatggaggggccaccagagctgtatatcccagacatggcctgtgccaagaccaccacgaggggagaatgcccaaggaaagacagccatctgtggcagcttctgccaatgccccatgctgagtatgaggtcaccagacccacagccacttccaaatatgatcatcctctggggtttatggtaacccacgtcacagaaatgcaggacagttttgtgaggcctgagggagctggcaaagtgcaaagccaccacaatgagtctcaaaggtcacctggaaatgatcatactcaagacaagttccttcatgttgactctgaggccccacgagaagaggaaagcagtggattctgtcctcacaccaaccacagcttactcgtaccagaaagctcatcacagtgtatccccaagcacagtgagatcacaccttatgcaactgaccttgctcaaacatctgaaaagctcattccccacctccataaactgcctggagatcctgcccaggtgaagtcaaggtctggtactttgggtcagatactacctgggacagaagctgagatggaaaaccttcctctaaatactggcagctccaggtctgtaatgacccagatgtcctccagcctggtgtcggctgctcagagggctgtggccttggggactggtcccagaggaacatctttagaatgcactgtgtgtgatcctgttaccgcaacagaaacaagactggggacaaaagcaagacagttaaatgatgcttccattcagacttcagctctaagcaacaagaccttgacacatgggccccagcccctcaccaaatccgtctctctagactcaggcttctctagtatctgcccaatgggcacctgccatgctatacctgcccactgctgcatctgctatcatcaccaccctcactgccacggggagaggcaaagccctggccctgaaccctcagtctgtaggcactgcctgtgttcactaactggtcaccaggaagcccagttcatgacgactttgaaagcccttcaggacactacagtgagggagctatgttcctgcacagtccatgagatggaagccatgaagacgatatgccaaagtttccgggagtatttagaagaaattgaacagcaccttatgggacagcaggccctcttttccagggacatgtcagaggaggaaagggaggaggccgagcaactgcaaacgttacgtgaggccctgaggcagcaggtggcagagttggaatttcagttaggagaccgggctcagcaaatcagagaagggattttactgcagctggaggttctcacagcagagccacctgaacactattcaaatctgcatcaatataactggatagaagaaagcaatgggcagacttcatgttctaaaatccacccaggcatggccccgaggactgtgtttcctcccgatgatggccaggaggctccctgttcaggtgggacccagttggctgccttcactccacccaccttggagaacagcaccaggatgtctccttcatcatcagcttgggcaaagttaggtccaacccctttgtcaaattgtcctgttggagaaaaggatgcagatgtcttcctctagatcagagcaggtttgttaaccttcatac

SEQ ID NO: 4536 - DNA, 829 bp, Homo sapiens
ctctccggccgcgcagccgctgccgcccacccgcacccgccgtcatgctccgggccgcgctgcccgcgctcctgctgccgttgctgggcctcgccgctgctgccgtcgcggactgtccttcatctacttggattcagttccaagacagttgttacatttttctccaagaagccatcaaagtagaaagcatagaggatgtcagaaatcagtgtactgaccatggagcggacatgataagcatacataatgaagaagaaaatgcttttatactggatactttgaaaaagcaatggaaaggcccagatgatatcctactaggcatgttttatgacacagatgtcccatacaaaaggaaatatttatcagataaccacattttaatatcagcattggtgattgctagcacggtaattttgacagttttgggagcaatcatttggttcctgtacaaaaaacattctgattctcgtttcaccacagttttttcaaccgcaccccaatcaccttataatgaagactgtgttttggtagttggagaagaaaatgaatatcctgttcaatttgactaagtttttggtaatcttgcactaagacatcaacaaaatgccctggcagagataacttgggaaagattttaatataaaacttgacattggatattagagctttaatggtattccttattccagtaacatttttatgtactcatctgctgtgaagtctttaggttcattaaaaaaacaggttttagaaatgatcttagatctaatatagtgattttaagcatcccgtcaaaggcagaatctgtcacttgaatgaaggaaagctt

SEQ ID NO: 4537 - DNA, 646 bp, Homo sapiens
attcttgtctgttctgcctcactcccgagctctactgactcccaacagagcgcccaagaagaaaatggccataagtggagtccctgtgctaggatttttcatcatagctgtgctgatgagattttccatgtggatatggcaaagaaggagacggtctggcggcttgaagaatttggacgatttgccagctttgaggcccaaggtgcattggccaacatagctgtggacaaagccaacctggaaatcatgacaaagcgctccaactatactccgatcaccaatgtacctccagaggtaactgtgctcacgaacagccctgtggaactgagagagcccaacgtcctcatctgtgtcatagacaagttcaccccaccagtggtcaatgtcacgtggcttcgaaatggaaaacctgtcaccacaggagtgtcagagacagtcttcctgtctattgccttttcctgtatctattttcctctatttcctatcattttattatcaccatgcaatgcctctggaataaaacatacaggagtctgtctctgctatggaatgccccatggggcatctcttgtgtacttattgtttaaggtttcctcaaactgtgatttttctgaacacaataaactattttgaagatcttgggtgg

SEQ ID NO: 4538 - DNA, 1177 bp, Homo sapiens
agctatgtccagaaaggagaatacagaacgaatcctgaagacatctaccccagcaaccctactgatgatgacgtgagcagcggctcctccagtgaaaggagcagcacttcaggaggttacatcttttacaccttttctactgtacaccccatcccagacgaagacagtccctggatcaccgacagcacagacagaatccctgctaccaatatggactccagtcatagtacaacgcttcagcctactgcaaatccaaacacaggtttggtggaagatttggacaggacaggacctctttcaatgacaacgcagcagagtaattctcagagcttctctacatcacatgaaggcttggaagaagataaagaccatccaacaacttctactctgacatcaagcaataggaatgatgtcacaggtggaagaagagacccaaatcattctgaaggctcaactactttactggaaggttataccactcattacccacacacgaaggaaagcaggaccttcatcccagtgacctcagctaagactgggtcctttggagttactgcagttactgttggagattccaactctaatgtcaatcgttccttatcaggagaccaagacacattccaccccagtggggggtcccataccactcatggatctgaatcagatggacactcacatgggagtcaagaaggtggagcaaacacaacctctggtcctataaggacaccccaaattccagaatggctgatcatcttggcatccctcttggccttggctttgattcttgcagtttgcattgcagtcaacagtcgaagaaggtgtgggcagaagaaaaagctagtgatcaacagtggcaatggagctgtggaggacagaaagccaagtggactcaacggagaggccagcaagtctcaggaaatggtgcatttggtgaacaaggagtcgtcagaaactccagaccagtttatgacagctgatgagacaaggaacctgcagaatgtggacatgaagattggggtgtaacacctacaccattatcttggaaagaaacaaccgttggaaacataaccattacagggagctgggacacttaacagatgcaatgtgctactgattgtttcattgcgaatcttttttagcataaaattttctactctttttgttttttgtgttttgt

SEQ ID NO: 4539 - DNA, 2463 bp, Homo sapiens
actgcctgtaaagccctcgcatgagaggccagcctgctagggaaatccaggaatctgcaacaaaaacgatgacagtctgaaatactctctggtgccaacctccaaattctcgtctgtcacttcagacccccactagttgacagagcagcagaatttcaactccagtagacttgaatatgcctctgggcaaagaagcagagctaacgaggaaagggatttaaagagtttttcttgggtgtttgtcaaacttttattccctgtctgtgtgcagaggggattcaacttcaatttttctgcagtggctctgggtccagccccttacttaaagatctggaaagccatgaacagtcagcagaacagggcaagagttctagccaagagctgggattgaaggatcaagaggacagtgatggtcacttaagtgtgaatttggagtatgcaccaactgaaggtacattggacataaaagaagatatgagtgagcctcaggagaaaaaactctcagagaacactgattttttggctcctggtgttagttccttcacagattctaaccaacaagaaagtatcacaaagagagaggaaaaccaagaacaacctagaaattattcacatcatcagttgaacaggagcagtaaacatagccaaggcctaagggatcaaggaaaccaagagcaggatccaaatatttccaatggagaagaggaagaagaaaaagagccaggtgaagttggtacccacaatgataaccaagaaagaaagacagaattgcccagggagcatgctaacagcaagcaggaggaagacaatacccaatctgatgatattttggaagagtctgatcaaccaactcaagtaagcaagatgcaggaggatgaatttgatcagggtaaccaagaacaagaagataactccaatgcagaaatggaagaggaaaatgcatcgaacgtcaataagcacattcaagaaactgaatggcagagtcaagagggtaaaactggcctagaagctatcagcaaccacaaagagacagaagaaaagactgtttctgaggctctgctcatggaacctactgatgatggtaataccacgcccagaaatcatggagttgatgatgatggcgatgatgatggcgatgatggcggcactgatggccccaggcacagtgcaagtgatgactacttcatcccaagccaggcctttctggaggccgagagagctcaatccattgcctatcacctcaaaattgaggagcaaagagaaaaagtacatgaaaatgaaaatataggtaccactgagcctggagagcaccaagaggccaagaaagcagagaactcatcaaatgaggaggaaacgtcaagtgaaggcaacatgagggtgcatgctgtggattcttgcatgagcttccagtgtaaaagaggccacatctgtaaggcagaccaacagggaaaacctcactgtgtctgccaggatccagtgacttgtcctccaacaaaaccccttgatcaagtttgtggcactgacaatcagacctatgctagttcctgtcatctattcgctactaaatgcagactggaggggaccaaaaaggggcatcaactccagctggattattttggagcctgcaaatctattcctacttgtacggactttgaagtgattcagtttcctctacggatgagagactggctcaagaatatcctcatgcagctttatgaagccaactctgaacacgctggttatctaaatgagaagcagagaaataaagtcaagaaaatttacctggatgaaaagaggcttttggctggggaccatcccattgaccttctcttaagggactttaagaaaaactaccacatgtatgtgtatcctgtgcactggcagtttagtgaacttgaccaacaccctatggatagagtcttgacacattctgaacttgctcctctgcgagcatctctggtgcccatggaacactgcataacccgtttctttgaggagtgtgaccccaacaaggataagcacatcaccctgaaggagtggggccactgctttggaattaaagaagaggacatagatgaaaatctcttgttttgaacgaagattttaaagaactcaactttccagcatcctcctctgttctaaccacttcagaaatatatgcagctgtgatacttgtagatttatatttagcaaaatgttagcatgtatgacaagacaatgagagtaattgcttgacaacaacctatgcaccaggtatttaacattaactttggaaacaaaaatgtacaattaagtaaagtcaacatatgcaaaatactgtacattgtgaacagaagtttaattcatagtaatttcactctctgcattgacttatgagataattaatgattaaactattaatgataaaaataatgcatttgtattgttcataatatcatgtgcacttcaagaaaatggaatgct

SEQ ID NO: 4540 - DNA, 1230 bp, Homo sapiens
aggactgatgtctgaattaactaaatgaacttgtctggtttgcagagtgctgatggcagagattggtgaggatttggataaatctgatgtgtcctcattaattttcctcatgaaggattacatgggccgaggcaagataagcaaggagaagagtttcttggaccttgtggttgagttggagaaactaaatctggttgccccagatcaactggatttattagaaaaatgcctaaagaacatccacagaatagacctgaagacaaaaatccagaagtacaagcagtctgttcaaggagcagggacaagttacaggaatgttctccaagcagcaatccaaaagagtctcaaggatccttcaaataacttcaggctccataatgggagaagtaaagaacaaagacttaaggaacagcttggcgctcaacaagaaccagtgaagaaatccattcaggaatcagaagcttttttgcctcagagcatacctgaagagagatacaagatgaagagcaagcccctaggaatctgcctgataatcgattgcattggcaatgagacagagcttcttcgagacaccttcacttccctgggctatgaagtccagaaattcttgcatctcagtatgcatggtatatcccagattcttggccaatttgcctgtatgcccgagcaccgagactacgacagctttgtgtgtgtcctggtgagccgaggaggctcccagagtgtgtatggtgtggatcagactcactcagggctccccctgcatcacatcaggaggatgttcatgggagattcatgcccttatctagcagggaagccaaagatgttttttattcagaactatgtggtgtcagagggccagctggaggacagcagcctcttggaggtggatgggccagcgatgaagaatgtggaattcaaggctcaggagcgagggctgtgcacagttcaccgagaagctgacttcttctggagcctgtgtactgcggacatgtccctgctggagcagtctcacagctcaccgtccctgtacctgcagtgcctctcccagaaactgagacaagaaagggggacaattcccggaagtggaattacagagtcaaaggacatgcatttttcaagcctcggatgcatcttactagatgtcctataggatggtcatatcagctttataggagagtagctgtgtccctgaattctccctgacactgcatgctcttatatttcctc

SEQ ID NO: 4541 - DNA, 2337 bp, Homo sapiens
attttcctcccagcctcgtgcgggaaatggctttaattctgacggcagggctgtgagggactagcgggaacccgagccttttgtcaaggaactgcggtgtcggtggccagtcatccccgccgccgcggagccgctgcactgctgggggatctcccagcagctctgacgagcgcgggctgcagcatgggcagaaaacgctgccctgcagattagctgggtggattttttaagcgcaccccaccccccaaacccataaaataacaaaaccaacccgcagtggccgaccggagatagctaagatgccgcgcaggagagttccaggagcgaattgcaaacccaccgggaaaatgagcgaagagacggtccccgaggctgcctcgccgccgcccccgcaggggcagccttactttgaccgcttctcagaggacgaccccgagtacatgcgccttcgcaaccgggcggcggacctgcggcaggacttcaacctgatggagcagaagaagcgcgtcaccatgatcctgcagagtccctctttcagggaggagctggaaggcctcatccaggagcagatgaagaaggggaacaactcctccaacatctgggccctgcgacagatcgcggacttcatggccagcacctcccacgcagtcttcccgacatcttccatgaatgtctccatgatgacgcctatcaatgacctccacacagctgactccctgaacctggccaaaggggagcggctcatgcggtgcaagatcagcagtgtctaccgactcctggacctctatggctgggcccagctgagtgacacctatgtcacgttgagagtcagcaaggagcaggaccacttcctgatcagccctaagggagtttcttgcagtgaagtcacagcgtccagcctgatcaaggtgaacattctgggagaggtggtggagaagggcagcagctgcttcccagtggacaccacaggcttctgtctacactcggccatctatgcagcgaggcccgacgtgcgctgcatcatccacctgcacacaccggccacagcagcggtgtcggccatgaagtggggcctcctgcctgtctcccacaatgccctgctggtgggggacatggcctattatgacttcaatggggaaatggagcaggaagccgatcggatcaacctgcagaagtgccttggacccacctgcaagatcctggtgctaagaaaccatggagtggttgctctgggtgacacggtagaggaggcattttacaagatcttccacctgcaggctgcatgtgagatacaggtgtcggctctgtccagtgccgggggagtggagaacctcatcctcctggagcaggagaagcaccggccccatgaggtgggctccgtgcagtgggccgggagcacctttgggcctatgcagaagagtcggctgggggagcatgagtttgaggccctcatgaggatgctggacaacctgggctacagaacaggttacacgtatcgccacccctttgttcaagagaaaaccaaacacaaaagtgaggtggagattccagccacggtcacagccttcgtgtttgaggaggacggtgccccggtgcccgccctgcgacagcatgcccagaagcagcagaaggagaagacccgctggctcaatacgcccaacacctacctgcgggtcaatgtggccgatgaggtccagaggagcatgggcagcccccgacccaagaccacgtggatgaaggctgacgaggtggagaaatccagcagtggcatgccgattcgcatcgaaaacccaaaccaatttgtgcctctctatactgacccccaggaagtactggagatgaggaacaagattcgagaacaaaaccgacaagatgtgaagtcagcggggcctcagtcccagctcctggcgagcgtcattgccgagaagagccgaagcccggtagagcagaggctgcccctgactggcggggaaacgtgtttgccttcggggtcttctgtgcctggggctgggttgcaggacccctgagtcctcatacccaccttcccctgtgatcttgggtgccggtgctcttgctgcaaaatggaggccaacctcacaggggtgctgtgaggaccagggaggacaatgtctgatggcccctgtgggcactgggctggagaacagcagcccagcctgcctgcaggagtgatgcggccggcttccgtacctcctgccatggaactccactctgtcctcccttactaccccgtgaagtggggactcataggcttggggctggagactcccaggtgccccaggtgtgcccagccctgagagtctctgacctctgagcctg

SEQ ID NO: 4542 - DNA, 1688 bp, Homo sapiens
gatgctggaggttcgctagccgaagcggctgcatctggcgccgcgtctgccccgcgtgctcggagcggattctgcccgccgtccccggagccctcggcgccccgctgagcccgcgatcacttcctccctgtgaccaaccggcgctgcaggttagagcctggcaatgccgtttgggtgtgtgactctgggcgacaagaagaactataaccagccatcggagtgaggagttttgtgaaatcttccgggccaaggacaagacgacaggcaagctgcacacctgcaagaagttccagaagcgggacggccgcaaggtgcggaaagctgccaagaacgagataggcatcctcaagatggtgaagcatcccaacatcctacagctggtggatgtgtttgtgacccgcaaggagtactttatcttcctggagctggccacggggagggaggtgtttgactggatcctggaccagggctactactcggagcgagacacaagcaacgtggtacggcaagtcctggaggccgtggcctatttgcactcactcaagatcgtgcacaggaatctcaagctggagaacctggtttactacaaccggctgaagaactcgaagattgtcatcagtgacttccatctggctaagctagaaaatggcctcatcaaggagccctgtgggacccccgagtatctggccccagaggtggtaggccggcagcggtatggacgccctgtggactgctgggccattggagtcatcatgtacatcctgctttcaggcaacccacctttctatgaggaggtggaagaagatgattatgagaaccatgataagaatctcttccgcaagatcctggctggtgactatgagtttgactctccatattgggatgatatttcgcaggcagccaaagacctggtcacaaggctgatggaggtggagcaagaccagcggatcactgcagaagaggccatctcccatgagtggatttctggcaatgctgcttctgataagaacatcaaggatggtgtctgtgcccagattgaaaagaactttgccagggccaagtggaagaaggctgtccgagtgaccaccctcatgaaacggctccgggcaccagagcagtccagcacggctgcagcccagtcggcctcagccacagacactgccacccccggggctgcaggtggggccacagctgcagctgcgagtggagctacctcagcccctgagggtgatgctgctcgtgctgcaaagagtgataatgtggcccccgcagaccgtagtgccaccccagccacagatggaagtgccaccccagccactgatggcagtgtcaccccagccaccgatggaagcatcactccagccactgatgggagtgtcaccccagccactgacaggagcgctactccagccactgatgggagagccacaccagccacagaagagagcactgtgcccaccacccaaagcagtgccatgctggccaccaaggcagctgccacccctgagccggctatggcccagccggacagcacagccccagagggcgccacaggccaggctccaccctctagtaaaggggaagaggctgctggttatgcccaggagtctcaaagggaggaggccagctgagtaggcagcctggtgagggggggcaggggatgggcaggagggtgggagagtggatga

SEQ ID NO: 4543 - DNA, 2182 bp, Homo sapiens
actcttttgagtccagaatctcagaatcgggcgttgggctttgccgggtgcttcagatcaatggatgagttccacccgttcatcgaggcactgctgcctcacgtccgcgctttctcctacacctggttcaacctgcaggcgcggaagcgcaagtacttcaagaagcatgaaaagcggatgtcgaaggacgaggagcgggcggtgaaggacgagctgctgggcgagaagcccgagatcaagcagaagtgggcatcccggctgctggccaagctgcgcaaggacatccggcccgagttccgcgaggacttcgtgctgaccatcacgggcaagaagcccccctgctgcgtgctctccaaccccgaccagaagggcaagatccggcggattgactgcctgcgccaggctgacaaggtgtggcggctggacctggtcatggtgattttgtttaaggggatccccctggaaagtactgatggggagcggctctacaagtcgcctcagtgctcgaaccccggcctgtgcgtccagccacatcacattggagtcacaatcaaagaactggatctttatctggcttactttgtccacactccggaatccggacaatcagatagttcaaaccagcaaggagatgcggacatcaaaccactgcccaacgggcacttaagtttccaggactgttttgtgacttccggggtctggaatgtgacggagctggtgagagtatcacagactcctgttgcaacagcatcagggcccaacttctccctggcggacctggagagtcccagctactacaacatcaaccaggtgaccctggggcggcggtccatcacctcccctccttccaccagcaccaccaagcgccccaagtccatcgatgacagtgagatggagagccctgttgatgacgtgttctatcccgggacaggccgttccccagcagctggcagcagccagtccagcgggtggcccaacgatgtggatgcaggcccggcttctctaaagaagtcaggaaagctggacttctgcagtgccctctcctctcagggcagctccccgcgcatggctttcacccaccacccgctgcctgtgcttgctggagtcagaccagggagcccccgggccacagcatcagccctgcacttcccctccacgtccatcatccagcagtcgagcccgtatttcacgcacccgaccatccgctaccaccaccaccacgggcaggacccactgaaggagtttgtgcagtttgtgtgctcggatggctcgggccaggccaccggacagcattcgcaacgacaggcgcctcctctgccaaccggtttgtcagcatcggaccccgggacggcaactttctgaacatcccacagcagtctcagtcctggttcctctgataagatcgacaaaagaaacaacaaaatgagaagaagaggttcctcgaaaggggggagaagaaattttgagaatggaaaaatcccccagcccagcccagccccaccgaaaagcaaaaattacacgtcgtcagccactcagcccttctctcctccagcccggggacccccaagctgcgcaaggacatccggcccgagttccgcgaggacttcgtgctgaccatcacgggcaagaagcccccctgctgcgtgctctccaaccccgaccagaagggcaagatccggcggattgactgcctgcgccaggctgacaaggtgtggcggctggacctggtcatggtgattttgtttaaggggatccccctggaaagtactgatggggagcggctctacaagtcgcctcagtgctcgaaccccggcctgtgcgtccagccacatcacattggagtcacaatcaaagaactggatctttatctggcttactttgtccacactccggaatccggacaatcagatagttcaaaccagcaaggagatgcggacatcaaaccactgcccaacgggcacttaagtttccaggactgttttgtgacttccggggtctggaatgtgacggagctggtgagagtatcacagactcctgttgcaacagcatcagggcccaacttctccctggcggacctggagagtcccagctactacaacatcaaccaggtgaccctggggcggcggtccatcacctcccctccttccaccagcaccaccaagcgccccaagtccatcgatga

SEQ ID NO: 4544 - DNA, 1732 bp, Homo sapiens
aaaatattcttgcttgagtaaaccacagtaagaataaggaagtagtgactgagtgccttgccagtacagcagatgctagaccataatgtagcattactttccccagggtttattgttatgtaagttcttgttcagcttcctttgttttctttcacttctgagaatttaactttcgtttctcactcagctcctgtggggaaactcatttgtggagaccagccctctggcttggtgagtgaatctggtttacaccggctcctgccctgccttcactcttctcccctgattcaagactcctctgctttggactgaagcactgcaggagtttgtgaccaagaacttcaagagtcaagacagaaggaagccaagggagcagtgcaatggatttctcagtaaaggtagacatagagaagctggaagatgacatcagacaagagagaaccgcctggaagaattatatccagatcgagagacagaagattctgaaagggttcaatgaaatgagagtcatcttggacaatgaggagcagagagagctgcaaaagctggaggaaggtgaggtgaatgtgctggacaacctggcagcagctacagaccagctggtccagcagaggcaggatgccagcatgctcatctcagatctccagcggaggttgaggggatcgtcagtagagatgctgcaggatgtgattgacgtcatgaaaaggagtgaaagctggacattgaagaagccaaaatctgtttccaagaaactaaagagtgtattccgagtaccagatctgagtgggatgctgcaagttcttaaagagctgacagatgtccagtactactgggtggacgtgatgctgaatccaggcagtgccacttcgaatgttgctatttctgtggatcagagacaagtgaaaactgtacgcacctgcacatttaagaattcaaatccatgtgatttttctgcttttggtgtcttcggctgccaatatttctcttcggggaaatattactgggaagtagatgtgtctggaaagattgcctggatcctgggcgtacacagtaaaataagtagtctgaataaaaggaagagctctgggtttgcttttgatccaagtgtaaattattcaaaagtttactccagatatagacctcaatatggctactgggttataggattacagaatacatgtgaatataatgcttttgaggactcctcctcttctgatcccaaggttttgactctctttatggctgtgcctccctgtcgtattggggttttcctagactatgaggcaggcattgtctcatttttcaatgtcacaaaccacggagcactcatctacaagttctctggatgtcgcttttctcgacctgcttatccgtatttcaatccttggaactgcctagtccccatgactgtgtgcccaccgagctcctgagtgttctcattcctttacccacttctgcatagtagcccttgtgctgagactcagattctgcacctgagttcatctctactgagaccatctcttcctttctttccccttcttttacttagaatgtctttgtattcatttgctagggcttccatagcaaagcatcatagattgctgatttaaactgtaattgtattgccgtactgtgggctggaaatcccaaatctagattccagcagagttggttctttctgaggtctgcaaggaagggctctgttccatgcctctctccttggcttgtagaa

SEQ ID NO: 4545 - DNA, 3267 bp, Homo sapiens
gagaaaggccgagacggagggagccagcggcggccgaggggctggtccaggcgcggccgctaagaggagaccaagaggcgggggctgcacttgacaaccagcatgccgagatgattgcctggttttctctggaattctgtgcttcatggcttcttttcccttgataacatgacacatgactgatgacgtcaaagaaccttctagattttctcttctactggccatccgttgcacactggtaaactgcacatgtgaatgttttcagccagggaagattaacctgaggacttgtgatcagtgtaaacatggctgggtggcacatgccttggataagctcagcacgcagcacctgtaccaccccacccaagtggagattgtgcagtccaacgtcgtgtttgacatcagcagcctgatgctctatgggacacaagcagtgcctgtgcggctaaagatcctgctggaccgtctcttcagcgtcctgaagcaagaggaggtactgcacatactgcacggccttggctggactctgcgggactatgtccgaggatacatccttcaggatgctgctggcaaggtgctggaccgctgggccatcatgtctcgagaagaggaaatcatcacccttcagcagtttctgcggtttggagaaaccaaatccattgtggagctgatggcaattcaggagaaagaagggcaggccgtggctgtaccatcttcaaagacagactcagatataaggactttcattgagagcaataatcgcaccaggagtcccagcctccttgctcacttagagaacagcaatccttccagcattcatcacttcgaaaacatcccaaacagccttgcatttctgcttccattccagtacataaaccctgtctcagcaccactgctagggttgcctccaaatgggctactgttagagcaaccagggttgaggctgcgggaacccagcctttcaactcagaatgaatataatgagagcagcgaatccgaagtttctcccacaccttataagaatgatcaaacacccaatagaaatgccctgaccagcattactaatgtggagcccaaaaccgagccagcctgtgtctctcccattcagaattctgccccagtcagtgatctaaccaaaactgaacacccaaaaagctcattccggattcatcggatgagaaggatggggtcagcctctaggaaaggaagagtgttctgtaatgcatgtgggaagacattctatgacaaaggtactctcaaaattcattacaatgctgttcacctgaagatcaaacatcgatgcaccattgaaggttgcaacatggtctttagctccctccgaagtcgtaatcgccacagtgcaagccccaatcctcgccttcacatgcctatgctaaggaataaccgagataaagatttaattcgggccacctcaggagctgccacccctgtcatagcaagtacaaaatcaaatctggcactcacaagccctggccgacccccaatgggttttaccactccccctctagaccctgtcttgcaaaatcctctccctagccagctagtattttctgggctaaagactgtacaaccagttcctccattttatagaagtttactcactccaggggaaatggtgagtcctccaacctccctcccaaccagtcccatcattccaaccagtggtaccatagagcagcaccccccgccaccctctgagccagtagtgccagcagtgatgatggccacccatgagcccagtgctgacctggcacccaagaaaaagcccaggaagtcaagcatgcctgtgaagattgagaaggaaattattgataccgccgatgagtttgatgatgaagatgatgaccccaatgatggtggagctgtggtcaatgacatgagccatgacaatcattgtcactcccaagaggagatgagcccaggcatgtctgtgaaggacttttctaagcataacaggacccggtgcattccaaggactgaaataaggagggccgacagcatgacttctgaagaccaagaacctgagcgggactatgagaacgagtctgagtcttcggagcccaaactgggcgaggaatccatggaaggggatgagcacattcacagcgaagtgagtgaaaaagtcctgatgaatagtgagaggcctgatgagaaccacagtgagccctctcaccaggacgtcatcaaggtgaaggaagaatttacagaccccacttacgacatgttttacatgagccagtatggactgtacaatggtgggggtgccagcatggccgccttgcatgagagctttacatcgtctctgaattatggcagccctcaaaagttctccccagaaggtgacctatgttctagcccagaccccaaaatctgttatgtgtgcaagaagagtttcaaaagctcctacagtgtgaaacttcactacaggaacgttcacttgaaagagatgcacgtctgcacagtggctggttgcaatgctgcattcccctctcgccgaagccgagacagacacagtgccaacataaacctacatcgtaaactgttgaccaaagaactcgatgacatgggcctggactcgtcgcagccctcccttagcaaggacctccgcgatgaatttttggtgaagatatatggtgcccagcaccccatggggctcgatgtcagggaagacgcctcctctcccgcagggactgaagactcccacctgaacgggtatgggagaggcatggcagaggactacatggtccttgacttgagcaccacctccagcctccagtccagcagcagtatccattcctccagagaatccgacgcaggcagcgatgaggggattcttctcgatgacattgacggggcgagtgacagtggggagtcggcacacaaggccgaggcccctgccctccctggcagcctaggggctgaagtttcaggatctcttatgttcagcagcttgtctgggagcaatggtgggatcatgtgcaacatttgccacaaaatgtacagcaacaaggggaccctgagagtgcactacaaaactgtgcatttgagagaaatgcacaagtgcaaagtcccaggttgcaatatgatgttttcctctgtacgaagccgaaatcggcacagtcagaaccctaatctccacaaaaacattcccttcacttcagtagattagtctcagaatggacactacaaatgccagctctcaccagatggcctacgtgtttgaactgccatagtcagtgtgcgctt

SEQ ID NO: 4546 - DNA, 2265 bp, Homo sapiens
gatcgcgtggggagccggtcttggagcagcgggattagcttctaaagtctctttcatctctcctaaggaagaagcctagaagaggaggaagaggaaagaaaaggagtcaggaatgcctcttagatatctcttccaaatgcatgatgaaaaaggtgggaagattacttgagccagggagttgaaggctgcagtgagccctgtttttgccaccacactccagcttgggattgatttctaaagactcatgttacatgaggaagcagctcagaagaggaaaggaaaggagccaggcatggctcttcctcagggacgcttgactttcagggatgtggctatagaattctcattggcagagtggaaattcctgaaccctgcgcagagggctttgtacagggaagtgatgttggagaactacaggaacctggaggctgtggatatctcttccaaacgcatgatgaaggaggtcttgtcaacagggcaaggcaatacagaagtgatccacacagggatgttgcaaagacatgaaagttatcacactggagatttttgcttccaggaaattgaaaaagatattcatgactttgagtttcagtcacaaaaagatgaaagaaatggccatgaagcatccatgccaaaaatcaaagagttgatgggtagcacagaccgacatgatcaaaggcatgctggaaacaagcctattaaagatcagcttggattaagctttcatttgcatcttcctgaactccacatatttcagcccgaagagaaaattgctaatcaagtggagaagtctgtcaacgatgcttcctcaatttcaacatcccaaagaatttcttgtaggcctgaaacacatactcctaataactatgggaataattttttccattcatcattactcacacaaaaacaggaagtacacatgagagaaaaatctttccaatgtaatgagactggcaaagcctttaattgtagctcatttgtaaggaaacatcagataatccatttaggagaaaaacaatataaatttgatatatgtggcaaagtctttaatgagaagcgataccttgcacgccatcgtagatgtcacactagtgagaaaccttacaagtgtaatgaatgtggaaagtccttcagttacaagtcatccctgacatgtcatcgtagatgtcacactggtgagaaaccttacaagtgtaatgaatgtggaaagtccttcagttacaagtcatcccttacatgccatcataggtgtcacactggtgagaaaccttacaagtgtaatgaatgtggaaagtccttcagttacaagtcatcccttagatgccatcgtagacttcatactggaataaaaccttacaagtgtaatgagtgtggcaagatgtttggtcaaaattcaacccttgtaattcataaggcaattcatactggagagaaaccttacaagtgtaatgaatgtggcaaggcttttaatcaacaatcacacctttcacgtcatcatagacttcatactggagagaaaccttacaagtgtaatgactgtggtaaggcttttattcatcagtcaagccttgcacgtcatcatagacttcatactggagagaaatcttacaaatgtgaagaatgtgacagagttttcagtcagaaatcaaaccttgagagacacaagataattcatactggagagaaaccttacaagtgtaatgagtgtcacaagaccttcagtcacaggtcatctcttccatgccatcgtagacttcatagtggtgagaaaccttacaagtgtaatgaatgtgggaagacttttaatgtacagtcacacctttcacgtcatcatagacttcatactggagagaaaccttacaaatgtaaggtttgtgacaaggctttcatgtgccattcttatctggcaaaccatactagaattcatagcggagagaaaccttacaagtgtaatgagtgtggtaaggctcacaatcacttgattgattcatcaatcaagccttgcatgtcatcatagacttcatactggagagaaaccttacaaatgtgaagcatgtgacaaagttttcagtcacagatcacgccttaaaagacatagagaattcatactggagagaaaccttacaagtgtaatgagtgtggcaaagcctttagtgaccagtcaacacttaccatcaggccattcatggtgtagggaaacttgactaatgtaatgattgtcacaaagtcttcagtaacgctacaacgattgcaaatcattggaga

SEQ ID NO: 4547 - DNA, 1589 bp, Homo sapiens
gctggaggttcgctagccgaagcggctgcatctggcgccgcgtctgccccgcgtgctcggagcggattctgcccgccgtccccggagccctcggcgccccgctgagcccgcgatcacttcctccctgtgaccaaccggcgctgcaggttagagcctggcaatgccgtttgggtgtgtgactctgggtgacaagaagaactataaccagccatcggaggtgactgacagatatgatttgggacaggtcatcaagactgaggagttttgtgaaatcttccgggccaaggacaagacgacaggcaagctgcacacctgcaagaagttccagaagcgggacggccgcaagggtgaagcatcccaacatcctacagctggtggatgtgtttgtgacccgcaaggagtactttatcttcctggagctggccacggggagggaggtgtttgactggatcctggaccagggctactactcggagcgagacacaagcaacgtggtacggcaagtcctggaggccgtggcctatttgcactcactcaagatcgtgcacaggaatctcaagctggagaacctggtttactacaaccggctgaagaactcgaagattgtcatcagtgacttccatctggctaagctagaaaatggcctcatcaaggagccctgtgggacccccgagtatctggccccagagttggtaggccggcagcggtatggacgccctgtggactgctgggccattggagtcatcatgtacatcctgctttcaggcaacccacctttctatgaggaggtggaagaagatgattatgagaaccatgataagaatctcttccgcaagatcctggctggtgactatgagtttgactctccatattgggatgatatttcgcaggcagccaaagacctggtcacaaggctgatggaggtggagcaagaccagcggatcactgcagaagaggccatctcccatgagtggatttctggcaatgctgcttctgataagaacatcaaggatggtgtctgtgcccagattgaaaagaactttgccagggccaagtggaagaaggctgtccgagtgaccaccctcatgaaacggctccgggcaccagagcagtccagcacggctgcagcccagtcggcctcagccacagacactgccacccccggggctgcagaccgtagtgccaccccagccacagatggaagtgccaccccagccactgatggcagtgtcaccccagccaccgatggaagcatcactccagccactgatgggagtgtcaccccagccactgacaggagcgctactccagccactgatgggagagccacaccagccacagaagagagcactgtgcccaccacccaaagcagtgccatgctggccaccaaggcagctgccacccctgagccggctatggcccagccggacagcacagccccagagggcgccacaggccaggctccaccctctagtaaaggggaagaggctgctggttatgcccaggagtctcaaagggaggaggccagctgagtaggcagcctggtgagggggggcaggggatgggcaggagggtgggagagtggatga

SEQ ID NO: 4548 - DNA, 1108 bp, Homo sapiens
aaaatcggaaattgcagccttgcgatcgggagggattcaacaagttttcctgcagggatgcgatgtttgtttcttccttgccagttgtgcagagtgtccgttccagataacacattgtctgtcactggctggttgtaatgcaaggaagggacaaagatgaaatggaaacatgttccttttttggtcatgatatcactcctcagcttatccccaaatcacctgtttctggcccagcttattccagaccctgaagatgtagagagggggaacgaccacgggacgccaatccccacctctgataacgatgacaattcgctgggctatacaggctcccgtcttcgtcaggaagattttccacctcgcattgttgaacacccttcagacctgattgtctcaaaaggagaacctgcaactttgaactgcaaagctgaaggccgccccacacccactattgaatggtacaaagggggagagagagtggagacagacaaagatgaccctcgctcacaccgaatgttgctgccgagtggatctttatttttcttacgtatagtacatggacggaaaagtagacctgatgaaggagtctatgtctgtgtagcaaggaattaccttggagaggctgtgagccacaatgcatcgctggaagtagccatacttcgggatgacttcagacaaaacccttcggatgtcatggttgcagtaggagagcctgcagtaatggaatgccaacctccacgaggccatcctgagcccaccatttcatgcgtctcagtgccctaggcccacaagtcccgtgtctacagacagcaacatgagtgccgccgtaatgcagaaaaccagaccagccaagaaactgaaacaccagccaggacatctgcgcagagaaacctacacagatgatcttccaccacctcctgtgccgccacctgctataaagtcacctactgcccaatccaagacacagctggaagtacgacctgtagtggtgccaaaactcccttctatggatgcaagaacagacagatcatcagacagaaaaggaagcagttacaaggggagagaagtgttggatggaagacaggttgttgacatgcgaacaaatcca

SEQ ID NO: 4549 - DNA, 1137 bp, Homo sapiens
gtgcgaggccgcgggctgcgggagtgccctgctctggcctcgcttgttgctcttcggggactccatcacccagaaaatgtgatgttctgaatcgtggattttcaggttacaataccaggtgggccaaaattatccttccaagattaatcaggaaaggaaacagtttggacatcccagtagcagttacaattttctttggggccaatgacagtgcactaaaagatgagaatcccaagcagcacattcccctggaggagtacgctgcgaacctaaagagcatggtgcagtacctgaagtccgtggacatccctgagaatcgagtcattctcatcacgccgaccccactttgtgaaacagcctgggaagaacagtgcatcatacaaggttgcaaactaaatcgcctgaactctgttgttggtgaatatgccaatgcgtgtttacaagtggcccaagactgtgggactgacgtacttgacctgtggaccctgatgcaggacagccaggacttctcatcttatttatcagatggactacatttgtctccaaaggggaatgaatttttgttctcgcatctctggcctttgatagagaaaaaggtctcttctctacctttgctgcttccttactggcgggatgtagcagaagcaaaacctgaattaagtctgctgggagatggagaccattagccaatcacaggagacccaaatctgcttgttatctacagaactcaaagttgtcaatacgtagagcatcgacatagggcacacagcggccggaaaggtccctgcagcacaccttgcaggagttgtcagtttctggaacagagaacacgcattgacagctggattgttctgagacctgcctctcctcctgcctcctctttcctccctgaccatgctcccaaagagagacggcgttttgccatgttgaccaagctgctctcgaactcctgacctcaagtgatctgcccgcctcggcctcccaaagtgatgggattacaggtgtgagtcaccacacctggctctctgtctattttgaaagcaagagaactccctcatcgactcccatggtttaagtggggtgggaagcagagtccagccagtccctgaccagtccatgaggatgccctcaaaccca

SEQ ID NO: 4550 - DNA, 1486 bp, Homo sapiens
atcgatcacaggctcacaacgcccttccattcatcgctcttattccagtcctggttactaccccacttcctgacatcaaaccagggagaacgcgagtgttagttaacatggcttggtgtgtggccacagctgacccggcgcatacctcccgtcctctctttacagggctggcggtgtctcggggctcggctggccatgcctggagcgcggggtttgactgggccgccgttgttgtagtgaccgggaggcgctgccgctctgggcagacggttccgggagccgcacggtcccctctccttccccatcctctcccctcccctctccgggttcccccacccacaggagccttgggccgaccactcccccgatggcctcagccacggaggaccccgttctggagcgttatttcaaaggccacaaagctgcgatcacctccttggacctcagccccaacggcaagcaacttggaaagggacaggcggatatcaagaattgaccccatcagatcacctaccatggctggaggactgtttgctgtcagcaagaaatattttcagtaccttggaacgtatgacacaggaatggaagtgtggggaggtgaaaaccttgagctgtcttttagggtgtggcagtgtggtggcaaattggagatccacccgtgttcccacgtgggccatgtgttccccaagcgggcaccatatgctcgccccaatttcctacagaatactgctcgggcagcagaagtttggatggatgaatacaaagagcacttctacaatagaaaccctccagcaagaaaagaagcttatggtgatatttctgaaagaaaattactacgagagcggttgagatgcaagagctttgactggtatttgaaaaacgtttttcctaatttacatgttccagaggatagaccaggctggcatggggctattcgcagtagagggatctcgtctgaatgtttagattataattctcctgacaacaaccccacaggtgctaacctttcactgtttggatgccatggtcaaggaggcaatcaattctttgaatatacttcaaacaaagaaataaggtttaattctgtgacagagttatgtgcagaggtacctgagcaaaaaaattatgtgggaatgcaaaattgtcccaaagatgggttccctgtaccagcaaacattatttggcattttaaagaagatggaactatttttcacccacactcaggactgtgtcttagtgcttatcggacaccggagggccgacctgatgtacaaatgagaacttgtgatgctctagataaaaatcaaatttggagttttgagaaatagagcacaacagcactttcgtcatgagctgacagtagtgtcaagaaagtcaaagagccttaagagcctcagtgaagattgtattttattttatcaaaagccacctagcagtcatctgtggagcactggaaagctggggttcattttggtatatcacactg

SEQ ID NO: 4551 - DNA, 1750 bp, Homo sapiens
ctgagacgatcactggcttccaagttgatgccgttccagccaatggccagactccaatccagagaaccatcaagccagatgtcagaagctacaccatcacaggtttacaaccaggcactgactacaagatctacctgtacaccttgaatgacaatgctcggagctcccctgtggtcatcgacgcctccactgccattgatgcaccatccaacctgcgtttcctggccaccacacccaattccttgctggtatcatggcagccgccacgtgccaggattaccggctacatcatcaagtatgagaagcctgggtctcctcccagagaagtggtccctcggccccgccctggtgtcacagaggctactattactggcctggaaccgggaaccgaatatacaatttatgtcattgccctgaagaataatcagaagagcgagcccctgattggaaggaaaaagacagttcaaaagacccctttcgtcacccaccctgggtatgacactggaaatggtattcagcttcctggcacttctggtcagcaacccagtgttgggcaacaaatgatctttgaggaacatggttttaggcggaccacaccgcccacaacggccacccccataaggcataggccaagaccatacccgccgaatgtaggacaagaagctctctctcagacaaccatctcatgggccccattccaggacacttctgagtacatcatttcatgtcatcctgttggcactgatgaagaacccttacagttcagggttcctggaacttctaccagtgccactctgacaggcctcaccagaggtgccacctacaacatcatagtggaggcactgaaagaccagcagaggcataaggttcgggaagaggttgttaccgtgggcaactctgtcaacgaaggcttgaaccaacctacggatgactcgtgctttgacccctacacagtttcccattatgccgttggagatgagtgggaacgaatgtctgaatcaggctttaaactgttgtgccagtgcttaggctttggaagtggtcatttcagatgtgattcatctagatggtgccatgacaatggtgtgaactacaagattggagagaagtgggaccgtcagggagaaaatggccagatgatgagctgcacatgtcttgggaacggaaaaggagaattcaagtgtgaccctcatgaggcaacgtgttatgatgatgggaagacataccacgtaggagaacagtggcagaaggaatatctcggtgccatttgctcctgcacatgctttggaggccagcggggctggcgctgtgacaactgccgcagacctgggggtgaacccagtcccgaaggcactactggccagtcctacaaccagtattctcagagataccatcagagaacaaacactaatgttaattgcccaattgagtgcttcatgcctttagatgtacaggctgacagagaagattcccgagagtaaatcatctttccaatccagaggaacaagcatgtctctctgccaagatccatctaaactggagtgatgttagcagacccagcttagagttcttctttctttcttaagccctttgctctggaggaagttctccagcttcagctcaactcacagcttctccaagcatcaccctgggagtttcctgagggttttctcataaatgagggctgcacattgcctgttctgcttcgaagtattcaataccgctcagtattttaaatgaagtgattcta

SEQ ID NO: 4552 - DNA, 1526 bp, Homo sapiens
agcctcattgcccagcggaccccagcctctgccaggttcggtccgccatcctcgtcccgtcctccgccggcccctgccccgcgcccagggatcctccagctcctttcgcccgcgccctccgttcgctccggacaccatggacaagttttggtggcacgcagcctggggactctgcctcgtgccgctgagcctggcgcagatcgatttgaatataacctgccgctttgcaggtgtattccacgtggagaaaaatggtcgctacagcatctctcggacggaggccgctgacctctgcaaggctttcaatagcaccttgcccacaatggcccagatggagaaagctctgagcatcggatttgagacctgcaggtatgggttcatagaagggcatgtggtgattccccggatccaccccaactccatctgtacatcagtcacagacctgcccaatgcctttgatggaccaattaccataactattgttaaccgtgatggcacccgctatgtccagaaaggagaatacagaacgaatcctgaagacatctaccccagcaaccctactgatgatgacgtgagcagcggctcctccagtgaaaggagcagcacttcaggaggttacatcttttacaccttttctactgtacaccccatcccagacgaagacagtccctggatcaccgacagcacagacagaatccctgctaccagagaccaagacacattccaccccagtggggggtcccataccactcatggatctgaatcagatggacactcacatgggagtcaagaaggtggagcaaacacaacctctggtcctataaggacaccccaaattccagaatggctgatcatcttggcgtccctcttggccttggctttgattcttgcagtttgcattgcagtcaacagtcgaagaaggtgtgggcagaagaaaaagctagtgatcaacagtggcaatggagctgtggaggacagaaagccaagtggactcaacggagaggccagcaagtctcaggaaatggtgcatttggtgaacaaggagtcgtcagaaactccagaccagtttatgacagctgatgagacaaggaacctgcagaatgtggacatgaagattggggtgtaacacctacaccattatcttggaaagaaacaaccgttggaaacataaccattacagggagctgggacacttaacagatgcaatgtgctactgattgtttcattgcgaatcttttttagcataaaattttctactctttttgttttttgtgttttgttctttaaagtcaggtccaatttgtaaaaacagcattgctttctgaaattagggcccaattaataatcagcaagaatttgatcgttccagttcccacttggaggcctttcatccctcgggtgtgctatggatggcttctaacaaaaactacacatatgtattcctgatcgccaacctttcccccaccagctaaggacatttcccagggttaatagggcctggtccctgggaggaaatttgaatgggt

SEQ ID NO: 4553 - DNA, 4968 bp, Homo sapiens
agagagataccgagaatgttcctagagggtctgcgcagctagagagagctcaccaagagaagttggcgcaaagtagctagccagagccgggggactgtgttaggatgaaagtcctggacagacttatcacagagagagaagaaacgcaatcactatgcagccacagaatgtccaggggctcagcaaagtcagtgaggaaccttcaacatcgagtgacgagagggcctcattgatcaagaaagagatccatgggtccctgccacacgtggcggagccctctgtgccgtaccgcgggacggtgtttgccatggaccccaggaatggttacatggagccccactaccaccctcctcatcttttccctgccttccatcctcctgtaccaattgatgccagacatcatgagggccgttaccattacgatccatctccgattcctccattgcatatgacttccgccttatctagtagccctacgtatccggacctgcccttcattaggatctccccacatcggaaccccgctgctgcttccgagtctcccttcagccctccacatccctacattaatccctacatggactatatccgctccttgcacagcagcccatcgctctccatgatctcagcaacccgtgggctgagccctacagatgcgccccatgcaggagtcagcccagcagaatactatcatcagatggccctgctaactggccagcgcagcccctatgcagacattattccctcagctgccaccgccggcacgggggccatccacatggaatatcttcatgctatggatagcaccagattctccagccccaggctgtcagccaggccgagccgaaaacgtacactgtccatatcaccactctctgatcatagctttgaccttcagaccatgataaggacgtctcccaactccttggtcacgattctcaataattcccgtagcagctcttcagcaagtggctcctatggtcacttatctgcaagtgcaatcagccctgccttgagcttcacctactcttccgcgcccgtctctctccacatgcatcagcagatcctaagccgacaacagagcttaggttcagcctttggacacagccctccactcatccaccctgccccaacttttccaacacagaggcctattccagggatccctacggttctgaaccccgtccaggtcagctccggcccttctgagtcctcacagaacaagcccacgagtgagtctgcagtgagcagcactggtgacccgatgcacaacaagaggtccaagatcaaacccgatgaagacctccccagcccaggggctcgggggcagcaggaacagcccgaaggaacaacccttgtcaaggaggaaggggacaaagatgaaagcaaacaggagcctgaagtcatctatgagacaaactgccactgggaaggctgcgcgagggagttcgacacccaagagcagcttgtgcaccatataaataacgaccatattcatggagagaagaaggagttcgtgtgcaggtggctggactgctcaagagagcagaaacccttcaaagcccagtatatgttggtagtgcatatgagaagacacacgggcgagaagcctcacaaatgcacttttgaaggttgcacaaaggcctactcgagactagaaaacttgaaaacacacttgagatctcacactggagagaaaccatacgtctgtgagcacgaaggttgcaacaaggctttctcaaatgcctctgatcgcgccaaacaccaaaacagaacgcactccaatgagaaaccatatgtgtgcaaaatcccaggctgcactaagcgttacacagacccaagctccctccggaaacatgtgaagacagtgcatggcccagaggctcatgtcaccaagaagcagcgaggggacatccatcctcggccgccacccccgagagattccggcagccattcacagtccaggtcgcctggccgaccgactcagggagcccttggtgagcagcaggacctcagcaacactacctcaaagcgggaagaatgcctccaggtgaaaaccgtcaaggcagagaagccaatgacatctcagccaagccctggtggtcagtcttcatgcagcagccaacagtcccccatcagcaactattccaacagtgggctcgagcttcctctgaccgatggaggtagtataggagacctcagtgccatcgatgaaaccccaatcatggactcaaccatttccactgcaaccacagcccttgctttgcaagccaggagaaacccggcagggaccaaatggatggagcacgtaaaactagaaaggctaaaacaagtgaatggaatgtttccgcgactgaaccccattctaccccctaaagcccctgcggtctctcctctcataggaaatggcacacagtccaacaacacctgcagcttgggtgggcccatgacgcttctcccgggcagaagcgacctctctggggtggacgtcactatgctgaacatgctcaacagaagggacagcagcgccagcaccatcagctcggcctacctgagcagccgccgctcctcagggatctcgccctgcttctccagccgccgctccagcgaggcgtcacaggccgagggccggccgcagaacgtgagcgtggccgactcctacgaccccatctccaccgacgcctcgcgccgctccagcgaagccagccagagcgacggcctgcccagcctgctcagcctcacgcccgcccagcagtaccgcctcaaggccaagtacgcggctgccacaggagggccgccgccgacgcccctgcccaacatggagaggatgagcctgaagacgcgcctggcgctgcttggggatgccctcgagcctggcgtggccctgcctccagttcatgccccgaggaggtgcagcgacgggggagcccacggctacgggcggcgccacctgcagccgcacgatgcgctgggccacggcgtgaggagggccagcgacccggtgcggacaggctccgagggcctggccctgcctcgtgtgccgcgcttcagcagcctcagcagctgcaaccccccggcgatggccacgtccgcggagaagcgcagtctcgtgcttcagaattacacgcggcccgagggcggccagtcccgaaacttccactcgtccccctgtcctcccagcatcaccgagaacgtcaccctggagtccctgaccatggacgctgatgccaacctgaacgatgaggatttcctgccggacgacgtggtgcagtatttaaattcccagaaccaagcagggtacgagcagcacttccccagcgccctcccggacgacagcaaagtgccccacgggcccggtgactttgacgcgcccgggctgccagacagccacgctggccagcagttccatgccctcgagcagccctgccccgagggcagcaaaaccgacctgcccattcagtggaacgaagtcagctccggaagcgccgacctgtcctcctccaagctcaagtgtgggccgcggcccgctgtgccgcagactcgcgcctttgggttctgcaacggcatggtcgtccacccgcagaaccccttgaggagcgggcctgctgggggctatcagaccctcggggagaacagcaacccctacggtggcccagagcacttgatgctccacaacagccccggaagtggcaccagtggaaacgccttccatgaacagccctgtaaggccccgcagtatgggaactgtctcaacaggcagccagtggcccctggtgcactcgacggtgcctgtggtgccgggattcaagcctcaaagctgaagagcacccccatgcaagggagcgggggccagctgaatttcggcctgccggtagcgccaaatgagtcagctggcagcatggtgaatggcatgcagaaccaggacccagtgggacaggggtacctggctcaccagctcctcggcgacagcatgcagcacccgggggcaggccgccccggtcagcagatgcttgggcagattagtgctacctcacacatcaacatctaccaagggccagagagctgcctgccaggggctcacggcatgggcagccagccgtcaagcttggcagttgtcaggggctaccagccatgtgccagctttgggggcagcaggcgccaggctatgccgagggacagccttgctctgcagtcaggacagctcagtgacacaagtcagacctgcagggtgaatggtatcaagatggagatgaaagggcagccccatccgctgtgctctaatctgcagaattactctggtcagttctatgaccaaaccgtgggcttcagtcagcaagacacgaaagctggttcattctctatttcagacgccagctgcctgctacaggggaccagcgccaaaaactctgagttactttccccaggtgctaatcaggtgacaagcacagtggacagcctcgacagccatgacctggaaggggtacagattgacttcgatgccatcatagacgatggggaccactccagcctgatgtcgggggccctgagcccaagtatcattcagaacctttcccatagctcctcccgcctcaccacgcctcgggcgtccctcccattcccagcgctgtccatgagcaccaccaacatggctatcggggacatgagttctttgctgacctccctagcggaagaaagcaaattccttgcagttatgcaataggctttaggaaaaaaagactgcaaccaacggaaatcaataggagttgaagagattaaactgactttgttttggctgtttttttagttctgtatgtattttagcaatctcatctcacctaactgagatgtgtttcaattatattccttttatggaaaaggactctgaaaaaccctaaagtattctagggagaaactgtcttccatttcagttttgaatcagtattgttacactcaaaccaccctcttttt

SEQ ID NO: 4554 - DNA, 1849 bp, Homo sapiens
attctcgtctgtcacttcagacccccactagttgacagagcagcagaatttcaactccagtagacttgaatatgcctctgggcaaagaagcagagctaacgaggaaagggatttaaagagtttttcttgggtgtttgtcaaacttttattccctgtctgtgtgcagaggggattcaacttcaatttttctgcagtggctctgggtccagccccttacttaaagatctggaaagcatgaagactgggctttttttcctatgtctcttgggaactgcagctgcaatcccgacaaatgcaagattattatctgatcattccaaaccaactgctgaaacggtagcacccgacaacactgcaatccccagtttaagggctgaagctgaagaaaatgaaaaagaaacagcagtatccacggaagacaatacccaatctgatgatattttggaagagtctgatcaaccaactcaagtaagcaagatgcaggaggatgaatttgatcagggtaaccaagaacaagaagataactccaatgcagaaatggaagaggaaaatgcatcgaacgtcaataagcacattcaagaaactgaatggcagagtcaagagggtaaaactggcctagaagctatcagcaaccacaaagagacagaagaaaagactgtttctgaggctctgctcatggaacctactgatgatggtaataccacgcccagaaatcatggagttgatgatgatggcgatgatgatggcgatgatggcggcactgatggccccaggcacagtgcaagtgatgactacttcatcccaagccaggcctttctggaggccgagagagctcaatccattgcctatcacctcaaaattgaggagcaaagagaaaaagtacatgaaaatgaaaatataggtaccactgagcctggagagcaccaagaggccaagaaagcagagaactcatcaaatgaggaggaaacgtcaagtgaaggcaacatgagggtgcatgctgtggattcttgcatgagcttccagtgtaaaagaggccacatctgtaaggcagaccaacagggaaaacctcactgtgtctgccaggatccagtgacttgtcctccaacaaaaccccttgatcaagtttgtggcactgacaatcagacctatgctagttcctgtcatctattcgctactaaatgcagactggaggggaccaaaaaggggcatcaactccagctggattattttggagcctgcaaatctattcctacttgtacggactttgaagtgattcagtttcctctacggatgagagactggctcaagaatatcctcatgcagctttatgaagccaactctgaacacgctggttatctaaatgagaagcagagaaataaagtcaagaaaatttacctggatgaaaagaggcttttggctggggaccatcccattgaccttctcttaagggactttaagaaaaactaccacatgtatgtgtatcctgtgcactggcagtttagtgaacttgaccaacaccctatggatagagtcttgacacattctgaacttgctcctctgcgagcatctctggtgcccatggaacactgcataacccgtttctttgaggagtgtgaccccaacaaggataagcacatcaccctgaaggagtggggccactgctttggaattaaagaagaggacatagatgaaaatctcttgttttgaacgaagattttaaagaactcaactttccagcatcctcctctgttctaaccacttcagaaatatatgcagctgtgatacttgtagatttatatttagcaaaatgttagcatgtatgacaagacaatgagagtaattgcttgac

SEQ ID NO: 4555 - DNA, 2481 bp, Homo sapiens
agtgtagtcactgctggtctgctggtaaggagtttcgtgggagggtgttgagaatgaaacgcacagagctgtatcccgcttcgggtgaatgaatgggaggcaatatacaaaatagccttggataagctcagcacgcagcacctgtaccaccccacccaagtggagattgtgcagtccaacgtcgtgtttgacatcagcagcctgatgctctatgggacacaagcagtgcctgtgcggctaaagatcctgctggaccgtctcttcagcgtcctgaagcaagaggaggtactgcacatactgcacggccttggctggactctgcgggactatgtccgaggatacatccttcaggatgctgctggcaaggtgctggaccgctgggccatcatgtctcgagaagaggaaatcatcacccttcagcagtttctgcggtttggagaaaccaaatccattgtggagctgatggcaattcaggagaaagaagggcaggccgtggctgtaccatcttcaaagacagactcagatataaggactttcattgagagcaataatcgcaccaggagtcccagcctccttgctcacttagagaacagcaatccttccagcattcatcacttcgaaaacatcccaaacagccttgcatttctgcttccattccagtacataaaccctgtctcagcaccactgctagggttgcctccaaatgggctactgttagagcaaccagggttgaggctgcgggaacccagcctttcaactcagaatgaatataatgagagcagcgaatccgaagtttctcccacaccttataagaatgatcaaacacccaatagaaatgccctgaccagcattactaatgtggagcccaaaaccgagccagcctgtgtctctcccattcagaattctgccccagtcagtgatctaaccaaaactgaacacccaaaaagctcattccggattcatcggatgagaaggatggggtcagcctctaggaaaggaagagtgttctgtaatgcatgtgggaagacattctatgacaaaggtactctcaaaattcattacaatgctgttcacctgaagatcaaacatcgatgcaccattgaaggttgcaacatggtctttagctccctccgaagtcgtaatcgccacagtgcaaaccccaatcctcgccttcacatgcctatgctaaggaataaccgagataaagatttaattcgggccacctcaggagctgccacccctgtcatagcaagtacaaaatcaaatctggcactcacaagccctggccgacccccaatgggttttaccactccccctctagaccctgtcttgcaaaatcctctccctagccagctagtattttctgggctaaagactgtacaaccagttcctccattttatagaagtttactcactccaggggaaatggtgagtcctccaacctccctcccaaccagtcccatcattccaaccagtggtaccatagagcagcaccccccgccaccctctgagccagtagtgccagcagtgatgatggccacccatgagcccagtgctgacctggcacccaagaaaaagcccaggaagtcaagcatgcctgtgaagattgagaaggaaattattgataccgccgatgagtttgatgatgaagatgatgaccccaatgatggtggagctgtggtcaatgacatgagccatgacaatcattgtcactcccaagaggagatgagcccaggcatgtctgtgaaggacttttctaagcataacaggacccggtgcatttcaaggactgaaataaggagggccgacagcatgacttctgaagaccaagaacctgagcgggactatgagaacgagtctgagtcttcggagcccaaactgggcgaggaatccatggaaggggatgagcacattcacagcgaagtgagtgaaaaagtcctgatgaatagtgagaggcctgatgagaaccacagtgagccctctcaccaggacgtcatcaaggtgaaggaagaatttacagaccccacttacgacatgttttacatgagccagtatggactgtacaatggtgggggtgccagcatggccgccttgcatgagagctttacatcgtctctgaattatggcagccctcaagttctccccagaaggtgacctatgttctagcccagaccccaaaatctgttatgtgtgcaagaagagtttcaaaagctcctacagtgtgaaacttcactacaggaacgttcacttgaaagagatgcacgtctgcacagtggctggttgcaatgctgcattcccctctcgccgaagccgagacagcaaaagattagaaagctgatcttattgtcacaagacacagtgccaacataaacctacatcgtaaactgttgaccaaagaactcgatgacatgggcctggactcgtcgcagccctcccttagcaaggacctccgcgatgaatttttggtgaagatatatggtg

SEQ ID NO: 4556 - DNA, 1855 bp, Homo sapiens
agtggcgtcggaactgcaaagcacctgtgagcttgcggaagtcagttcagactccagcccgctccagcccggcccgacccgaccgcacccggcgcctgccctcgctcggcgtccccggccagccatgggcccttggagccgcagcctctcggcgctgctgctgctgctgcaggtctcctcttggctctgccaggagccggagccctgccaccctggctttgacgccgagagctacacgttcacggtgccccggcgccacctggagagaggccgcgtcctgggcagagtgaattttgaagattgcaccggtcgacaaaggacagcctatttttccctcgacacccgattcaaagtgggcacagatggtgtgattacagtcaaaaggcctctacggtttcatgacccacagatccatttcttggtctacgcctgggactccacctacagaaagttttccaccaaagtcacgctgaatacagtggggcaccaccaccgccccccgccccatcaggcctccgtttctggaatccaagcagaattgctcacatttcccaactcctctcctggcctcagaagacagaagagagactgggttattcctcccatcagctgcccagaaaatgaaaaaggcccatttcctaaaaacctggttcagatcaaatccaacgggaatgcagttgaggatccaatggagattttgatcacggtaaccgatcagaatgacaacaagcccgaattcacccaggaggtctttaaggggtctgtcatggaaggtgctcttccaggaacctctgtgatggaggtcacagccacagacgcggacgatgatgtgaacacctacaatgccgccatcgcttacaccatcctcagccaagatcctgagctccctgacaaaaatatgttcaccattaacaggaacacaggagtcatcagtgtggtcaccactgggctggaccgagagagtttccctacgtataccctggtggttcaagctgctgaccttcaaggtgaggggttaagcacaacagcaacagctgtgatcacagtcactgacaccaacgataatcctccgatcttcaatcccaccacgtacaagggtcaggtgcctgagaacgaggctaacgtcgtaatcaccacactgaaagtgactgatgctgatgcccccaataccccagcgtgggaggctgtatacaccatattgaatgatgatggtggacaatttgtcgtcaccacaaatccagtgaacaacgatggcattttgaaaacagcaaagggcttggattttgaggccaagcagcagtacattctacacgtagcagtgacgaatgtggtaccttttgaggtctctctcaccacccccacagccaccgtcaccgtggatgtgctggatgtgaatgaagcccccatctttgtgcctcctgaaaagagagtggaagtgtccgaggattttggcgtgggccaggaaatcacatcctacactgcccaggagccagacacatttatggaacagaaaataacatatcggatttggagaagaggaccaggactttgacttgagccagctgcacaggggcctggacgctcggcctgaagtgactcgtaacgacgttgcaccaaccctcatgagtgtcccccggtatcttccccgccctgccaatcccgatgaaattggaaattttattgatgaaaatctgaaagcggctgatactgaccccacagccccgccttatgattctctgctcgtgtttgactatgaaggaagcggttccgaagctgctagtctgagctccctgaactcctcagagtcagacaaagaccaggactatgactacttgaacgaatggggcaatcgctt

SEQ ID NO: 4557 - DNA, 1285 bp, Homo sapiens
agtcggctcggaattggacttgggaggcgcggtgaggagtcaggcttaaaacttgttggaggggagtaaccagcctgctcctctcgctctcctcctcgtctgcgccgcgtttcagagagaaaattcctgttccaagagaaaataaggcaacatcaatgaaggagagaagagccagccagaaattatccagcaaatctatcatggatcctaatcagaacgtgaaatgcaagatagttgtggtgggagacagtcagtgtggaaaaactgcgctgctccatgtcttcgccaaggactgcttccccgagaattacgttcctacagtgtttgagaattacacggccagttttgaaatcgacacacaaagaatagagttgagcctgtgggacactacgggttctccttactatgacaatgtccgccccctctcttaccctgattcggatgctgtgctgatttgctttgacatcagcagaccagaactctcggcagttgctacggacttacgaaaggacaaagcgaagagctgcactgtgatgtgaatctttcattatctttaatgaagacaaaggaatctagtgtaaaaaacaacagcaaacaaaaaggtgaagtctaaatgaagtgcacagccaaagtcatgtataccagaagcttaggaggcgtttgagaggatactcatctttttggaatcctgaccttaggttcggcatgtagaccaagtgatgagaagtgaatacatggaagagtttttaagtgtgacttgaaaaatatgccaaaaaatgagagatacaaatgagctagaggaagatgaggggggatgcgagtacctccaagaagaaaaatcacactctgaatggtgcttgcatttttgggttttttttttttttgttataatctattcatggatctccactttgatttaatttttaaatgttttaatctcctttacaaaaagtatacgttaatataccgtcctcaagggggaactggcactgtgaccttagcatttagttttctagaggatgtgatctaatttctttctagctcatcattaaaaaggaaattgtatcaggacccatgggatatatccagaggcaaactttatgaggctttgaaatcttgccttcctgaagatagctgagtaggatggttctaaggaaagcctttgcaatcttgcaagatttgtagaccagcactacaaagatcgcatagatcaaataggaaaaaaaatgtcgatttttattcagtctgatggttctgttcttcattgtgattgtcattaaaaagt

SEQ ID NO: 4558 - DNA, 1972 bp, Homo sapiens
ccagtagacttgaatgtgcctctgggcaaagaagcagagctaacgaggaaagggatttaaagagtttttcttgggtgtttgtcaaacttttattccctgtctgtgtgcagaggggattcaacttcaatttttctgcagtggctctgagtccagccccttacttaaagatctggaaagcatgaagactgggctttttttcctatgtctcttgggaactgcagctgcaatcccgacaaatgcaagattattatctgatcattccaaaccaactgctgaaacggtagcacccgacaacactgcaatccccagtttaagggctgaagatgaagaaaatgaaaaagaaacagcagtatccacagaagacgattcccaccataaggctgaaaaatcatcagtactaaagtcaaaagaggaaagccatgaacagtcagcagaacagggcaagagttctagccaagagctgggattgaaggatcaagaggacagtgatggtgacttaagtgtgaatttggagtatgcaccaactgaaggtacattggacataaaagaagataactccaatgcagaaatggaagaggaaaatgcatcgaacgtcaataagcacattcaagaaactgaatggcagagtcaagagggtaaaactggcctagaagctatcagcaaccacaaagagacagaagaaaagactgtttctgaggctctgctcatggaacctactgatgatggtaataccacgcccagaaatcatggagttgatgatgacggcgatgatgatggcgatgatggcggcactgatggccccaggcacagtgcaagtgatgactacttcatcccaagccaggcctttctggaggccgagagagctcaatccattgcctatcacctcaaaattgaggagcaaagagaaaaagtacatgaaaatgaaaatataggtaccactgagcctggagagcaccaagaggccaagaaagcagagaactcatcaaatgaggaggaaacgtcaagtgaaggcaacatgagggtgcatgctgtggattcttgcatgagcttccagtgtaaaagaggccacatctgtaaggcagaccaacagggaaaacctcactgtgtctgccaggatccagtgacttgtcctccaacaaaaccccttgatcaagtttgtggcactgacaatcagacctatgctagttcctgtcatctattcgctactaaatgcagactggaggggaccaaaaaggggcatcaactccagctggattattttggagcctgcaaatctattcctacttgtacggactttgaagtgattcagtttcctctacggatgagagactggctcaagaatatcctcatgcagctttatgaagccaactctgaacacgctggttatctaaatgagaagcagagaaataaagtcaagaaaatttacctggatgaaaagaggcttttggctggggaccatcccattgaccttctcttaagggactttaagaaaaactaccacatgtatgtgtatcctgtgcactggcagtttagtgaacttgaccaacaccctatggatagagtcttgacacattctgaacttgctcctctgcgagcatctctggtgcccatggaacactgcataacccgtttctttgaggagtgtgaccccaacaaggataagcacatcaccctgaaggagtggggccactgctttggaattaaagaagaggacatagatgaaaatctcttgttttgaacgaagattttaaagaactcaactttccagcatcctcctctgttctaaccacttcagaaatatatgcagctgtgatacttgtagatttatatttagcaaaatgttagcatgtatgacaagacaatgagagtaattgcttgacaacaacctatgcaccaggtatttaacattaactttggaaacaaaaatgtacaattaagtaaagtcaacatatgcaaaatactgtacattgtg

SEQ ID NO: 4559 - DNA, 1584 bp, Homo sapiens
attcacttcattaaatctagaggcagttgagcatgggagccgtctgtatgttgaattagggctcgcactcttgcgcaacacgtcaccagtcggaaactggggctgatgaagagactagcagctcgctgctttgctggcttgttaattttatccccactaactgtgatttctgatagccggcctgctgatagtggtaaggccatcgaagacggcaatttggaggaaatggaagaggaagtacggcttaagaagcgaaaaagacgaagaaatgtggataaagatcctgcaaaagaagatgtggaaaaagctaagaagagaagaggccgccctcccgctgagaaactgtcaccaaatccccccaaactgacaaagcagatgaacgctatcatcgatactgtgataaactacaaagatagttcagggcgacagctcagtgaagtcttcattcagttaccttcaaggaaagaattaccagaatactatgaattaattaggaagccagtggatttcaaaaaaataaaggaaaggattcgtaatcataagtaccggagcctaggcgacctggagaaggatgtcatgcttctctgtcacaacgctcagacgttcaacctggagggatcccagatctatgaagactccatcgtcttacagtcagtgtttaagagtgcccggcagaaaattgccaaagaggaagagagtgaggatgaaagcaatgaagaggaggaagaggaagatgaagaagagtcagagtccgaggcaaaatcagtcaaggtgaaaattaagctcaataaaaaagatgacaaaggccgggacaaagggaaaggcaagaaaaggccaaatcgaggaaaagccaaacctgtagtgagcgattttgacagcgatgaggagcaggatgaacgtgaacagtcagaaggaagtgggacggatgatgagtgatcagtatggacctttttccttggtagaactgaattccttcctcccctgtctcatttctacccagtgagttcatttgtcatataggcactgggttgtttctatatcatcatcgtctataaactagctttaggatagtgccagacaaacatatgatatcatggtgtaaaaaacacacacatacacaaatatttgtaacatattgtgaccaaatgggcctcaaagattcagattgaaacaaacaaaaagcttttgatggaaaatatgtgggtggatagtatatttctatgggtgggtctaatttggtaacggtttgattgtgcctggttttatcacctgttcagatgagaagatttttgtcttttgtagcactgataaccaggagaagccattaaaagccactggttattttatttttcatcaggcaattttcgaggtttttatttgttcggtattgtttttttacactgtggtacatataagcaactttaataggtgataaatgtacagtagttagatttcacctgcatatacatttttccattttatgctctatgatctgaacaaaagctttttgaattgtataagatttatgtctactgtaaacattgcttaatttttttgctcttgatttaaaaaaaagttttgttg

SEQ ID NO: 4560 - DNA, 1956 bp, Homo sapiens
ctctgccagccctgagctgggaagaagcagctacctcggaggcagggcgcgcaggcgggcggcgatgagagggggcgcagccgcagccccgcgctggggagcccaccgctaaccctgcaccccacccacccctgcacaaaagagctggcgggcgctggccacgtcgccctgggtgaccttcctcggatgcagaatccgcccctgcgagcatcctcttcctcctaggctctgaaggcccggggagcgtgagcgatgcccagctgcacccgggcagggctcgcctttgtttgccagtaaggaggagaggctgtctcagctgcagaggggtcatccctgcttcaagccagtgcctcttcccagctcccatggggaccaccgaagccacgctccggatggaaaacgtggacgtgaaggaggaatggcaggacgaagatcttcccagccaggaattgctttgcacaatcctgggaaccaccaagtccaaaatccacagggcaggctggaaactgtcaggccactcccagaagagacgggggtggaactgcttggcagcccggtggaagacacatcctctcctcccaacacgctaaatttcaacggagcgcatcgtaagaggaagacgctggtggccccagagatcaacatttctctggatcagagtgaggggtccctgctgtccgatgacttcttggatacccctgatgacctggatattaacgtggatgacatcgagacccccgatgagaccgactcgctggagttcctggggaatggcaacgaactggagtgggaagacgacacccccgtggccaccgccaagaacatgcccggggacagcgcggatctatttggggacggcacgacggaggacggcagcgccgccaacgggcgcctgtggcggacagtgatcatcggggagcaagagcaccgtatagacctgcacatgatccggccttacatgaaagtggtcacccacggagggtactacggcgaaggcctcaacgccatcatcgtcttcgcagcctgcttccttccagacagcagcctccccgactaccactacatcatggagaacctcttcctgtacgtcatcagcagcttagagctcctggtggctgaggactacatgatcgtgtacctgaacggtgccacgccccggcggaggatgcctggaatcggctggctgaagaagtgctaccagatgatcgaccggaggttgcggaaaaacctgaagtccttgatcatcgtccacccctcgtggttcattcggactgtgctggccatctctcgccctttcatcagcgtcaagttcatcaacaagatccagtacgtgcacagcttggaagacctggagcaactcatccctatggaacacgtccagatcccagactgcgtcctgcaatacgaagaggaaagactgaaggccaggagggagagcgcgaggccccagccggagtttgtgctgcccaggtctgaagagaagccagaggtggcaccagtggaaaacaggtctgctctggtctcagaagatcaggaaacaagcatgtcctgaggcgacgtgagcataacaaaggacatggaagaagattccagatgccagaaaacctctgtcagacgcccactggccccagatctcatcctgcctcatcctgagtcccaatcttccaagggtgccagcccctccgttcatctctgaaacccagcatccttttcagctgcttgaaaacattgtatttttttttttaacgatgcagtatttgtgcgttccagaaaagggcccagctctgagcccctcacccttccacactcacgaactctcagccgaggaaggcaagaagcgcagggggtggcccgcgtggcgtcggtggcctccgctcctgctcgcagcccctgtggtcagagctggatacaagattcaagacccttctcttgcttgtcacccgctccaggttggag

SEQ ID NO: 4561 - DNA, 4270 bp, Homo sapiens
acttccggccagggagggggataggctcagacacaaggagaggcttggagagagcagacgccttctggattcaagaagacgagggccctctgcctcccccggggagcctggggcttcccttccctccagatatacagactgagaccacagaagaggacagtgtcctgctgatgcataccctgttggcggcaaccaaggactccctggccatggacccaccagttgtcaaccggcctaagaaaagcaagaccaagaaggcccctataaagactattaccaaggacacacccaagctgggtctcctcatggtgattctgagtgtcatttttatgaatggcaacaaggccagtgaggctgtcatctgggaggtgctgcgcaagttggggctgcgccctggggtgaggcattcactctttggggaagtgaggaagctcatcacagacgagtttgtgaagcagaagtacctggagtacaagagggtccctaacagcagaccacctgaatatgagttcttctggggcttgcgctcctaccacgagactagcaagatgaaagtcctcaagtttgcatgcagggtgcagaagaaagaccccaaggactgggctgtgcagtaccgcgaggcagtggagatggaagtccaagctgcagctgtggctgtggctgaggctgaagccagggctgaggcaagagcccaaatggggattggagaggaagctgtggctgggccctggaattgggatgacatggatatcgactgcctaacaagggaagagttaggcgatgatgctcaggcctggagcagattttcatttgaaattgaggccagagcccaagaaaatgcagatgccagcaccaacgtcaacttcagcagaggagctagtaccagggctggcttcagcgatggtgctagtattagcttcaatggtgcacccagctccagtggtggcttcagtggtggacctggcattacctttggtgttgcacccagcaccagtgccagcttcagcaatacagccagcattagctttggtggtacactgagcactagctccagcttcagcagcgcagccagcattagctttggttgtgcacacagcaccagcactagtttcagcagtgaagccagcattagctttggtggcatgccttgtaccagtgccagctttagtggtggagtcagctctagttttagtggcccactcagcaccagtgccactttcagtggtggagccagctctggctttggaggcacactcagcaccacggctggctttagtggtgtactcagcactagcaccagctttggcagtgcacccacaacgagcacagtcttcagtagtgcgcttagcaccagcactggctttggaggcatactcagcaccagtgtctgttttggtggctctcccagctccagtggtagctttggtggtacactcagtaccagtatctgcttcggtggctctccctgcaccagcactggctttggaggcacacttagcaccagtgtctcctttggtggctcttccagcaccagtgccaattttggtggtacactaagtaccagcatctgctttgatggctctcccagcactggtgctggctttggtggtgctctcaacaccagtgccagctttggcagtgtgctcaacaccagtactggttttggtggtgctatgagcaccagtgctgactttggcggtacactaagcaccagtgtctgctttggtggctctcctggcaccagtgtcagctttggcagtgcactcaacaccaatgctggttatggtggtgctgtcagcaccaacactgactttggtggtacactaaacaccagcgtctgttttggtggctctcccagcaccagtgctggctttggtggtgcactcaacaccaatgccagctttggctgtgccgtcagcaccagtgccagcttcagtggtgctgtcagcaccagtgcttgcttcagtggtgcaccaatcaccaaccctggctttggcggtgcatttagcaccagtgctggcttcggtggggcacttagtaccgctgctgacttcggtggtactcccagcaacagcattggctttggtgctgctcccagcaccagtgtcagctttggtggtgctcatggcaccagcctctgttttggtggagctcccagcaccagcctctgctttggcagtgcatctaatactaacctatgctttggtggccctcctagcaccagtgtctgctttagtggtgctaccagccctagtttttgtgatggacccagcaccagtaccggtttcagctttggcaatgggttaagcaccaatgctggatttggtggtggactgaacaccagtgctggctttggtggtggcctaggcaccagtgctggcttcagtggtggcctaagcacaagttctggctttgatggtgggctaggtaccagcgctggcttcggtggaggaccaggcaccagcactggttttggtggtggactgggcaccagtgctggcttcagtggctgcaactgccacccatacagctaccacccaaggccaaattaccaatgagacagccagtatccacaccacagcagcctccatccgaaccaagaaagcctccaaagccaggaagacaattgctaaggtcataaatactgacactgagcatatagaggctctaaatgtcactgacgcagctaccaggcagattgaggcctcagtagtggctatcaggcccaaaaaatccaagggcaagaaggctgccagcaggggcccaaattctgtctctgagatctctgaggccccacttgccactcagatagtcacaaaccaagccctggcagccaccctgcgggtcaagagagggtctagggctcggaaggctgccactaaggctcgggcaactgaaagccagactccaaatgctgaccaaggggcccaggccaagatagcctctgctcagaccaacgtaagtgcccttgagactcaggttgctgctgctgtccaggccctggcagatgactatctggctcagttgagcctggagcccacaaccaggacccggggcaaaagaaaccgaaagtccaagcatctgaatggggatgagagaagtggcagtaattacaggcggatcccatggggccggaggcctgcaccaccgcgagatgtggccattttacaagaaagggctaataagttggtgaaatacctgttggttaaggaccagacaaagatccccatcaaacgctcagacatgctgagggatgtcatccaagaatatgatgaatatttcccagaaatcattgaacgagcaagctacactctggagaagatgtttcgagtcaatctgaaagaaattgataagcaaagtagcttgtatactctcatcagcactcaggaatcctctgcaggcatactgggaacgaccaaggacacacccaagctgggtctcctcatggtgattctgagtgtcatttttatgaatggcaccagtgctggctttagtggtggcctcagcaccagcgatggctttggcagtaggcctaatgccagcttcgacagaggactgagtaccatcattggctttggcagtggttccaacaccagcactggctttactggcgaacccagcaccagcacgggcttcagtagtggacccagttctattgttggcttcagcggtggaccaagcactggtgttggcttctgcagtggaccaagcaccagtggcttcagcggtggaccgagcacaggagctggcttcggcggtggaccaaacactggtgctggctttggtggtggaccgagcaccagtgctggctttggcagtggagccgccagtcttggtgcctgtggcttctcgtatggctagtgaggtttcaggtaactgcaatatttccatagccaggacccacagggatgggtacaagagctgggagatgttgtaagaaacactaaggcaggacagcagggtggaaaggtgagggcaattaaggaattatgagaagacagtgtatttggtgctaaaatgtgttcctatttgttttgttttcagatttattccccatgtttacagataccgctaataaattgcagtagtccttcccatggagccaaagtacatccttggaatctttgtccacacagcagtcaaggcagttatggccaatcagctgagggtgtcatgtgatggaaaaatctgtttgctgttcctgctttattgtttgctttctgtgtgctgtcatattttggtatcagagttacattaaatttgcaaaatg

SEQ ID NO: 4562 - DNA, 2272 bp, Homo sapiens
ccccaatccaacccacaccgaaccttcgcgcaccccctacaccccaacaacaacaacaactgcaaaatagaaaacaaatccccaagcccaggcgaaaagcagccaacaccggcggcggcggcggcctcggcaagcacggccagcgcgctcggactgcaagagggttaaaagtgtagattggatttcacccctggaactctagcacgccgagtgaacttgaatctttggctatttaaggaggactgggtttgttgtgaagttgcggtgatccagcgcagagccccgtcctgattgatcgcatcgcggggctcagatgactgtaaaatgaatagatgaaattcttgcttctcgaagattttcttgggcatctcccggaaagtgcgttttaaggcgaagtcatgatgtattctcccatctgtctcactcaggatgaatttcacccattcatcgaggcacttcttccacatgtccgtgcaattgcctatacttggttcaacctgcaggctcgaaaacgcaagtactttaaaaagcatgagaagcgaatgtcaaaggatgaagaaagagcagtcaaagatgagcttctcagtgaaaggcctgaaatcaaacagaagtgggcatccaggctccttgccaaactgcgcaaagatattcgccaggagtatcgagaggactttgtgctcaccgtgactggcaagaagcacccgtgctgtgtcttatccaatcccgaccagaagggtaagattaggagaatcgactgcctgcgacaggcagacaaagtctggcgtctggatctagtcatggtgatcctgttcaaaggcatccccttggaaagtaccgatggagagcggctcatgaaatccccacattgcacaaacccagcactttgtgtccagccacatcatatcacagtatcagttaaggagcttgatttgtttttggcatactacgtgcaggagcaagattctggacagtcaggaagtccaagccacaatgatcctgccgagaatcctccaggttaccttgaggatagttttgtaaaatctggagtcttcaatgtatcagaacttgtaagagtatccagaacgcccataacccagggaactggagtcaacttcccaattggagaaatcccaagccaaccatactatcatgacatgaactcgggggtcaatcttcagaggtctctgtcttctccaccaagcagcaaaagacccaaaactatatccatagatgaaaatatggaaccaagtcctacaggagacttttacccctctccaagttcaccagctgctggaagtcgaacatggcacgaaagagatcaagatatgtcttctccgactactatgaagaagcctgaaaagccattgttcagctctgcatctccacaggattcttccccaagactgagcactttcccccagcaccaccatcccggaatacctggagttgcacacagtgtcatctcaactcgaactccacctccaccttcaccgttgccatttccaacacaagctatccttcctccagccccatcgagctacttttctcatccaacaatcagatatcctccccacctgaatcctcaggatactctgaagaactatgtaccttcttatgacccatccagtccacaaaccagccagctgaggatttgtgactggaccatgaatcaaaacggcaggcatttataccccagtaccagtgaggatacattgggaattacttggcaaagttgagtcctggtacctgggctagcttggttcctttccaagtgtcaaataggacacccatcttaccggccaatgtccaaaattacggtttgaacataattggagaacctttccttcaagcagaaacaagcaactgagggaaaaagaaacacaacaatagtttaagaaattttttttttaaataaaaaaaaaggaaaagaggaagactggacaaaacaacacaaaggcagaaaggaaagaaactgaagaaagaagataatagaccagcaattgcagcacttacaatcactaattcccttaaggttgaaactgtaatgacataaaaagggtcgatgatatttcactgatggtagatcgcagcccctgcaacgtagcctttgttacatgaagtccgctgggaaatagatgttctgtctctatgacaatatattttaactgactttctagatgccttaatatttgcatgataagctagttttattggtttagtattcttgttgtttacgcatggaatcactattcctggttatctcaccaacgaa

SEQ ID NO: 4563 - DNA, 2800 bp, Homo sapiens
gtgtgagtgtgagcgtgtgtctgtgtgtgcgtgcgcggccgccctgcctctgcccgctccccgggcgcggagccgcgggtttcatggggcgattgcagcgattcccccacccagagcgacctgcgggcagcggcggcagtggcaggagccgcctttccgattccctacgatgcgggtgctgagctatggcaaagggcagcgaagtgacgagcgagacccgcgtacgactgtgaaagccacctggagccaccttgccgggattgtacctgcaggcagaaagtcttcctacgaccgtcttttcccttagaggcaccagaatccctgtaaccattcatccaggtgttgagaagatatgtagcagccgagcacccatcttttgacaccgtcctctgaaatcagctttggagatgctttcactctgtccgtcttctgcagcagccaggcagagtgccgactccttcacagccgtgaggaactcttcaggctccagaagctcttaaacctgatctacaatggaaaaaattcttttttatctgtttctcattggcatagcagtgaaagctcagatctgtccaaagcgttgtgtctgtcagattttgtctcctaatcttgcaaccctttgtgccaagaaagggcttttatttgttccaccaaacattgacagaagaactgtggaactgcggttggcagacaattttgttacaaatattaaaaggaaagattttgccaatatgaccagcttggtggacctgactctatccaggaatacaataagttttattacacctcatgctttcgctgacctacgaaatttgaggtctttgcatttgaatagcaacagattgactaaaattacaaatgatatgttcagtggtctttccaatcttcatcatttgatactgaacaacaatcagctgactttaatttcctctacagcgtttgatgatgtcttcgcccttgaggagctggatctgtcctataataatctagaaaccattccttgggatgctgttgagaagatggttagcttgcatacccttagtttggatcacaatatgattgataacattcctaaggggaccttctcccatttgcacaagatgactcggttagatgtgacatcaaataaattgcagaagctaccacctgaccctctctttcagcgagctcaggtactagcaacctcaggaatcataagcccatctacttttgcattaagttttggtggaaaccccttgcattgcaattgtgaattgttgtggttgaggcgtctgtccagagaatatgacttagagacctgtgcttctcctccacttttaactggccgctacttttggtcaattcctgaagaagagtttttgtgtgagcctcctctcattactcgtcatacacatgagatgagagtcctggagggacaaagggcaacactgaggtgcaaagccaggggagaccctgagcctgcaattcactggatttctcctgaagggaagcttatttcaaatgcaacaagatctctggtgtatgataacggaacacttgacattcttatcacaactgtaaaggatacaggtgcttttacctgcattgcttccaatcctgctggggaagcaacacaaatagtggatcttcatataattaagctccctcacttactaaatagtacaaaccatatccatgagcctgatcctggttcttcagatatctcaacttctaccaagtcaggttctaatacaagcagtagtaatgatggcatcacttccctcactgccacaagagtcgtgggttgcatccagtttactacggaacaggattatgtgcgttgccatttcatgcagtcccagtttttgggaggcaccatgattattattattggtggaatcattgtagcatctgtgctggtattcatcattattctgatgatccggtataaggtttgcaacaataatgggcaacacaaggtcaccaaggttagcaatgtttattcccaaactaacggggctcaaatacaaggctgtagtgtaacgctgccccagtccgtgtccaaacaagctgtgggacacgaagagaatgcccagtgttgtaaagctaccagtgacaatgtgattcaatcttcagaaacttgttcgagtcaggactccgctaccactacctctgctttgcctccttcctggacttcaagcacttctgtgtcccaaaagcagaaaagaaagactggcacaaagccaagtacagaaccacagaatgaagccgtcacaaatgttgaatcccaaaacactaacaggaacaactcaactgccttgcagttagctagccgtcctcccgattctgtcacagaggggcccacgtctaaaagagcacatataaagccaaatgctttgctgactaatgttgaccagattgtccaggaaacacagaggctggagttaatctgaagagcaccacttctcctctctctcctgaaaaaatttgccactgatatttttactggataaaattcaaaaatgtttcaattcacaaaggctaattgttgaactggtgtcgtagaagaaattgtctacaggagccaaggtgaaagtctctgatgacggcggaactggctccattagaccatggttcatcctcttttaaaaccaaatttttttttcttctggcctacaagtattttttttttaaaaaagaaaaaaagcctacattggcatcaagttctgtatcaatccatcttacattgccatccatgatttaacagactgtagaatcttgaataatctatatcactttaacaaataaatgttttactatg

SEQ ID NO: 4564 - DNA, 2762 bp, Homo sapiens
atattcataatctagtcctctctccctctgtttctgtactctgggtgactcagagagggaagagattcagccagcacactcctcgcgagcaagcattactctactgactggcagagacaggagaggtagatgtccacgcccacagaccctggtgcgatgccccacccagggccttcgccggggcctgggccttcccctgggccaattcttgggcctagtccaggaccaggaccatccccaggttccgtccacagcatgatggggccaagtcctggacctccaagtgtctcccatcctatgccgacgatggggtccacagacttcccacaggagggcatgcatcaaatgcataagcccatcgatggtatacatgacaaggggattgtagaagacatccattgtggatccatgaagggcactggtatgcgaccacctcacccaggcatgggccctccccagagtccaatggatcaacacagccaaggttatatgtcaccacacccatctcccagtcctactacaccgtggctcatgccatctcggagagggtggagaaacagtctgccctcctaattaatgggaccctaaagcattaccagctccagggcctggaatggatggtttccctgtataataacaacttgaacggaatcttagccgatgaaatggggcttggaaagaccatacagaccattgcactcatcacttatctgatggagcacaaaagactcaatggcccctatctcatcattgttcccctttcgactctatctaactggacatatgaatttgacaaatgggctccttctgtggtgaagatttcttacaagggtactcctgccatgcgtcgctcccttgtcccccagctacggagtggcaaattcaatgtcctcttgactacttatgagtatattataaaagacaagcacattcttgcaaagattcggtggaaatacatgatagtggacgaaggccaccgaatgaagaatcaccactgcaagctgactcaggtcttgaacactcactatgtggcccccagaaggatcctcttgactgggaccccgctgcagaataagctccctgaactctgggccctcctcaacttcctcctcccaacaatttttaagagctgcagcacatttgaacaatggttcaatgctccatttgccatgactggtgaaagggtggacttaaatgaagaagaaactatattgatcatcaggcgtctacataaggtgttaagaccatttttactaaggagactgaagaaagaagttgaatcccagcttcccgaaaaagtggaatatgtgatcaagtgtgacatgtcagctctgcagaagattctgtatcgccatatgcaagccaaggggatccttctcacagatggttctgagaaagataagaaggggaaaggaggtgctaagacacttatgaacactattatgcagttgagaaaaatctgcaaccacccatatatgtttcagcacattgaggaatcctttgctgaacacctaggctattcaaatggggtcatcaatggggctgaactgtatcgggcctcagggaagtttgagctgcttgatcgtattctgccaaaattgagagcgactaatcaccgagtgctgcttttctgccagatgacatctctcatgaccatcatggaggattattttgcttttcggaacttcctttacctacgccttgatggcaccaccaagtctgaagatcgtgctgctttgctgaagaaattcaatgaacctggatcccagtatttcattttcttgctgagcacaagagctggtggcctgggcttaaatcttcaggcagctgatacagtggtcatctttgacagcgactggaatcctcatcaggatctgcaggcccaagaccgagctcaccgcatcgggcagcagaacgaggtccgggtactgaggctctgtaccgtgaacagcgtggaggaaaagatcctcgcggccgcaaaatacaagctgaacgtggatcagaaagtgatccaggcgggcatgtttgaccaaaagtcttcaagccacgagcggagggcattcctgcaggccatcttggagcatgaggaggaaaatgaggaagaagatgaagtaccggacgatgagactctgaaccaaatgattgctcgacgagaagaagaatttgacctttttatgcggatggacatggaccggcggagggaagatgcccggaacccgaaacggaagccccgtttaatggaggaggatgagctgccctcctggatcattaaggatgacgctgaagtaggaaggctcacctgtgaagaagaggaggagaaaatatttgggagggggtcccgccagcgccgtgacgtggactacagtgacgccctcacggagaagcagtggctaagggccatcgaagacggcaatttggaggaaatggaagaggaagtacggcttaagaagcgaaaaagacgaagaaatgtggataaagatcctgcaaaagaagatgtggaaaaagctaagaagagaagaggccgccctcccgctgagaaactgtcaccaaatccccccaaactgacaaagcagatgaacgctatcatcgatactgtgataaactacaaagataggtgtaacgtggagaaggtgcccagtaattctcagttggaaatagaaggaaacagttcagggcgacagctcagtgaagtcttcattcagttaccttcaaggaaagaattaccagaatactatgaattaattaggaagccagtggatttc

SEQ ID NO: 4565 - DNA, 1577 bp, Homo sapiens
agatccggggatggagggagccggagaagaggagtgagaaggccggggaggcaggccctgctgtcttcctgcaggccggcagcctgctggcagtggaggaccaggccgtccaggaaaggaaggggtcaggaggtcgggcagggcctcagcaggttcagacaagtccccagaagggagctgcaggcgccctcgagtccaggccccaagcctggctccggttgtccaaagagggcctaggccaggcctctggtgcggaaactgagtcacagccagacctcagggcacggcctagacgcttacgagccaaagttaggggtagagagcagagacctccggggggtctcagggagtagggggcttcagggcctcccagtctagagccggattggcgagttagacgctttcttgttgttgcggaataattccatccaaaaccggcagctgttagccgagcaagtgagtagtcacatcacctccagccctctgcattcacgtagcattgctgcgcttgctgatgaccgtatggcactggtgtcaggcatcagcttagatccagaagcagcgattggtgtgacaaaacggccacctcctaagtgggtggatggagtggatgaaattcagtatgatgttggccggattaagcagaagatgaaagaattggccagccctcatgacaagcatttaaacagacccaccctggatgacagcagcgaagaggaacatgccattgagataactacccaagagatcactcagctcttccacaggtgccagcgtgccgtgcaggccctgccgagccgggcccgggcctgctccgagcaggaggggcggctgcttgggaacgtggtggcctcgctggcgcaggccctgcaggaactctccaccagcttccggcacgcacaatcaggctacctcaaacgcatgaagaatcgagaggaaagatcccagcattttttcgacacatcagtaccactaatggatgatggagacgataacactctttaccatcggggttttacagaggaccagttagttctggtggagcagaacacactgatggtggaagagcgggaacgagagattcgccagattgtacagtccatttctgacctgaatgaaatattcagggacttaggggcgatgattgtagaacagggtacagtccttgacagaattgactataacgttgaacagtcctgtatcaaaactgaagatggtttgaaacagcttcacaaggcagaacagtatcaaaagaagaatcggaagatgcttgtgattttaatattatttgtcatcatcattgtgctcattgttgtcctcgttggcgtgaagtctcgataagtggcattgggttttcgtgtgtgccgcgcgtgtggatctcccgggtgtgaggggcttggcctgcgccccgccagctgcccgcagaggtgcagcctcgaggaatctgagggcgtcggggcagcgaacctttgcatccacggactcctccttccctagtcctgctcaagcggtccggggaatgggtttttgtttttccttcattgttgagaatttaaggacctttgatactgctgcac

SEQ ID NO: 4566 - DNA, 893 bp, Homo sapiens
gaaagtgcgctggaagcttttagggttgggacgcgcctgcacatgggctggttagctcctgaaacttgttcgttcctgtgtgcataacctggggttgggagattcgggtcagcagatctgtgagagccgggtgggaattacgttcctacagtgtttgagaattacacggccagttttgaaatcgacacacaaagaatagagttgagcctgtgggacacttcgggttctccttactatgacaatgtccgccccctctcttaccctgattcggatgctgtgctgatttgctttgacatcagtagaccagagaccctggacagtgtcctcaaaaagtggaaaggtgaaatccaggaattttgtccaaataccaaaatgctcttggtcggctgcaagtctgatctgcggacagatgttagtacattagtagagctctccaatcacaggcagacgccagtgtcctatgaccagggggcagctacttatatcgaatgctcagctttacagtcggaaaatagcgtcagagacatttttcacgttgccaccttggcatgtgtaaataagacaaataaaaacgttaagcggaacaaatcacagagagccacaaagcggatttcacacatgcctagcagaccagaactctcggcagttgctacggacttacgaaaggacaaagcgaagagctgcactgtgatgtgaatctttcattatctttaatgaagacaaaggaatctagtgtaaaaaacaacagcaaacaaaaaggtgaagtctaaatgaagtgcacagccaaagtcatgtataccagaggcttaggaggcgtttgagaggatactcatctttttggaatcctgaccttaggttcggcatgtagaccaagtgatgagaagtgaatacat

SEQ ID NO: 4567 - DNA, 3061 bp, Homo sapiens
aactaggaggatgacatggaggaggacgacgatgactccgattatccggaggagctggaagatgacgacgaggacgccagttactccacggaaagcagcttcagcagcactccagaaagtggtaaaatagctgtggagtgcagacccagtgaagagattgtagatgtcagatgggaagaactacacagtttaattcaagtcagttgctctcccctgaaggaagagtattctcggatttcacctcagaggaggaagaattcaggctgccagaactggactagcacttctgaagatcccaaggccagatgtcagccctgcctcaggaaccaactgaaaatttggctccattcctgaaggaattggattcagctggagagctgcccctggggccagagccgttcttggctgcacatcaggacttaaatgacaagcggactccagaagaaaggctcccagaggtggttccgcttctcaaccgggatcagaaccaggccctagttcagcttcctcgcctcaagtgggttcaaactacagatctagatcgggctgcaagtcatcaggcagatgaaatacttgttccactagacagtaaggtttcaagaccaaccaaatttgttgtttcgcccaagaacctgaagaaagatctagctgaacgttggagccttcctgagattgttgggattccacaccaattattcaaacctcagcgtcagaaacagactttgccagatgattatttgagtatggacacactgtatcccggcagcctacctccagaactccgggtgaacgcagatgagcctccagggcctcctgagcaagttggactttctcaattccatctagagcccaaaagtcaaaatccagagacccttgaagacatccagtcctcttcactccaggaagaagccccagcgcagcttctacagctccctcaggaggtagaaccttcaacccagcaggaggccccagctctgcctccagagtcctctatggagagtctagctcaaactccactgaatcatgaagtgacagttcaacctccaggtgaggatcaagctcattataatttgcccaagtttacagtcaaacctgcagatgtggaggttaccatgacttcagagcctaaaaatgagacagaatctacccaagcccagcaggaggccccaattcagcctcccgaggaggcggaaccttcttctacagccctgaggactacagatcctcctccagaacaccctgaggtgacacttccaccttcagacaagggtcaggctcagcattcacacctgactgaagccacagttcaacctctggacctggagcttagcataactacagagcctactacagaggttaaaccgtctccaaccacggaggaaacctcagctcagcctccagacccggggcttgccataactccagaacccactacagagattggacattccacagccctggagaagactagagctcctcatccagaccaggttcagactctgcatcgaagcctgactgaagtcacaggtccacctacaaagttagaatcttcgcaggattcattggtgcagtctgaaactgcaccagaggaacagaaggcctccacaagcaccaacatatgtgagctctgcacctgcggagatgagactctgtcatgtgttggtctcagcccaaagcagaggctccgccaagtgcctgtgccagagcccgacacctacaatggcatcttcaccaccttaaatttccaaggaaactatatttcataccttgatggaaatgtatggaaagcatacagttggaccgagaaactaattctcagtgaaaattatttgactgaattacctaaggattcatttgaaggcctgctatacctccagtatttagatttatcctgcaataaaatacgatatattgaaagacaaacatttgaatcactaccatttttgcagtatataaatctgggctgcaatctaattacaaaactgagccttggaacatttcaggcctggcacggaatgcagtttttacacaacttaattctcaatcgcaatcctctgactactgtcgaagatccatatctctttgaactgccggcattaaaatatctagacatgggaacaacacacatcacacttacaacacttaagaacattctcacgatgactgttgaactggaaaaactgatcttacctagccatatggcctgctgcctctgccaatttaaaaatagcattgaggctgtctgcaagacagtcaagctgcattgcaacactgcatgtctgactaacagcatacattgtcctgaagaagcatctgtagggaatccagaaggagcgttcatgaagatgttacaagcccggaagcagcacatgagcactcagctgactattgagtcggaggcgccctcagacagcagtggcatcaacttgtcaggctttgggggtgatcagcttgaaattcagctaaccgagcagctacggtccctcatccccaacgaggatgtgagaaagttcatgtctcatgttatccggaccttgaaaatggaatgttcagaaacacatgtgcaagggagctgtgccaagctcatgttgcgaacaggcctcctgatgaagcttctcagcgagcagcaggaagcaaaggcattgaatgtagaatgggatacggaccaacaaaaaacaaattatattaatgagaacatggaacagaatgaacagaaagagcagaagtcaagtgagctcatgaaagaagttccaggagatgactataagaacaaactcatcttcgcaatatctgtgactgtaatactaataattttgattataattttttgtcttatagaggtgaattcacataaaagggcatcagaaaaatacaaagacaacccatcaatatcaggagcctgagcatgagttaaagcatgtggatggcctggagctatgtttttaaaattgttattaaatattggttttttacttaaatcaatgaaaactttctttactttgtggttgtgttcctcaaaatgagaatttttaacaataataaaaataaagcttgttagatc

SEQ ID NO: 4568 - DNA, 1035 bp, Homo sapiens
atgctggaggttcgctagccgaagcggctgcatctggcgccgcgtctgccccgcgtgctcggagcggattctgcccgccgtccccggagccctcggcgccccgctgagcccgcgatcacttcctccctgtgaccaaccggcgctgcaggttagagcctggcaatgccgtttgggtgtgtgactctgggtgacaagaagaactataaccagccatcggaggtgactgacagatatgatttgggacaggtcatcaagactgaggagttttgtgaaatcttccgggccaaggacaagacgacaggcaagctgcacacctgcaagaagttccagaagcgggacggccgcaaggtgcggaaagctgccaagaacgagataggcatcctcaagatggtgaagcatcccaacatcctacagctggtggatgtgtttgtgacccgcaaggagtactttatcttcctggagctggctactactcggagcgagacacaagcaacgtggtacggcaagtcctggaggccgtggcctatttgcactcactcaagatcgtgcacaggaatctcaagctggagaacctggtttactacaaccggctgaagaactcgaagattgtcatcagtgacttccatctggctaagctagaaaatggcctcatcaaggagccctgtgggacccccgagtatctggccccagaggtggtaggccggcagcggtatggacgccctgtggactgctgggccattggagtcatcatgtacatcctgctttcaggcaacccacctttctatgaggaggtggaagaagatgattatgagaaccatgataagaatctcttccgcaagatcctggctggtgactatgagtttgactctccatattgggatgatatttcgcaggcagccaaagacctggtcacaaggctgatggaggtggagcaagaccagcggatcactgcagaagaggccatctcccatgagtggatttctggcaatgctgcttctgataagaacatcaaggatggtgtctgtgcccagattg

SEQ ID NO: 4569 - DNA, 1118 bp, Homo sapiens
acttcattaaatctagaggcagttgagcatgggagccgtctgtatgttgaattagggctcgcactcttgcgcaacacgtcaccagtcggaaactgggggtttgcttctgtgatttatttcattattgtgctgctgatgaagagactagcagctcgctgctttgctggcttgttaattttatccccactaactgtgatttctgatagccggcctgctgatagtggtaagtgctgctggctctggtttaaagcaagcgtttgcaggccatcgaagacggcaatttggaggaaatggaagaggaagtacggcttaagaagcgaaaaagacgaagaaatgtggataaagatcctgcaaaagaagatgtggaaaaagctaagaagagaagaggccgccctcccgctgagaaactgtcaccaaatccccccaaactgacaaagcagatgaacgctatcatcgatactgtgataaactacaaagatagttcagggcgacagctcagtgaagtcttcattcagttaccttcaaggaaagaattaccagaatactatgaattaattaggaagccagtggatttcaaaaaaataaaggaaaggattcgtaatcataagtaccggagcctaggcgacctggagaaggatgtcatgcttctctgtcacaacgctcagacgttcaacctggagggatcccagatctatgaagactccatcgtcttacagtcagtgtttaagagtgcccggcagaaaattgccaaagaggaagagagtgaggatgaaagcaatgaagaggaggaagaggaagatgaagaagagtcagagtccgaggcaaaatcagtcaaggtgaaaattaagctcaataaaaaagatgacaaaggccgggacaaagggaaaggcaagaaaaggccaaatcgaggaaaagccaaacctgtagtgagcgattttgacagcgatgaggagcaggatgaacgtgaacagtcagaaggaagtgggacggatgatgagtgatcagtatggacctttttccttggtagaactgaattccttcctcccctgtctcatttctacccagtgagttcatttgtcatataggcactgggttgtttctatatcatcatcgtctat

SEQ ID NO: 4570 - DNA, 994 bp, Homo sapiens
gagctcgcccaccgcccgccccagcagtggctgcaccatgcacgtgaacggcaaagtggcgctggtgaccggcgcggctcagggcataggcagagcctttgcagaggcgctgctgcttaagggcgccaaggtagcgctggtggattggaatcttgaagcaggtgtacagtgtaaagctgccctggatgagcagtttgaacctcagaagactctgttcatccagtgcgatgtggctgaccagcaacaactgagaggactcatgcccgttgcacagcagccggtttattgtgcttcaaagcatggcatagttggattcacacgctcagcagcgttggctgctaatcttatgaacagtggtgtgagactgaatgccatttgtccaggctttgttaacacagccatccttgaatcaattgaaaaagaagaaaacatgggacaatatatagaatataaggatcatatcaaggatatgattaaatactatggagttttggacccaccattgattgccaatggattgataacactcattgaagatgatgctttaaatggtgctattatgaagatcacaacttctaagggaattcattttcaagactatgatacaactccatttcaagcaaaaacccaatgaacagcttatgtgttagccatagctgaaaataagcacaaatagcttatattcagatcctatcttcatttgaatatagcttttaaatgaaatgttacagtttgaagttttccttcatgcacttggtgataaacgttttctaaatttttagttaagtatatggataaaaagttatgaactattaaaaatgtgatgtggaccaaaggctaggttgtaatcttgatagtctaaaaaatgatcaaaacaaatgattttcaaggaatattcaattctgcctttcagaaagtgtatttatatctgtgcttcataaatattaatgttcttcagaacatcattttaaaggagatacttgaattgttattt

SEQ ID NO: 4571 - DNA, 1178 bp, Homo sapiens
tcagcttcctggcacttctggtcagcaacccagtgttgggcaacaaatgatctttgaggaacatggttttaggcggaccacaccgcccacaacggccacccccataaggcataggccaagaccatacccgccgaatgtaggtgaggaaatccaaattggtcacatccccagggaagatgtagactatcacctgtacccacacggtccgggactcaatccaaatgcctctacaggacaagaagctctctctcagacaaccatctcatgggccccattccaggacacttctgagtacatcatttcatgtcatcctgttggcactgatgaagaacccttacagttcagggttcctggaacttctaccagtgccactctgacaggcctcaccagaggtgccacctacaacatcatagtggaggcactgaaagaccagcagaggcataaggttcgggaagaggttgttaccgtgggcaactctgtcaacgaaggcttgaaccaacctacggatgactcgtgctttgacccctacacagtttcccattatgccgttggagatgagtgggaacgaatgtctgaatcaggctttaaactgttgtgccagtgcttaggctttggaagtggtcatttcagatgtgattcatctagatggtgccatgacaatggtgtgaactacaagattggagagaagtgggaccgtcagggagaaaatggccagatgatgagctgcacatgtcttgggaacggaaaaggagaattcaagtgtgaccctcatgaggcaacgtgttatgatgatgggaagacataccacgtaggagaacagtggcagaaggaatatctcggtgccatttgctcctgcacatgctttggaggccagcggggctggcgctgtgacaactgccgcagacctgggggtgaacccagtcccgaaggcactactggccagtcctacaaccagtattctcagagataccatcagagaacaaacactaatgttaattgcccaattgagtgcttcatgcctttagatgtacaggctgacagagaagattcccgagagtaaatcatctttccaatccagaggaacaagcatgtctctctgccaagatccatctaaactggagtgatgttggcagacccagcttagagttcttctttctttcttaagccctttgctctgg

SEQ ID NO: 4572 - DNA, 3720 bp, Homo sapiens
ctgaggtggaccccgctaaactcttccaccattattgggtaccgcatcacagtagttgcggcaggagaaggtatccctatttttgaagattttgtggactcctcagtaggatactacacagtcacagggctggagccgggcattgactatgatatcagcgttatcactctcattaatggcggcgagagtgcccctactacactgacacaacaaacggctgttcctcctcccactgacctgcgattcaccaacattggtccagacaccatgcgtgtcacctgggctccacccccatccattgatttaaccaacttcctggtgcgttactcacctgtgaaaaatgaggaagatgttgcagagttgtcaatttctccttcagacaatgcagtggtcttaacaaatctcctgcctggtacagaatatgtagtgagtgtctccagtgtctacgaacaacatgagagcacacctcttagaggaagacagaaaacaggtcttgattccccaactggcattgacttttctgatattactggcaactcttttactgtgcactggattgctcctcgagccaccatcactggctacaggatccgccatcatcccgagcacttcagtgggagacctcgagaagatcgggtgccccactctcggaattccatcaccctcaccaacctcactccaggcacagagtatgtggtcagcatcgttgctcttaatggcagagaggaaagtcccttattgattggccaacaatcaacagtttctgatgttccgagggacctggaagttgttgctgcgacccccaccagcctactgatcagctgggatgctcctgctgtcacagtgagatattacaggatcacttacggagaaacaggaggaaatagccctgtccaggagttcactgtgcctgggagcaagtctacagctaccatcagcggccttaaacctggagttgattataccatcactgtgtatgctgtcactggccgtggagacagccccgcaagcagcaagccaatttccattaattaccgaacagaaattgacaaaccatcccagatgcaagtgaccgatgttcaggacaacagcattagtgtcaagtggctgccttcaagttcccctgttactggttacagagtaaccaccactcccaaaaatggaccaggaccaacaaaaactaaaactgcaggtccagatcaaacagaaatgactattgaaggcttgcagcccacagtggagtatgtggttagtgtctatgctcagaatccaagcggagagagtcagcctctggttcagactgcagtaaccactattcctgcaccaactgacctgaagttcactcaggtcacacccacaagcctgagcgcccagtggacaccacccaatgttcagctcactggatatcgagtgcgggtgacccccaaggagaagaccggaccaatgaaagaaatcaaccttgctcctgacagctcatccgtggttgtatcaggacttatggtggccaccaaatatgaagtgagtgtctatgctcttaaggacactttgacaagcagaccagctcagggtgttgtcaccactctggagaatgtcagcccaccaagaagggctcgtgtgacagatgctactgagaccaccatcaccattagctggagaaccaagactgagacgatcactggcttccaagttgatgccgttccagccaatggccagactccaatccagagaaccatcaagccagatgtcagaagctacaccatcacaggtttacaaccaggcactgactacaagatctacctgtacaccttgaatgacaatgctcggagctcccctgtggtcatcgacgcctccactgccattgatgcaccatccaacctgcgtttcctggccaccacacccaattccttgctggtatcatggcagccgccacgtgccaggattaccggctacatcatcaagtatgagaagcctgggtctcctcccagagaagtggtccctcggccccgccctggtgtcacagaggctactattactggcctggaaccgggaaccgaatatacaatttatgtcattgccctgaagaataatcagaagagcgagcccctgattggaaggaaaaagacagacgagcttccccaactggtaacccttccacaccccaatcttcatggaccagagatcttggatgttccttccacagttcaaaagacccctttcgtcacccaccctgggtatgacactggaaatggtattcagcttcctggcacttctggtcagcaacccagtgttgggcaacaaatgatctttgaggaacatggttttaggcggaccacaccgcccacaacggccacccccataaggcataggccaaggccatacccgccgaatgtaggtgaggaaatccaaattggtcacatccccagggaagatgtagactatcacctgtacccacacggtccgggactcaatccaaatgcctctacaggacaagaagctctctctcagacaaccatctcatgggccccattccaggacacttctgagtacatcatttcatgtcatcctgttggcactgatgaagaacccttacagttcagggttcctggaacttctaccagtgccactctgacaggcctcaccagaggtgccacctacaacatcatagtggaggcactgaaagaccagcagaggcataaggttcgggaagaggttgttaccgtgggcaactctgtcaacgaaggcttgaaccaacctacggatgactcgtgctttgacccctacacagtttcccattatgccgttggagatgagtgggaacgaatgtctgaatcaggctttaaactgttgtgccagtgcttaggctttggaagtggccatttcagatgtgattcatctagatggtgccatgacaatggtgtgaactacaagattggagagaagtgggaccgtcagggagaaaatggccagatgatgagctgcacatgtcttgggaacggaaaaggagaattcaagtgtgaccctcatgaggcaacgtgttacgatgatgggaagacataccacgtaggagaacagtggcagaaggaatatctcggtgccatttgctcctgcacatgctttggaggccagcggggctggcgctgtgacaactgccgcagacctgggggtgaacccagtcccgaaggcactactggccagtcctacaaccagtattctcagagataccatcagagaacaaacactaatgttaattgcccaattgagtgcttcatgcctttagatgtacaggctgacagagaagattcccgagagtaaatcatctttccaatccagaggaacaagcatgtctctctgccaagatccatctaaactggagtgatgttagcagacccagcttagagttcttctttctttcttaagccctttgctctggaggaagttctccagcttcagctcaactcacagcttctccaagcatcaccctgggagtttcctgagggttttctcataaatgagggctgcacattgcctgttctgcttcgaagtattcaataccgctcagtattttaaatgaagtgattctaagatttggtttgggatcaataggaaagcatatgcagccaaccaagatgcaaatgttttgaaatgatatgaccaaaattttaagtaggaaagtcacccaaacacttctgctttcacttaagtgtctggcccgcaatactg

SEQ ID NO: 4573 - DNA, 1541 bp, Homo sapiens
gaaaactaaatccgtctcagaatgctacaggcaccagccgttcagaatctcctgtatgttctagtagagatgctgtatcttctcctcagaaacggcttttggattcagagtttattgatcctttaatgaataaaaaagcccgaatatctcacctgacgaacagagtaccaccaacactaaatggtcatttgaatcccaccagtgaaaaatcggctgcaggcctcccactgccccctgcggctgctgccatccccacccctccaccgctgccttcaacctatctacccatctcacatcctcctcagattgtaaattctaactccaactcccctagcactccagaaggccgggggactcaagacctacctgttgacagttttagtcaaaacgatagtatctatgaggaccagcaagacaaatatacctctaggacttctctggaaaccttaccccctggttccgttctactaaagtgtccaaagcctatggaagaaaaccattcaatgtctcacaaaaagtccaaaaagaagtctaaaaaacataaggaaaaggaccaaataaaaaagcacgacattgagactattgaggaaaaggaggaagatcttaagagagaagaggaaattgccaagctaaataactccagtccaaattccagtggaggagttaaagaggattgcactgcctccatggaaccttcagcaattgaactcccagattatttgataaaatatatcgctatcgtctcctatgagcaacgccagaattataaggatgacttcaatgcagagtatgatgagtacagagctttgcatgccaggatggagactgtagctagaagatttatcaaactagatgcacaaagaaagcgcctttctccaggctcaaaagagtatcagaatgttcatgaagaagtcttacaagaatatcagaagataaagcagtctagtcccaattaccatgaagaaaaatacagatgtgaatatcttcataacaagctggctcacatcaaaaggctaataggtgaatttgaccaacagcaagcagagtcatggtcctagaactctgcttggaccagaagatgtgaataaacttaagcttatttatttaaaattccaaatgagttgctctagattctaaaaaggtgaaactttggctgttgaaagtttcagtattagtaaacttgagttactttttcttttccattttactttgcttccctgcatttcgaagctgctctttctggtcctccccaccaccccacccccaagacttgtgtttgttaatagaaataatttttttaggtattggggatccattgtctatatttcaaatcagttttttttcctcaaaaacttgtgtttgttattagaaatgattttttagatattggggatccagtgtccacacttaaaagttgtatgtgtttaaaaaacaacaacagtaatgtgcaaggtgaaatgcttttggataaacgtaagcctattttctgacgtttcttaatgcaaactctttgccttaaatggtagaatatttagaaattt

SEQ ID NO: 4574 - DNA, 2426 bp, Homo sapiens
actggccagggccctcatccaggagccaggaaacatctactaccacgagtcgcgttgcccagcgtgtgtcagcctccttatccaaacggcaaggcagcctccccgggatgtagagaagacacggttcaatgtgtagaccttctccctctccagtgtctccagcctccaatcccaggacatcactagtacaggtgaaaacaaaagcctgtctcagcggccatcactctgccagcagcacctcaaagccattcaaaacgcccaaagacaatctacttacctccagcagcaaacagcacacagtctttcctgcgaaaggatcaagggataaaccatgtgttccagttcctgtagtcagtttagagaaaattcctaacctagtgaaggcagatggtgccaatgtcaaaatgaactccacaaccactactgcagtttctgcctcctccacctcgtcctctgccgtctccacccctcctttaattaagcctgtcctgatgtccaagtcagtgccaccttcaccagagaagatcttaaatggcaaaggaattctgccaaccaccatagacaagaaacaccaaaatggcaccaaaaacagcaacaagccttacaggagactttcagagagagaatttgacccaaataaacactgtggagtattggatcccgagacaaagaaaccttgcacaagatccctcacctgcaagacacattcgctaagccatcggagggcagtcccaggccggaaaaagcaatttgacctcctcctggcagaacacaaagcaaagtcccgggaaaaagaagttaaagataaagagcatctcctgacttccacgagggaaatacttccaagccaatccgggccggcacaggattctctgctagggtcttcagggagctctgggccagaaccaaaagttgcatcccctgcaaaatccagaccacccaactctgtacttcctagaccatcatctgcaaatagcataagcagcagcacatcttcaaatcatagcggccacactccagagcccccactcccaccggttggaggtgacctcgccagccgactgtccagtgatgaaggggagatggacggagccgacgaatccgagaagctagactgtcagttctccacgcaccaccccagacctctggcgttttgctcatttgggagtcgcctcatgggacgagggtactatgtgtttgatagaagatgggatcgttttcgattcgcactaaactccatggtagaaaaacacctgaattcacagatgtggaagaagatccctcctgcggcagatagccccctgccctcgccagcagcccacatcaccacccccgttccagcatccgttttgcagcctttcagcaaccccagtgctgtgtatcttccttcagctcccatcagctcgaggctcacctcttcttacataatgacatcagccatgctctcaaacgcagctttcgtgacatcgccggacccgagcgccctcatgtcccacaccacagctttccctcatgtggccgcaaccctcagcatcatggactcaaccttcaaggccccatccgccgtgtccccgataccagccgtcatcccttccccatcccacaagccatccaaaaccaaaaccagcaaatcctcaaaagtcaaagacctgtccacccgtagcgacgagtctccaagtaacaaaaaaaggaagccacagtcttcgacttcctcctcctcctcctcctcctcctcttccttgcagacatccctctcgtctccactgtcagggcctcacaaaaagaactgtgttttgaatgccagttctgctttgaactcctatcaggcggcccctccctataacagcctgtctgtgcacaactcaaacaatggggtgagcccactcagtgccaaactggagccctcaggacggacctcgctgcccggcggccccgcggacatagtgagacaggtgggcgcggtgggaggcagcagtgactcctgtcccctctctgtgccctcccttgcgctccacgcaggggacctctctctggcctcacacaatgctgtgtcttctctgcccctctcttttgacaaatcagaaggaaaaaagcgtaagaactcgagttctagtagcaaagcctgtaaaatcactaaaatgcctggtatgaatagcgttcacaaaaagaacccgcccagccttctcgcaccggtgcccgatcccgttaacagcacctcctctcggcaggttgggaaaaatagcagcctagctttgtcacaatccagtccttcaagtatatccagcccaggacacagccgacagaagaacacaaacagaacgggcaggataaggactcttccataacaagactatgaagccacttccacatcaattccaggccacctaatcccatccgaggaggccgtggggaggaggagggagggg

SEQ ID NO: 4575 - DNA, 2355 bp, Homo sapiens
ttggtagagacggcaaccccgggcctgtgcccagctgaaggatgaactgagggcaggatcgttaaatgcagaagccgaagacagtggcctgggagaatctgggtccagagatgtcagctcttggaactgctttttcaagagaaggtggccgtaaagttgaattccctacagatccaaaggtagttgtttatgaaaagcctttctttgaaggaaaatgtgtggaactagaaacaggaatgtgtagttttgtcatggagggaggtgaaacagaagaggcgactggagacgatcatttgccgtttacgtcagtggggtctatgaaagttctaagaggcatttgggttgcatatgagaagcctggatttaccggtcatcagtatttgctagaagaaggagaatacagggactggaaagcctggggaggttacaatggagagcttcagtctttacgacctatattaggtgatttttcaaatgctcacatgataatgtacagtgaaaaaaactttggatccaaaggttccagtattgatgtattgggaattgttgctaatttaaaggagactggatatggagtgaagacacagtctattaatgtactgagtggagtatgggtagcctatgaaaatcctgacttcacaggagaacagtatatactggataaaggattttataccagttttgaggactggggaggcaaaaattgtaagatctcttctgttcaacctatatgtttggattctttcactggcccaaggagacgaaatcagattcacttgttttcagaaccacagtttcaaggtcacagtcaaagttttgaagaaacaacaagtcaaattgatgattcattttctaccaagtcttgcagagtttcaggaggcagctgggttgtatatgatggagagaatttcactggtaatcaatacgtgttggaagaaggccattatccttgtctgtctgcaatgggatgcccgcctggagcaactttcaagtctcttcgttttatagatgttgaattttctgaaccaacaattattctctttgaaagagaagacttcaaaggaaaaaagattgaacttaatgcagaaactgtcaatctccgatccctgggattcaacacacaaatacgctctgttcaggttattggtggcatatgggttacttatgaatatggcagttacagagggcgacagttcctattgtcacctgcagaagtacctaattggtatgaattcagtggctgtcgccaaataggttctctacgaccttttgttcagaagcgaatttatttcagacttcgaaacaaagcaacagggttattcatgtcaaccaatggaaacttagaggatctgaagcttctgaggatacaggtcatggaggatgtcggggccgatgatcagatttggatctatcaagaaggatgtatcaaatgcaggatagcagaagactgctgcctgacgattgtgggcagcctggtaacatctggctccaagctaggcctggccctggaccagaatgctgacagccagttctggagcttgaagtccgatggcaggatttacagcaagttgaagccaaatttagttttagacattaaagggggcacacagtatgatcaaaatcacattatcctcaacactgtcagcaaagagaagtttacacaagtgtgggaagccatggtcctatatacctgaacaaagaaggaagaagaatcttctggaggtccttccagccaccttatttcttaaaaaggacaatgctgatggaagaccagactggaaagtggatcgactcctccttcattgattctaaattcaaccttaaatcatgctgccatgactcagagaacttactcatcgtttcaaaagactatcatagctttaaaccaataatttgtcctcctttcatttcttgcctttcatttttggtagctgcttaaacaggttgcctattagcagcttttgggtgattttgtaaaatgtcatatcaagatttcaagactgtgtacattttaaattatttccaaagatagtgacaggagagaactggaacaaatttaccaactttgtggacctacaaagcccttacactttaaagggtaagacaaaggcttaagtttgaaaggtagagaactgtttagcatctgagaagaaatactttattaggcctgtaattttggttcttggccttaaacactttctggaacctttaaatatgctgcatagcacaatgggaaagccttaggtattcacacatttaaggaactctaaacaaaatactattttcctttagttcatattaaaaattaatacattttaaaaatttaatgtcaaagtctggtaacatttgttagta

SEQ ID NO: 4576 - DNA, 3774 bp, Homo sapiens
agaagtgacttcagactcaggaagcatcgttgtgtccggcttgactccaggagtagaatacgtctacaccatccaagtcctgagagatggacaggaaagagatgcgccaattgtaaacaaagtggtgacaccattgtctccaccaacaaacttgcatctggaggcaaaccctgacactggagtgctcacagtctcctgggagaggagcaccaccccagacattactggttatagaattaccacaacccctacaaacggccagcagggaaattctttggaagaagtggtccatgctgatcagagctcctgcacttttgataacctgagtcccggcctggagtacaatgtcagtgtttacactgtcaaggatgacaaggaaagtgtccctatctctgataccatcatcccagaggtgccccaactcactgacctaagctttgttgatataaccgattcaagcatcggcctgaggtggaccccgctaaactcttccaccattattgggtaccgcatcacagtagttgcggcaggagaaggtatccctatttttgaagattttgtggactcctcagtaggatactacacagtcacagggctggagccgggcattgactatgatatcagcgttatcactctcattaatggcggcgagagtgcccctactacactgacacaacaaacggctgttcctcctcccactgacctgcgattcaccaacattggtccagacaccatgcgtgtcacctgggctccacccccatccattgatttaaccaacttcctggtgcgttactcacctgtgaaaaatgaggaagatgttgcagagttgtcaatttctccttcagacaatgcagtggtcttaacaaatctcctgcctggtacagaatatgtagtgagtgtctccagtgtctacgaacaacatgagagcacacctcttagaggaagacagaaaacaggtcttgattccccaactggcattgacttttctgatattactgccaactcttttactgtgcactggattgctcctcgagccaccatcactggctacaggatccgccatcatcccgagcacttcagtgggagacctcgagaagatcgggtgccccactctcggaattccatcaccctcaccaacctcactccaggcacagagtatgtggtcagcatcgttgctcttaatggcagagaggaaagtcccttattgattggccaacaatcaacagtttctgatgttccgagggacctggaagttgttgctgcgacccccaccagcctactgatcagctgggatgctcctgctgtcacagtgagatattacaggatcacttacggagaaacaggaggaaatagccctgtccaggagttcactgtgcctgggagcaagtctacagctaccatcagcggccttaaacctggagttgattataccatcactgtgtatgctgtcactggccgtggagacagccccgcaagcagcaagccaatttccattaattaccgaacagaaattgacaaaccatcccagatgcaagtgaccgatgttcaggacaacagcattagtgtcaagtggctgccttcaagttcccctgttactggttacagagtaaccaccactcccaaaaatggaccaggaccaacaaaaactaaaactgcaggtccagatcaaacagaaatgactattgaaggcttgcatcccacagtggagtatgtggttagtgtctatgctcagaatccaagcggagagagtcagcctctggttcagactgcagtaaccactattcctgcaccaactgacctgaagttcactcaggtcacacccacaagcctgagcgcccagtggacaccacccaatgttcagctcactggatatcgagtgcgggtgacccccaaggagaagaccggaccaatgaaagaaatcaaccttgctcctgacagctcatccgtggttgtatcaggacttatggtggccaccaaatatgaagtgagtgtctatgctcttaaggacactttgacaagcagaccagctcagggtgttgtcaccactctggagaatgtcagcccaccaagaagggctcgtgtgacagatgctactgagaccaccatcaccattagctggagaaccaagactgagacgatcactggcttccaagttgatgccgttccagccaatggccagactccaatccagagaaccatcaagccagatgttagaagctacaccatcacaggtttacaaccaggcactgactacaagatctacctgtacaccttgaatgacaatgctcggagctcccctgtggtcatcgacgcctccactgccattgatgcaccatccaacctgcgtttcctggccaccacacccaattccttgctggtatcatggcagccgccacgtgccaggattaccggctacatcatcaagtatgagaagcctgggtctcctcccagagaagtggtccctcggccccgccctggtgtcacagaggctactattactggcctggaaccgggaaccgaatatacaatttatgtcattgccctgaagaataatcagaagagcgagcccctgattggaaggaaaaagacaggacaagaagctctctctcagacaaccatctcatgggccccattccaggacacttctgagtacatcatttcatgtcatcctgttggcactgatgaagaacccttacagttcagggttcctggaacttctaccagtgccactctgacaggcctcaccagaggtgccacctacaacatcatagtggaggcactgaaagaccagcagaggcataaggttcgggaagaggttattaccgtgggcaactctgtcaacgaaggcttgaaccaacctacggatgactcgtgctttgacccctacacagtttcccattatgccgttggagatgagtgggaacgaatgtctgaatcaggctttaaactgttgtgccagtgcttaggctttggaagtggtcatttcagatgtgattcatctagatggtgccatgacaatggtgtgaactacaagattggagagaagtgggaccgtcagggagaaaatggccagatgatgagctgcacatgtcttgggaacggaaaaggagaattcaagtgtgaccctcatgaggcaacgtgttacgatgatgggaagacataccacgtaggagaacagtggcagaaggaatatctcggtgccatttgctcctgcacatgctttggaggccagcggggctggcgctgtgacaactgccgcagacctgggggtgaacccagtcccgaaggcactactggccagtcctacaaccagtattctcagagataccatcagagaacaaacactaatgttaattgcccaattgagtgcttcatgcctttagatgtacaggctgacagagaagattcccgagagtaaatcatctttccaatccagaggaacaagcatgtctctctgccaagatccatctaaactggagtgatgttagcagacccagcttagagttcttctttctttcttaagccctttgctctggaggaagttctccagcttcagctcaactcacagcttctccaagcatcaccctgggagtttcctgagggttttctcataaatgagggctgcacattgcctgttctgcttcgaagtattcaataccgctcagtattttaaatgaagtgattctaagatttggtttgggatcaataggaaagcatatgcagccaaccaagatgcaaatgttttgaaatgatatgaccaaaattttaagtagg

SEQ ID NO: 4577 - DNA, 2428 bp, Homo sapiens; identical to SEQ ID NO: 567

SEQ ID NO: 4578 - DNA, 2759 bp, Homo sapiens; identical to SEQ ID NO: 539

SEQ ID NO: 4579 - DNA, 8516 bp, Homo sapiens; identical to SEQ ID NO: 621

SEQ ID NO: 4580 - DNA, 8573 bp, Homo sapiens
gagtagctccagcggccacgctgaggcgagggtgacacaccatgctcacggcccctggagaccgtcgtgctggcgagccgtgctccgtagctccccggtccgcctcggcagcggtcagagtcgcctacaggagttgagccgcccgcgccagaaggttttggcgaagctcttggagaggcgtcgagcacagtagggcggcgggggtgcgttgagcgctcgggggtcaggcagtcggccgggatcgccgctggggagcgtttccgaggcgaggaggaggaggaggagatgctgctcctcttctccccctccccaggctccttctacagctccttcagcccacgcccgcagccgcttgtgggagaagtggtggtggctctcggcgcccgcggcggctgccggcggcccgccccgacgccgcgtccctgcagccctcgcccggcgctccagtagcaggacccggtctcgggaccagccggtaatatgcacgtgtcactagctgaggccctggaggttcggggtggaccacttcaggaggaagaaatatgggctgtattaaatcaaagtgctgaaagtctccaagaattattcagaaaagtaagcctagctgatcctgctgcccttggcttcatcatttctccatggtctctgctgttgctgccatctggtagtgtgtcatttacagatgaaaatatttccaatcaggatcttcgagcattcactgcaccagaggttcttcaaaatcagtcactaacttctctctcagatgttgaaaagatccacatttattctcttggaatgacactgtattggggggctgattatgaagtgcctcagagccaacctattaagcttggagatcatctcaacagcatactgcttggaatgtgtgaggatgttatttacgctcgagtttctgttcggactgtgctggatgcttgcagtgcccacattaggaatagcaattgtgcaccctcattttcctacgtgaaacacttggtaaaactggttctgggaaatctttctgggacagatcagctttcctgtaacagtgaacaaaagcctgatcgaagccaggctattcgagatcgattgcgaggaaaaggattaccaacaggaagaagctctacttctgatgtactagacatacaaaagcctccactctctcatcagacctttcttaacaaagggcttagtaaatctatgggatttctgtccatcaaagatacacaagatgagaattatttcaaggacattttatcagataattctggacgtgaagattctgaaaatacattctccccttaccagttcaaaactagtggcccagaaaaaaaacccatccctggcattgatgtgctttctaagaagaagatctgggcttcatccatggacttgctttgtacagctgacagagacttctcttcaggagagactgccacatatcgtcgttgtcaccctgaggcagtaacagtgcggacttcaactactcctagaaaaaaggaggcaagatactcagatggaagtatagccttggatatctttggccctcagaaaatggatccaatatatcacactcgagaattgcccacctcctcagcaatatcaagtgctttggaccgaatccgagagagacaaaagaaacttcaggttctgagggaagccatgaatgtagaagaaccagttcgaagatacaaaacttatcatggtgatgtctttagtacctccagtgaaagtccatctattatttcctctgaatcagatttcagacaagtgagaagaagtgaagcctcaaagaggtttgaatccagcagtggtctcccaggggtagatgaaaccttaagtcaaggccagtcacagagaccgagcagacaatatgaaacaccctttgaaggcaacttaattaatcaagagatcatgctaaaacggcaagaggaagaactgatgcagctacaagccaaaatggcccttagacagtctcggttgagcctatatccaggagacacaatcaaagcgtccatgcttgacatcaccagggatccgttaagagaaattgccctagaaacagccatgactcaaagaaaactgaggaatttctttggccctgagtttgtgaaaatgacaattgaaccatttatatctttggatttgccacggtctattcttactaagaaagggaagaatgaggataaccgaaggaaagtaaacataatgcttctgaacgggcaaagactggaactgacctgtgataccaaaactatatgtaaagatgtgtttgatatggttgtggcacatattggcttagtagagcatcatttgtttgctttagctaccctcaaagataatgaatatttctttgttgatcctgacttaaaattaaccaaagtggccccagagggatggaaagaagaaccaaagaaaaagaccaaagccactgttaattttactttgtttttcagaattaaattttttatggatgatgttagtctaatacaacatactctgacgtgtcatcagtattaccttcagcttcgaaaagatattttggaggaaaggatgcactgtgatgatgagacttccttattgctggcatccttggctctccaggctgagtatggagattatcaaccagaggttcatggtgtgtcttactttagaatggagcactatttgcccgccagagtgatggagaaacttgatttatcctatatcaaagaagagttacccaaattgcataatacctatgtgggagcttctgaaaaagagacagagttagaatttttaaaggtctgccaaagactgacagaatatggagttcattttcaccgagtgcaccctgagaagaagtcacaaacaggaatattgcttggagtctgttctaaaggtgtccttgtgtttgaagttcacaatggagtgcgcacattggtccttcgctttccatggagggaaaccaagaaaatatctttttctaaaaagaaaatcacattgcaaaatacatcagatggaataaaacatggcttccagacagacaacagtaagatatgccagtacctgctgcacctctgctcttaccagcataagttccagctacagatgagagcaagacagagcaaccaagatgcccaagatattgagagagcttcgtttaggagcctgaatctccaagcagagtctgttagaggatttaatatgggacgagcaatcagcactggcagtctggccagcagcaccctcaacaaacttgctgttcgacctttatcagttcaagctgagattctgaagaggctatcctgctcagagctgtcgctttaccagccattgcaaaacagttcaaaagagaagaatgacaaagcttcatgggaggaaaagcctagagagatgagtaaatcataccatgatctcagtcaggcctctctctatccacatcggaaaaatgtcattgttaacatggaacccccaccacaaaccgttgcagagttggtgggaaaaccttctcaccagatgtcaagatctgatgcagaatctttggcaggagtgacaaaacttaataattcaaagtctgttgcgagtttaaatagaagtcctgaaaggaggaaacatgaatcagactcctcatccattgaagaccctgggcaagcatatgttctaggaatgactatgcatagttctggaaactcttcatcccaagtacccttaaaagaaaatgatgtgctacacaaaagatggagcatagtatcttcaccagaaagggagatcaccttagtgaacctgaaaaaagatgcaaagtatggcttgggatttcaaattattggtggggagaagatgggaagactggacctaggcatatttatcagttcagttgcccctggaggaccagctgacttggatggatgcttgaagccaggagaccgtttgatatctgtgaatagtgtgagtctggagggagtcagccaccatgctgcaattgaaattttgcaaaatgcacctgaagatgtgacacttgttatctctcagccaaaagaaaagatatccaaagtgccttctactcctgtgcatctcaccaatgagatgaaaaactacatgaagaaatcttcctacatgcaagacagtgctatagattcttcttccaaggatcaccactggtcacgtggtaccctgaggcacatctcggagaactcctttgggccatctgggggcctgcgggaaggaagcctgagttctcaagattccaggactgagagtgccagcttgtctcaaagccaggtcaatggtttctttgccagccatttaggtgaccaaacctggcaggaatcacagcatggcagcccttccccatctgtaatatccaaagccaccgagaaagagactttcactgatagtaaccaaagcaaaactaaaaagccaggcatttctgatgtaactgattactcagaccgtggagattcagacatggatgaagccacttactccagcagtcaggatcatcaaacaccaaaacaggaatcttcctcttcagtgaatacatccaacaagatgaattttaaaactttttcttcatcacctcctaagcctggagatatctttgaggttgaactggctaaaaatgataacagcttggggataagtgtcacgggaggtgtgaatacgagtgtcagacatggtggcatttatgtgaaagctgttattccccagggagcagcagagtctgatggtagaattcacaaaggtgatcgcgtcctagctgtcaatggagttagtctagaaggagccacccataagcaagctgtggaaacactgagaaatacaggacaggtggttcatctgttattagaaaagggacaatctccaacatctaaagaacatgtcccggtaaccccacagtgtaccctttcagatcagaatgcccaaggtcaaggcccagaaaaagtgaagaaaacaactcaggtcaaagactacagctttgtcactgaagaaaatacatttgaggtaaaattatttaaaaatagctcaggtctaggattcagtttttctcgagaagataatcttataccggagcaaattaatgccagcatagtaagggttaaaaagctctttcctggacagccagcagcagaaagtggaaaaattgatgtaggagatgttatcttgaaagtgaatggagcctctttgaaaggactatctcagcaggaagtcatatctgctctcaggggaactgctccagaagtattcttgcttctctgcagacctccacctggtgtgctaccggaaattgatactgcgcttttgaccccacttcagtctccagcacaagtacttccaaacagcagtaaagactcttctcagccatcatgtgtggagcaaagcaccagctcagatgaaaatgaaatgtcagacaaaagcaaaaaacagtgcaagtccccatccagaagagacagttacagtgacagcagtgggagtggagaagatgacttagtgacagctccagcaaacatatcaaattcgacctggagttcagctttgcatcagactctaagcaacatggtatcacaggcacagagtcatcatgaagcacccaagagtcaagaagataccatttgtaccatgttttactatcctcagaaaattcccaataaaccagagtttgaggacagtaatccttcccctctaccaccggatatggctcctgggcagagttatcaaccccaatcagaatctgcttcctctagttcgatggataagtatcatatacatcacatttctgaaccaactagacaagaaaactggacacctttgaaaaatgacttggaaaatcaccttgaagactttgaactggaagtagaactcctcattaccctaattaaatcagaaaaaggaagcctgggttttacagtaaccaaaggcaatcagagaattggttgttatgttcatgatgtcatacaggatccagccaaaagtgatggaaggctaaaacctggggaccggctcataaaggttaatgatacagatgttactaatatgactcatacagatgcagttaatctgctccgggctgcatccaaaacagtcagattagttattggacgagttctagaattacccagaataccaatgttgcctcatttgctaccggacataacactaacgtgcaacaaagaggagttgggtttttccttatgtggaggtcatgacagcctttatcaagtggtatatattagtgatattaatccaaggtccgtcgcagccattgagggtaatctccagctattagatgtcatccattatgtgaacggagtcagcacacaaggaatgaccttggaggaagttaacagagcattagacatgtcacttccttcattggtattgaaagcaacaagaaatgatcttccagtggtccccagctcaaagaggtctgctgtttcagctccaaagtcaaccaaaggcaatggttcctacagtgtggggtcttgcagccagcctgccctcactcctaatgattcattctccacggttgctggggaagaaataaatgaaatatcgtaccccaaaggaaaatgttctacttatcagataaagggatcaccaaacttgactctgcccaaagaatcttatatacaagaagatgacatttatgatgattcccaagaagctgaagttatccagtctctgctggatgttgtggatgaggaagcccagaatcttttaaacgaaaataatgcagcaggatactcctgtggtccaggtacattaaagatgaatgggaagttatcagaagagagaacagaagatacagactgcgatggttcacctttacctgagtattttactgaggccaccaaaatgaatggctgtgaagaatattgtgaagaaaaagtaaaaagtgaaagcttaattcagaagccacaagaaaagaagactgatgatgatgaaataacatggggaaatgatgagttgccaatagagagaacaaaccatgaagattctgataaagatcattcctttctgacaaacgatgagctcgctgtactccctgtcgtcaaagtgcttccctctggtaaatacacgggtgccaacttaaaatcagtcattcgagtcctgcggggtttgctagatcaaggaattccttctaaggagctggagaatcttcaagaattaaaacctttggatcagtgtctaattgggcaaactaaggaaaacagaaggaagaacagatataaaaatatacttccctatgatgctacaagagtgcctcttggagatgaaggtggctatatcaatgccagcttcattaagataccagttgggaaagaagagttcgtttacattgcctgccaaggaccactgcctacaactgttggagacttctggcagatgatttgggagcaaaaatccacagtgatagccatgatgactcaagaagtagaaggagaaaaaatcaaatgccagcgctattggcccaacatcctaggcaaaacaacaatggtcagcaacagacttcgactggctcttgtgagaatgcagcagctgaagggctttgtggtgagggcaatgacccttgaagatattcagaccagagaggtgcgccatatttctcatctgaatttcactgcctggccagaccatgatacaccttctcaaccagatgatctgcttacttttatctcctacatgagacacatccacagatcaggcccaatcattacgcactgcagtgctggcattggacgttcagggaccctgatttgcatagatgtggttctgggattaatcagtcaggatcttgattttgacatctctgatttggtgcgctgcatgagactacaaagacacggaatggttcagacagaggatcaatatattttctgctatcaagtcatcctttatgtcctgacacgtcttcaagcagaagaagagcaaaaacagcagcctcagcttctgaagtgacatgaaaagagcctctggatgcatttccatttctctccttaacctccagcagactcctgctctctatccaaaataaagatcacagagcagcaagttcatacaacatgcatgttctcctctatcttagaggggtattcttcttgaaaataaaaaatattgaaatgctgtatttttacagctactttaacctatgataattatttacaaaattttaacactaaccaaacaatgcagatcttagggatgattaaaggcagcatttgatgatagcagacattgttacaaggacatggtgagtctatttttaatgcaccaatcttgtttatagcaaaaatgttttccaatattttaataaagtagttattttataggggatacttgaaaccagtatttaagctttaaatgacagtaatattggcatagaaaaaagtagcaaatgtttactgtatcaatttctaatgtttactatatagaatttcctgtaatatatttatatactttttcatgaaaatggagttatcagttatctgtttgttactgcatcatctgtttgtaatcattatctcactttgtaaataaaaacacaccttaaaacatgaacaagccaaaactgtgtgcagacaaaaaaaaaaaaa

SEQ ID NO: 4581 - DNA, 8000 bp, Homo sapiens
gagtagctccagcggccacgctgaggcgagggtgacacaccatgctcacggcccctggagaccgtcgtgctggcgagccgtgctccgtagctccccggtccgcctcggcagcggtcagagtcgcctacaggagttgagccgcccgcgccagaaggttttggcgaagctcttggagaggcgtcgagcacagtagggcggcgggggtgcgttgagcgctcgggggtcaggcagtcggccgggatcgccgctggggagcgtttccgaggcgaggaggaggaggaggagatgctgctcctcttctccccctccccaggctccttctacagctccttcagcccacgcccgcagccgcttgtgggagaagtggtggtggctctcggcgcccgcggcggctgccggcggcccgccccgacgccgcgtccctgcagccctcgcccggcgctccagtagcaggacccggtctcgggaccagccggtaatatgcacgtgtcactagctgaggccctggaggttcggggtggaccacttcaggaggaagaaatatgggctgtattaaatcaaagtgctgaaagtctccaagaattattcagaaaagtaagcctagctgatcctgctgcccttggcttcatcatttctccatggtctctgctgttgctgccatctggtagtgtgtcatttacagatgaaaatatttccaatcaggatcttcgagcattcactgcaccagaggttcttcaaaatcagtcactaacttctctctcagatgttgaaaagatccacatttattctcttggaatgacactgtattggggggctgattatgaagtgcctcagagccaacctattaagcttggagatcatctcaacagcatactgcttggaatgtgtgaggatgttatttacgctcgagtttctgttcggactgtgctggatgcttgcagtgcccacattaggaatagcaattgtgcaccctcattttcctacgtgaaacacttggtaaaactggttctgggaaatctttctgggacagatcagctttcctgtaacagtgaacaaaagcctgatcgaagccaggctattcgagatcgattgcgaggaaaaggattaccaacaggaagaagctctacttctgatgtactagacatacaaaagcctccactctctcatcagacctttcttaacaaagggcttagtaaatctatgggatttctgtccatcaaagatacacaagatgagaattatttcaaggacattttatcagataattctggacgtgaagattctgaaaatacattctccccttaccagttcaaaactagtggcccagaaaaaaaacccatccctggcattgatgtgctttctaagaagaagatctgggcttcatccatggacttgctttgtacagctgacagagacttctcttcaggagagactgccacatatcgtcgttgtcaccctgaggcagtaacagtgcggacttcaactactcctagaaaaaaggaggcaagatactcagatggaagtatagccttggatatctttggccctcagaaaatggatccaatatatcacactcgagaattgcccacctcctcagcaatatcaagtgctttggaccgaatccgagagagacaaaagaaacttcaggttctgagggaagccatgaatgtagaagaaccagttcgaagatacaaaacttatcatggtgatgtctttagtacctccagtgaaagtccatctattatttcctctgaatcagatttcagacaagtgagaagaagtgaagcctcaaagaggtttgaatccagcagtggtctcccaggggtagatgaaaccttaagtcaaggccagtcacagagaccgagcagacaatatgaaacaccctttgaaggcaacttaattaatcaagagatcatgctaaaacggcaagaggaagaactgatgcagctacaagccaaaatggcccttagacagtctcggttgagcctatatccaggagacacaatcaaagcgtccatgcttgacatcaccagggatccgttaagagaaattgccctagaaacagccatgactcaaagaaaactgaggaatttctttggccctgagtttgtgaaaatgacaattgaaccatttatatctttggatttgccacggtctattcttactaagaaagggaagaatgaggataaccgaaggaaagtaaacataatgcttctgaacgggcaaagactggaactgacctgtgataccaaaactatatgtaaagatgtgtttgatatggttgtggcacatattggcttagtagagcatcatttgtttgctttagctaccctcaaagataatgaatatttctttgttgatcctgacttaaaattaaccaaagtggccccagagggatggaaagaagaaccaaagaaaaagaccaaagccactgttaattttactttgtttttcagaattaaattttttatggatgatgttagtctaatacaacatactctgacgtgtcatcagtattaccttcagcttcgaaaagatattttggaggaaaggatgcactgtgatgatgagacttccttattgctggcatccttggctctccaggctgagtatggagattatcaaccagaggttcatggtgtgtcttactttagaatggagcactatttgcccgccagagtgatggagaaacttgatttatcctatatcaaagaagagttacccaaattgcataatacctatgtgggagcttctgaaaaagagacagagttagaatttttaaaggtctgccaaagactgacagaatatggagttcattttcaccgagtgcaccctgagaagaagtcacaaacaggaatattgcttggagtctgttctaaaggtgtccttgtgtttgaagttcacaatggagtgcgcacattggtccttcgctttccatggagggaaaccaagaaaatatctttttctaaaaagaaaatcacattgcaaaatacatcagatggaataaaacatggcttccagacagacaacagtaagatatgccagtacctgctgcacctctgctcttaccagcataagttccagctacagatgagagcaagacagagcaaccaagatgcccaagatattgatgtgctacacaaaagatggagcatagtatcttcaccagaaagggagatcaccttagtgaacctgaaaaaagatgcaaagtatggcttgggatttcaaattattggtggggagaagatgggaagactggacctaggcatatttatcagttcagttgcccctggaggaccagctgacttggatggatgcttgaagccaggagaccgtttgatatctgtgaatagtgtgagtctggagggagtcagccaccatgctgcaattgaaattttgcaaaatgcacctgaagatgtgacacttgttatctctcagccaaaagaaaagatatccaaagtgccttctactcctgtgcatctcaccaatgagatgaaaaactacatgaagaaatcttcctacatgcaagacagtgctatagattcttcttccaaggatcaccactggtcacgtggtaccctgaggcacatctcggagaactcctttgggccatctgggggcctgcgggaaggaagcctgagttctcaagattccaggactgagagtgccagcttgtctcaaagccaggtcaatggtttctttgccagccatttaggtgaccaaacctggcaggaatcacagcatggcagcccttccccatctgtaatatccaaagccaccgagaaagagactttcactgatagtaaccaaagcaaaactaaaaagccaggcatttctgatgtaactgattactcagaccgtggagattcagacatggatgaagccacttactccagcagtcaggatcatcaaacaccaaaacaggaatcttcctcttcagtgaatacatccaacaagatgaattttaaaactttttcttcatcacctcctaagcctggagatatctttgaggttgaactggctaaaaatgataacagcttggggataagtgtcacgggaggtgtgaatacgagtgtcagacatggtggcatttatgtgaaagctgttattccccagggagcagcagagtctgatggtagaattcacaaaggtgatcgcgtcctagctgtcaatggagttagtctagaaggagccacccataagcaagctgtggaaacactgagaaatacaggacaggtggttcatctgttattagaaaagggacaatctccaacatctaaagaacatgtcccggtaaccccacagtgtaccctttcagatcagaatgcccaaggtcaaggcccagaaaaagtgaagaaaacaactcaggtcaaagactacagctttgtcactgaagaaaatacatttgaggtaaaattatttaaaaatagctcaggtctaggattcagtttttctcgagaagataatcttataccggagcaaattaatgccagcatagtaagggttaaaaagctctttcctggacagccagcagcagaaagtggaaaaattgatgtaggagatgttatcttgaaagtgaatggagcctctttgaaaggactatctcagcaggaagtcatatctgctctcaggggaactgctccagaagtattcttgcttctctgcagacctccacctggtgtgctaccggaaattgatactgcgcttttgaccccacttcagtctccagcacaagtacttccaaacagcagtaaagactcttctcagccatcatgtgtggagcaaagcaccagctcagatgaaaatgaaatgtcagacaaaagcaaaaaacagtgcaagtccccatccagaagagacagttacagtgacagcagtgggagtggagaagatgacttagtgacagctccagcaaacatatcaaattcgacctggagttcagctttgcatcagactctaagcaacatggtatcacaggcacagagtcatcatgaagcacccaagagtcaagaagataccatttgtaccatgttttactatcctcagaaaattcccaataaaccagagtttgaggacagtaatccttcccctctaccaccggatatggctcctgggcagagttatcaaccccaatcagaatctgcttcctctagttcgatggataagtatcatatacatcacatttctgaaccaactagacaagaaaactggacacctttgaaaaatgacttggaaaatcaccttgaagactttgaactggaagtagaactcctcattaccctaattaaatcagaaaaaggaagcctgggttttacagtaaccaaaggcaatcagagaattggttgttatgttcatgatgtcatacaggatccagccaaaagtgatggaaggctaaaacctggggaccggctcataaaggttaatgatacagatgttactaatatgactcatacagatgcagttaatctgctccgggctgcatccaaaacagtcagattagttattggacgagttctagaattacccagaataccaatgttgcctcatttgctaccggacataacactaacgtgcaacaaagaggagttgggtttttccttatgtggaggtcatgacagcctttatcaagtggtatatattagtgatattaatccaaggtccgtcgcagccattgagggtaatctccagctattagatgtcatccattatgtgaacggagtcagcacacaaggaatgaccttggaggaagttaacagagcattagacatgtcacttccttcattggtattgaaagcaacaagaaatgatcttccagtggtccccagctcaaagaggtctgctgtttcagctccaaagtcaaccaaaggcaatggttcctacagtgtggggtcttgcagccagcctgccctcactcctaatgattcattctccacggttgctggggaagaaataaatgaaatatcgtaccccaaaggaaaatgttctacttatcagataaagggatcaccaaacttgactctgcccaaagaatcttatatacaagaagatgacatttatgatgattcccaagaagctgaagttatccagtctctgctggatgttgtggatgaggaagcccagaatcttttaaacgaaaataatgcagcaggatactcctgtggtccaggtacattaaagatgaatgggaagttatcagaagagagaacagaagatacagactgcgatggttcacctttacctgagtattttactgaggccaccaaaatgaatggctgtgaagaatattgtgaagaaaaagtaaaaagtgaaagcttaattcagaagccacaagaaaagaagactgatgatgatgaaataacatggggaaatgatgagttgccaatagagagaacaaaccatgaagattctgataaagatcattcctttctgacaaacgatgagctcgctgtactccctgtcgtcaaagtgcttccctctggtaaatacacgggtgccaacttaaaatcagtcattcgagtcctgcggggtttgctagatcaaggaattccttctaaggagctggagaatcttcaagaattaaaacctttggatcagtgtctaattgggcaaactaaggaaaacagaaggaagaacagatataaaaatatacttccctatgatgctacaagagtgcctcttggagatgaaggtggctatatcaatgccagcttcattaagataccagttgggaaagaagagttcgtttacattgcctgccaaggaccactgcctacaactgttggagacttctggcagatgatttgggagcaaaaatccacagtgatagccatgatgactcaagaagtagaaggagaaaaaatcaaatgccagcgctattggcccaacatcctaggcaaaacaacaatggtcagcaacagacttcgactggctcttgtgagaatgcagcagctgaagggctttgtggtgagggcaatgacccttgaagatattcagaccagagaggtgcgccatatttctcatctgaatttcactgcctggccagaccatgatacaccttctcaaccagatgatctgcttacttttatctcctacatgagacacatccacagatcaggcccaatcattacgcactgcagtgctggcattggacgttcagggaccctgatttgcatagatgtggttctgggattaatcagtcaggatcttgattttgacatctctgatttggtgcgctgcatgagactacaaagacacggaatggttcagacagaggatcaatatattttctgctatcaagtcatcctttatgtcctgacacgtcttcaagcagaagaagagcaaaaacagcagcctcagcttctgaagtgacatgaaaagagcctctggatgcatttccatttctctccttaacctccagcagactcctgctctctatccaaaataaagatcacagagcagcaagttcatacaacatgcatgttctcctctatcttagaggggtattcttcttgaaaataaaaaatattgaaatgctgtatttttacagctactttaacctatgataattatttacaaaattttaacactaaccaaacaatgcagatcttagggatgattaaaggcagcatttgatgatagcagacattgttacaaggacatggtgagtctatttttaatgcaccaatcttgtttatagcaaaaatgttttccaatattttaataaagtagttattttataggggatacttgaaaccagtatttaagctttaaatgacagtaatattggcatagaaaaaagtagcaaatgtttactgtatcaatttctaatgtttactatatagaatttcctgtaatatatttatatactttttcatgaaaatggagttatcagttatctgtttgttactgcatcatctgtttgtaatcattatctcactttgtaaataaaaacacaccttaaaacatgaacaagccaaaactgtgtgcagacaaaaaaaaaaaaa

SEQ ID NO: 4582 - DNA, 8588 bp, Homo sapiens
gagtagctccagcggccacgctgaggcgagggtgacacaccatgctcacggcccctggagaccgtcgtgctggcgagccgtgctccgtagctccccggtccgcctcggcagcggtcagagtcgcctacaggagttgagccgcccgcgccagaaggttttggcgaagctcttggagaggcgtcgagcacagtagggcggcgggggtgcgttgagcgctcgggggtcaggcagtcggccgggatcgccgctggggagcgtttccgaggcgaggaggaggaggaggagatgctgctcctcttctccccctccccaggctccttctacagctccttcagcccacgcccgcagccgcttgtgggagaagtggtggtggctctcggcgcccgcggcggctgccggcggcccgccccgacgccgcgtccctgcagccctcgcccggcgctccagtagcaggacccggtctcgggaccagccggtaatatgcacgtgtcactagctgaggccctggaggttcggggtggaccacttcaggaggaagaaatatgggctgtattaaatcaaagtgctgaaagtctccaagaattattcagaaaagtaagcctagctgatcctgctgcccttggcttcatcatttctccatggtctctgctgttgctgccatctggtagtgtgtcatttacagatgaaaatatttccaatcaggatcttcgagcattcactgcaccagaggttcttcaaaatcagtcactaacttctctctcagatgttgaaaagatccacatttattctcttggaatgacactgtattggggggctgattatgaagtgcctcagagccaacctattaagcttggagatcatctcaacagcatactgcttggaatgtgtgaggatgttatttacgctcgagtttctgttcggactgtgctggatgcttgcagtgcccacattaggaatagcaattgtgcaccctcattttcctacgtgaaacacttggtaaaactggttctgggaaatctttctgggacagatcagctttcctgtaacagtgaacaaaagcctgatcgaagccaggctattcgagatcgattgcgaggaaaaggattaccaacaggaagaagctctacttctgatgtactagacatacaaaagcctccactctctcatcagacctttcttaacaaagggcttagtaaatctatgggatttctgtccatcaaagatacacaagatgagaattatttcaaggacattttatcagataattctggacgtgaagattctgaaaatacattctccccttaccagttcaaaactagtggcccagaaaaaaaacccatccctggcattgatgtgctttctaagaagaagatctgggcttcatccatggacttgctttgtacagctgacagagacttctcttcaggagagactgccacatatcgtcgttgtcaccctgaggcagtaacagtgcggacttcaactactcctagaaaaaaggaggcaagatactcagatggaagtatagccttggatatctttggccctcagaaaatggatccaatatatcacactcgagaattgcccacctcctcagcaatatcaagtgctttggaccgaatccgagagagacaaaagaaacttcaggttctgagggaagccatgaatgtagaagaaccagttcgaagatacaaaacttatcatggtgatgtctttagtacctccagtgaaagtccatctattatttcctctgaatcagatttcagacaagtgagaagaagtgaagcctcaaagaggtttgaatccagcagtggtctcccaggggtagatgaaaccttaagtcaaggccagtcacagagaccgagcagacaatatgaaacaccctttgaaggcaacttaattaatcaagagatcatgctaaaacggcaagaggaagaactgatgcagctacaagccaaaatggcccttagacagtctcggttgagcctatatccaggagacacaatcaaagcgtccatgcttgacatcaccagggatccgttaagagaaattgccctagaaacagccatgactcaaagaaaactgaggaatttctttggccctgagtttgtgaaaatgacaattgaaccatttatatctttggatttgccacggtctattcttactaagaaagggaagaatgaggataaccgaaggaaagtaaacataatgcttctgaacgggcaaagactggaactgacctgtgataccaaaactatatgtaaagatgtgtttgatatggttgtggcacatattggcttagtagagcatcatttgtttgctttagctaccctcaaagataatgaatatttctttgttgatcctgacttaaaattaaccaaagtggccccagagggatggaaagaagaaccaaagaaaaagaccaaagccactgttaattttactttgtttttcagaattaaattttttatggatgatgttagtctaatacaacatactctgacgtgtcatcagtattaccttcagcttcgaaaagatattttggaggaaaggatgcactgtgatgatgagacttccttattgctggcatccttggctctccaggctgagtatggagattatcaaccagaggttcatggtgtgtcttactttagaatggagcactatttgcccgccagagtgatggagaaacttgatttatcctatatcaaagaagagttacccaaattgcataatacctatgtgggagcttctgaaaaagagacagagttagaatttttaaaggtctgccaaagactgacagaatatggagttcattttcaccgagtgcaccctgagaagaagtcacaaacaggaatattgcttggagtctgttctaaaggtgtccttgtgtttgaagttcacaatggagtgcgcacattggtccttcgctttccatggagggaaaccaagaaaatatctttttctaaaaagaaaatcacattgcaaaatacatcagatggaataaaacatggcttccagacagacaacagtaagatatgccagtacctgctgcacctctgctcttaccagcataagttccagctacagatgagagcaagacagagcaaccaagatgcccaagatattgagagagcttcgtttaggagcctgaatctccaagcagagtctgttagaggatttaatatgggacgagcaatcagcactggcagtctggccagcagcaccctcaacaaacttgctgttcgacctttatcagttcaagctgagattctgaagaggctatcctgctcagagctgtcgctttaccagccattgcaaaacagttcaaaagagaagaatgacaaagcttcatgggaggaaaagcctagagagatgagtaaatcataccatgatctcagtcaggcctctctctatccacatcggaaaaatgtcattgttaacatggaacccccaccacaaaccgttgcagagttggtgggaaaaccttctcaccagatgtcaagatctgatgcagaatctttggcaggagtgacaaaacttaataattcaaagtctgttgcgagtttaaatagaagtcctgaaaggaggaaacatgaatcagactcctcatccattgaagaccctgggcaagcatatgttctaggaatgactatgcatagttctggaaactcttcatcccaagtacccttaaaagaaaatgatgtgctacacaaaagatggagcatagtatcttcaccagaaagggagatcaccttagtgaacctgaaaaaagatgcaaagtatggcttgggatttcaaattattggtggggagaagatgggaagactggacctaggcatatttatcagttcagttgcccctggaggaccagctgacttggatggatgcttgaagccaggagaccgtttgatatctgtgaatagtgtgagtctggagggagtcagccaccatgctgcaattgaaattttgcaaaatgcacctgaagatgtgacacttgttatctctcagccaaaagaaaagatatccaaagtgccttctactcctgtgcatctcaccaatgagatgaaaaactacatgaagaaatcttcctacatgcaagacagtgctatagattcttcttccaaggatcaccactggtcacgtggtaccctgaggcacatctcggagaactcctttgggccatctgggggcctgcgggaaggaagcctgagttctcaagattccaggactgagagtgccagcttgtctcaaagccaggtcaatggtttctttgccagccatttaggtgaccaaacctggcaggaatcacagcatggcagcccttccccatctgtaatatccaaagccaccgagaaagagactttcactgatagtaaccaaagcaaaactaaaaagccaggcatttctgatgtaactgattactcagaccgtggagattcagacatggatgaagccacttactccagcagtcaggatcatcaaacaccaaaacaggaatcttcctcttcagtgaatacatccaacaagatgaattttaaaactttttcttcatcacctcctaagcctggagatatctttgaggttgaactggctaaaaatgataacagcttggggataagtgtcacggtactgtttgacaagggaggtgtgaatacgagtgtcagacatggtggcatttatgtgaaagctgttattccccagggagcagcagagtctgatggtagaattcacaaaggtgatcgcgtcctagctgtcaatggagttagtctagaaggagccacccataagcaagctgtggaaacactgagaaatacaggacaggtggttcatctgttattagaaaagggacaatctccaacatctaaagaacatgtcccggtaaccccacagtgtaccctttcagatcagaatgcccaaggtcaaggcccagaaaaagtgaagaaaacaactcaggtcaaagactacagctttgtcactgaagaaaatacatttgaggtaaaattatttaaaaatagctcaggtctaggattcagtttttctcgagaagataatcttataccggagcaaattaatgccagcatagtaagggttaaaaagctctttcctggacagccagcagcagaaagtggaaaaattgatgtaggagatgttatcttgaaagtgaatggagcctctttgaaaggactatctcagcaggaagtcatatctgctctcaggggaactgctccagaagtattcttgcttctctgcagacctccacctggtgtgctaccggaaattgatactgcgcttttgaccccacttcagtctccagcacaagtacttccaaacagcagtaaagactcttctcagccatcatgtgtggagcaaagcaccagctcagatgaaaatgaaatgtcagacaaaagcaaaaaacagtgcaagtccccatccagaagagacagttacagtgacagcagtgggagtggagaagatgacttagtgacagctccagcaaacatatcaaattcgacctggagttcagctttgcatcagactctaagcaacatggtatcacaggcacagagtcatcatgaagcacccaagagtcaagaagataccatttgtaccatgttttactatcctcagaaaattcccaataaaccagagtttgaggacagtaatccttcccctctaccaccggatatggctcctgggcagagttatcaaccccaatcagaatctgcttcctctagttcgatggataagtatcatatacatcacatttctgaaccaactagacaagaaaactggacacctttgaaaaatgacttggaaaatcaccttgaagactttgaactggaagtagaactcctcattaccctaattaaatcagaaaaaggaagcctgggttttacagtaaccaaaggcaatcagagaattggttgttatgttcatgatgtcatacaggatccagccaaaagtgatggaaggctaaaacctggggaccggctcataaaggttaatgatacagatgttactaatatgactcatacagatgcagttaatctgctccgggctgcatccaaaacagtcagattagttattggacgagttctagaattacccagaataccaatgttgcctcatttgctaccggacataacactaacgtgcaacaaagaggagttgggtttttccttatgtggaggtcatgacagcctttatcaagtggtatatattagtgatattaatccaaggtccgtcgcagccattgagggtaatctccagctattagatgtcatccattatgtgaacggagtcagcacacaaggaatgaccttggaggaagttaacagagcattagacatgtcacttccttcattggtattgaaagcaacaagaaatgatcttccagtggtccccagctcaaagaggtctgctgtttcagctccaaagtcaaccaaaggcaatggttcctacagtgtggggtcttgcagccagcctgccctcactcctaatgattcattctccacggttgctggggaagaaataaatgaaatatcgtaccccaaaggaaaatgttctacttatcagataaagggatcaccaaacttgactctgcccaaagaatcttatatacaagaagatgacatttatgatgattcccaagaagctgaagttatccagtctctgctggatgttgtggatgaggaagcccagaatcttttaaacgaaaataatgcagcaggatactcctgtggtccaggtacattaaagatgaatgggaagttatcagaagagagaacagaagatacagactgcgatggttcacctttacctgagtattttactgaggccaccaaaatgaatggctgtgaagaatattgtgaagaaaaagtaaaaagtgaaagcttaattcagaagccacaagaaaagaagactgatgatgatgaaataacatggggaaatgatgagttgccaatagagagaacaaaccatgaagattctgataaagatcattcctttctgacaaacgatgagctcgctgtactccctgtcgtcaaagtgcttccctctggtaaatacacgggtgccaacttaaaatcagtcattcgagtcctgcggggtttgctagatcaaggaattccttctaaggagctggagaatcttcaagaattaaaacctttggatcagtgtctaattgggcaaactaaggaaaacagaaggaagaacagatataaaaatatacttccctatgatgctacaagagtgcctcttggagatgaaggtggctatatcaatgccagcttcattaagataccagttgggaaagaagagttcgtttacattgcctgccaaggaccactgcctacaactgttggagacttctggcagatgatttgggagcaaaaatccacagtgatagccatgatgactcaagaagtagaaggagaaaaaatcaaatgccagcgctattggcccaacatcctaggcaaaacaacaatggtcagcaacagacttcgactggctcttgtgagaatgcagcagctgaagggctttgtggtgagggcaatgacccttgaagatattcagaccagagaggtgcgccatatttctcatctgaatttcactgcctggccagaccatgatacaccttctcaaccagatgatctgcttacttttatctcctacatgagacacatccacagatcaggcccaatcattacgcactgcagtgctggcattggacgttcagggaccctgatttgcatagatgtggttctgggattaatcagtcaggatcttgattttgacatctctgatttggtgcgctgcatgagactacaaagacacggaatggttcagacagaggatcaatatattttctgctatcaagtcatcctttatgtcctgacacgtcttcaagcagaagaagagcaaaaacagcagcctcagcttctgaagtgacatgaaaagagcctctggatgcatttccatttctctccttaacctccagcagactcctgctctctatccaaaataaagatcacagagcagcaagttcatacaacatgcatgttctcctctatcttagaggggtattcttcttgaaaataaaaaatattgaaatgctgtatttttacagctactttaacctatgataattatttacaaaattttaacactaaccaaacaatgcagatcttagggatgattaaaggcagcatttgatgatagcagacattgttacaaggacatggtgagtctatttttaatgcaccaatcttgtttatagcaaaaatgttttccaatattttaataaagtagttattttataggggatacttgaaaccagtatttaagctttaaatgacagtaatattggcatagaaaaaagtagcaaatgtttactgtatcaatttctaatgtttactatatagaatttcctgtaatatatttatatactttttcatgaaaatggagttatcagttatctgtttgttactgcatcatctgtttgtaatcattatctcactttgtaaataaaaacacaccttaaaacatgaacaagccaaaactgtgtgcagacaaaaaaaaaaaaa

SEQ ID NO: 4583 - DNA, 3747 bp, Homo sapiens; identical to SEQ ID NO: 219

SEQ ID NO: 4584 - DNA, 3318 bp, Homo sapiens; identical to SEQ ID NO: 133

SEQ ID NO: 4585 - DNA, 9663 bp, Homo sapiens; identical to SEQ ID NO: 1522

SEQ ID NO: 4586 - DNA, 2521 bp, Homo sapiens; identical to SEQ ID NO: 1768

SEQ ID NO: 4587 - DNA, 381 bp, Homo sapiens
ctcctggagggccaggaatcgggccggggtttgggccaggctctgaggagtgggggattcccccatgtcccccgccgtatgagttctgcggggggatggcgtactgtgggcctcagactggagtggggctagtgccccaagacggcttggagacctctcagcctgagggcgaagcaggagtcggggtggagagcaactccgatggggcctccccggagccctgcaccgtcccctctggtgccgtgaagctggagaaggagaagctggagcaaaacccgaaggagtcccaggacatcagagctctgcagaaagaactcgagcaatttgccaagctcctgaagcagaagaggatcaccctgggatatacacaggccgatgtgg

SEQ ID NO: 4588 - DNA, 6055 bp, Homo sapiens; identical to SEQ ID NO: 204

SEQ ID NO: 4589 - DNA, 3808 bp, Homo sapiens; identical to SEQ ID NO: 1529

SEQ ID NO: 4590 - DNA, 2560 bp, Homo sapiens; identical to SEQ ID NO: 742

SEQ ID NO: 4591 - DNA, 2703 bp, Homo sapiens
cccttcttccctcccttcctccataccaacctccctccctctctggagctcctgctctctccctctccctcctctcccgtgctccctccctccctccctctttccctccctcctctcctctccctctcctctcctgctatagagggctccgacagcagttcccagccagcgtgttcagcctgcctgcctgcctgcctctgtgtgtgtgtgagcgtgtgtgcgtgcgtctactttgtactgggaagaacacagcccatgtgctctgcatggacgttactgatactctgtttagcttgattttcgaaaagcaggcaagatgtccagcacaccacatgaccccttctattcttctcctttcggcccattttataggaggcatacaccatacatggtacagccagagtaccgaatctatgagatgaacaagagactgcagtctcgcacagaggatagtgacaacctctggtgggacgcctttgccactgaattttttgaagatgacgccacattaaccctttcattttgtttggaagatggaccaaagcgatacactatcggcaggaccctcatcccccgttactttagcactgtgtttgaaggaggggtgaccgacctgtattacattctcaaacactcgaaagagtcataccacaactcatccatcacggtggactgcgaccagtgtaccatggtcacccagcacgggaagcccatgtttaccaaggtatgtacagaaggcagactgatcttggagttcacctttgatgatctcatgagaatcaaaacatggcactttaccattagacaataccgagagttagtcccgagaagcatcctagccatgcatgcacaagatcctcaggtcctggatcagctgtccaaaaacatcaccaggatggggctaacaaacttcaccctcaactacctcaggttgtgtgtaatattggagccaatgcaggaactgatgtcgagacataaaacttacaacctcagtccccgagactgcctgaagacctgcttgtttcagaagtggcagaggatggtggctccgccagcagaacccacaaggcaaccaacaaccaaacggagaaaaaggaaaaattccaccagcagcacttccaacagcagcgctgggaacaatgcaaacagcactggcagcaagaagaagaccacagctgcaaacctgagtctgtccagtcaggtacctgggctaggagcgatcccgaactgcagcctcaaccctgggagggatggagacctgtgtcattcaacagcagtgaccccttctggccaatttaaggagaagcattgaggggccctgaaaggagtcacttccagtcctcctcagaggatgtgatggtggtaggagagccaactctgatgggaggtgagtttggggacgaggacgaaaggctaatcactagattagaaaacacgcaatatgatgcggccaacggcatggacgacgaggaggacttcaacaattcacccgcgctggggaacaacagcccgtggaacagtaaacctcccgccactcaagagaccaaatcagaaaaccccccaccccaggcttcccaataagatgatcggcaccagaatccactgtcaataggcccgtgggtgatcattacaattgcaaatctttacttacaggagaggaaacagaagagataaaaacttttccatgcaaatatctatttctaaaccacaatgatctgattttctttcttctttctttttttctaattgagaggattattcccagtaagcttccatgaccctttcttggaggccttcacaggtaatacagatactggcactgattgtaattaaaatgagagaaaactctagcgcatcttctggcacggttttaacaacgtgtttgtgttgaatttcctttttatgcatcaaacgaaggccatattgtccataaatgctcagtgctcaggatctcattaatatgccgaacctaactacagatgactttttaatattgtaaaatattttctgctttttgacttgcatctgagagtttcttgtttcagtaaaaaaagaaaagacaaaaaaatcagctttggaaagtaatttaaatgtaccttattttttttttctttatgttttctttcattgggcaacagctaagagggcccagcaaggtaatttatggttgagctgatgtcaattggttcttgtcttgagtcgactcaatttagcccaagtgctgaaacaagaaatgtcatttttttcatcaaagacaccagggcagatttttaagtaaagaaagacaattggacccttaagaatttatgcatttgtaaagttgctgttgatccaaatattttcaagccatgtaatccattggttttgtgggcagtttaataaacctgaacctttgtgtgttttctaattgtacctgagttgaccatcctttctttttatagtatatttcttgtatgatattttgtaaagctctcacctggttcttttatggggacttttcgtttttgggcaactccagtgtatttatgtgaaactttataagagaattaatttttccatttgcatattaatatgttcctccacacatgtaaaggcacagtggctccgtgtgttaaaaaacagctgtattttatgtatgctttactgataagtgtgccaataataaactgtgttaatgaccaaaaaaaaaaaaaaaaaaaaaaa

SEQ ID NO: 4592 - DNA, 8228 bp, Homo sapiens; identical to SEQ ID NO: 768

SEQ ID NO: 4593 - DNA, 2761 bp, Homo sapiens
agcagcgctgctgtccccgccgtgcgcccttcgccgctgagctcgcagcctccggcgcccacctccacctccagtgtcccgcctcgggccgtcgccctccagcggctcgcgagcgtgggagacgtacctgggcaggcactgtccagcccaggcccaggcacagccgtgaggggcgaggcacggggacatcctggcggccaccatggtggccacgtgcctgcaggtggtgggcttcgtcacgagcttcgtgggctggatcggggtcatcgtgaccacctccaccaatgactgggtggtgacctgcggctacaccatccccacctgccgcaagctggatgagctgggctccaaggggctgtgggccgactgcgtcatggccacggggctgtaccactgcaagcccctggtggacatcctcatcctgccgggctacgtgcaggcctgccgcgccctgatgattgctgcctcggtcctgggtctgccggccattttactgctgctgactgttcttccctgcatccggatgggccaggagcccggtgtggctaagtacaggcgggcccagctggctggtgttttgctcattctgctggctctctgcgcccttgttgccaccatctggttccctgtgtgcgcccaccgtgagaccaccatcgtgagctttggctactccctgtatgcaggctggattggtgctgtgctgtgcctcgtgggtggctgtgtcatcctctgctgcgctggagatgcccaggcctttggtgaaaaccgtttctactacactgcgggctctagctccccgactcatgcgaagagtgcccacgtataagagggctgcccggctgcccacagaggtgctgtagatgctgggcccagggccctaggtttgctcgtcacagtgtggggaagcccattcctctgccaggctctaaagccaaaggtctagaaaagcatcctgtctggcattttgtagtcttaacttctccccatttcccccatcttttggttgccttaaaagaaatctctagctcagataatgcccagacatttttttcccttggtgttgcccctattagctcttttcttgggcattcttttgctgtttattaaaaatatattatatatattttgtttctttaaatttcaaatgttttgcaaacatcactgagttaggtgggggtggggaagagaaatacaagatacttttttttttttttttttttttttttttttaaatagggcctcactctgttgctcaggctggagtgcggtggtgtgatctcggctcatgtagcctcaacctccccggctcaagtgatcctcctgcctcagcctcccaagtagctgggactacaggcgttcactactacacccagctaatttttaagttttttatagagatgagggctccctatgttgcccaggttggtctcgaactcctggactcaaagtatcctcccgcctcggcctcccaaagtgttgggattataggagtgagccaccacaccggccaagatgcttttcaaactgatacagatgacaatgggagcctcataaagatggcttttgtttcttcccttcaaggtcatttacttgtacgagacagaaaaagatagcattggggacatgggatgggggagggagggcaatagtggaacgaactttccatgggaaactttcccttttgtaagttgagggccaggggtagggatattttttagtttgtgattttacatttatctgtacatactttttcaagattgatcatttttataaccatggttttcctgaaatcctcaattcatcaatatgaaggaaatgaaccacatagactttatgcaataaataacagtgcaagtgagtataactctaactgatgttccacaaaacatttttgatttcaggtttgtatgatgtagtttttaatcgtacattttcatatgcttcaaactaacacatttttaaagctttcccccacttttctctctatttgtattgttagccatcttgaagtgatgttgtttaacataaattgtactgttgaatttggctttacgggtgtaaacactgatggtatatcagtatctgagaccccaaactctccaaatactgatggtgcattttattcttgaagtgaaatctgtgcaataaaataacagactgtctgcaaaactggccttcaatcttctgttgtatccagaggtatcattattgatttaaaaaaatctcattaatctctactggtaatttatagggaatctgatcagtgattcaagaacaagtaattctgcattgccttgaataattaaaaagttatattttattcacggtattgcagtggtaatttgtggtcatgaaagcataacctcagtgctctctaggtttcttaagtggggtgactttatggcatctttaatcatcgatcaatgggcagcaatcagaaacaaagttctcagcattatgcagttaatgtccttcatctacttctaacacttagtaaaggaattgattggctaggtataaaaagagaattaacgaaacctattttattggatctttaagtaataatatctaaatacatttcgttcaaacatacatatgtagctgtttggacattttggacaaagacacattgagttgatttttatttgtttttctgttccagaaacttcatcaagttacgggcctggtctaagaaaacacattgcaatctattttggcagacttctttcaaataaaatactaatttcattagctgatagta

SEQ ID NO: 4594 - DNA, 3493 bp, Homo sapiens; identical to SEQ ID NO: 2292

SEQ ID NO: 4595 - DNA, 4345 bp, Homo sapiens; identical to SEQ ID NO: 2390

SEQ ID NO: 4596 - DNA, 2865 bp, Homo sapiens; identical to SEQ ID NO: 557

SEQ ID NO: 4597 - DNA, 3310 bp, Homo sapiens; identical to SEQ ID NO: 2420

SEQ ID NO: 4598 - DNA, 3142 bp, Homo sapiens
tgcgagctgtttgaggactgggatgccgagaacgcgagcgatccgagcagggtttgtctgggcaccgtcggggtaggatccggaacgcattcggaaggctttttgcaagcatttacttggaaggagaacttgggatctttctgggaaccccccgccccggctggattggccgagcaagcctggaaaatggtaaatgatcatttggatcaattacaggcttttagctggcttgtctgtcataattcatgattcggggctgggaaaaagaccaacagcctacgtgccaaaaaaggggcagagtttgatggagttgggtggacttttctatgccatttgcctccacacctagaggataagcacttttgcagacattcagtgcaagggagatcatgtttgactgtatggatgttctgtcagtgagtcctgggcaaatcctggatttctacactgcgagtccgtcttcctgcatgctccaggagaaagctctcaaagcatgcttcagtggattgacccaaaccgaatggcagcatcggcacactgctcaatcaattgaaacacagagcaccagctctgaggaactcgtcccaagccccccatctccacttcctccccctcgagtgtacaaaccctgcttcgtctgccaggacaaatcatcagggtaccactatggggtcagcgcctgtgagggatgtaagggctttttccgcagaagtattcagaagaatatgatttacacttgtcaccgagataagaactgtgttattaataaagtcaccaggaatcgatgccaatactgtcgactccagaagtgctttgaagtgggaatgtccaaagaatctgtcaggaatgacaggaacaagaaaaagaaggagacttcgaagcaagaatgcacagagagctatgaaatgacagctgagttggacgatctcacagagaagatccgaaaagctcaccaggaaactttcccttcactctgccagctgggtaaatacaccacgaattccagtgctgaccatcgagtccgactggacctgggcctctgggacaaattcagtgaactggccaccaagtgcattattaagatcgtggagtttgctaaacgtctgcctggtttcactggcttgaccatcgcagaccaaattaccctgctgaaggccgcctgcctggacatcctgattcttagaatttgcaccaggtataccccagaacaagacaccatgactttctcagacggccttaccctaaatcgaactcagatgcacaatgctggatttggtcctctgactgaccttgtgttcacctttgccaaccagctcctgcctttggaaatggatgacacagaaacaggccttctcagtgccatctgcttaatctgtggagaccgccaggaccttgaggaaccgacaaaagtagataagctacaagaaccattgctggaagcactaaaaatttatatcagaaaaagacgacccagcaagcctcacatgtttccaaagatcttaatgaaaatcacagatctccgtagcatcagtgctaaaggtgcagagcgtgtaattaccttgaaaatggaaattcctggatcaatgccacctctcattcaagaaatgctggagaattctgaaggacatgaacccttgaccccaagttcaagtgggaacacagcagagcacagtcctagcatctcacccagctcagtggaaaacagtggggtcagtcagtcaccactcgtgcaataagacattttctagctacttcaaacattccccagtaccttcagttccaggatttaaaatgcaagaaaaaacatttttactgctgcttagtttttggactgaaaagatattaaaactcaagaaggaccaagaagttttcatatgtatcaatatatatactcctcactgtgtaacttacctagaaatacaaacttttccaattttaaaaaatcagccatttcatgcaaccagaaactagttaaaagcttctattttcctctttgaacactcaagattgcatggcaaagacccagtcaaaatgatttacccctggttaagtttctgaagactttgtacatacagaagtatggctctgttctttctatactgtatgtttggtgctttccttttgtcttgcatactcaaaataaccatgacaccaaggttatgaaatagactactgtacacgtctacctaggttcaaaaagataactgtcttgctttcatggaatagtcaagacatcaaggtaaggaaacaggactattgacaggactattgtacagtatgacaagataaggctgaagatattctactttagttagtatggaagcttgtctttgctctttctgatgctctcaaactgcatcttttatttcatgttgcccagtaaaagtatacaaattccctgcactagcagaagagaattctgtatcagtgtaactgccagttcagttaatcaaatgtcatttgttcaattgttaatgtcactttaaattaaaagtggtttattacttgtttaatgacataactacacagttagttaaaaaaaatttttttacagtaatgatagcctccaaggcagaaacacttttcagtgttaagtttttgtttacttgttcacaagccattagggaaatttcatgggataattagcaggctggtctaccacctggaccatgtaactctagtgtccttcctgattcatgcctgatattgggatttttttttccagccttcttgatgccaaggggctaattaatattaacaactcccaaagaaacaggcatagaatctgcctcctttgaccttgttcaatcactatgaagcagagtgaaagctgtggtagagtggttaacagatacaagtgtcagtttcttagttctcatttaagcactagtggaattttttttttttgatatattagcaagtctgtgatgtactttcactggctctgtttgtacattgagattgtttgtttaacaatgctttctatgttcatatactgtttacctttttccatggagtctcctggcaaagaataaaatatatttattttaaaaaaaaaaaaaaaaaaaaaaaaaaaaaaaaaaaaaaaaaaaaaaaaaaaaaaaaaaaaaaaaaaaaaaaaaaaaaaaaaaaaaaaaaaaaa

SEQ ID NO: 4599 - DNA, 6330 bp, Homo sapiens; identical to SEQ ID NO: 616

SEQ ID NO: 4600 - DNA, 3436 bp, Homo sapiens; identical to SEQ ID NO: 886

SEQ ID NO: 4601 - DNA, 3134 bp, Homo sapiens; identical to SEQ ID NO: 112

SEQ ID NO: 4602 - DNA, 6512 bp, Homo sapiens
gagagctgcctgctcagacaacagacacgcgaggtcaggaagaagccgcttataaattaccgcttccttcgcgccgccgccaacgccgagccccgaggaccgcaagcccagaggacaagctgcgccaagagggagtgcggagcgttcacccagcgggtcagagagcgagcgggcaggcagcccccggccggcggaacccggcacagccgagcagagcgcgggcggcgccgcagccaccccagatccagaaccagaaccacagcccttctgaggagctcccaaaccaaggagatggccaccaaggagaagctgcagtgtctgaaagatttccacaaggacatcctgaagccctcaccagggaagagcccaggcacgcggcctgaggacgaggctgagggaaaacctccgcagagggagaagtggtctagcaagatcgactttgtgctctctgtggctggcggcttcgtgggcttgggcaacgtctggcgcttcccgtacctctgctacaagaatggtggaggtgcgtttctcataccgtattttattttcctgtttgggagcggcctgcctgtgtttttcttggagatcatcataggccagtacacctctgaagggggcatcacctgctgggaaaagatctgccccttgttctctggtatcggctatgcctccgttgtaattgtgtccctcctgaatgtctactacatcgtcatcctggcctgggccacatactacctgttccagtccttccagaaggagctgccctgggcacactgcaaccacagctggaacacacctcactgcatggaggacaccatgcgcaagaacaagagtgtctggatcaccatcagctccaccaacttcacctcccctgtcatcgagttctgggagcgcaacgtgctgagcttgtcccctggaatcgaccacccaggctctctgaaatgggacctcgctctctgccttcttttagtctggctagtgtgtttcttctgcatctggaagggcgtcaggtccactgggaaggtcgtctacttcacagccacttttccattcgccatgctcctggtgctgctggtccgagggctgacgctgccgggcgcgggcgcaggcatcaagttctatctgtatcctgacatcacccgccttgaggacccacaggtgtggattgacgctgggactcagatattcttctcttatgccatctgcctgggggctatgacctcgctggggagctacaacaagtacaagtataactcgtacagggactgtatgctgctgggatgcctgaacagtggtaccagttttgtgtctggcttcgcaattttttccatcctgggcttcatggcacaagagcaaggggtggacattgctgatgtggctgagtcaggtcctggcctggccttcattgcctacccaaaagctgtgacaatgatgccgctgcccacattttggtccattcttttttttattatgcttctcttgcttggactggatagccagtttgttgaagttgaaggacagatcacatccttggttgatctttacccatccttcctaaggaagggttatcgtcgggaaatcttcatcgccttcgtgtgtagcatcagctacctgctggggctgacgatggtgacggagggtggcatgtatgtgtttcagctctttgactactatgcagctagcggtgtatgccttttgtgggttgcattctttgaatgttttgttattgcctggatatatggaggtgataacctttatgatggtattgaggacatgattggctatcggcccgggccctggatgaagtacagctgggctgtgatcactccagttctctgtgttggatgtttcatcttctcgctcgtcaagtacgtacccctgacctacaacaaaacatacgtgtaccccaactgggccattgggctgggctggagcctggccctttcctccatgctctgcgttcccttggtcatcgtcatccgcctctgccagactgaggggccgttccttgtgagagtcaagtacctgctgaccccaagggaacccaaccgctgggctgtggagcgcgagggagccacaccttacaactctcgcaccgtcatgaacggcgctctcgtgaaaccgacccacatcattgtggagaccatgatgtgagctctctcgggtcgacggggccggcggctttcctgctgtttactaacattagattctcataggaccaggtttacagagctttatatttgcactaggatttttttttttttgtaattgtcacagaaaatgtaattgtgggtatgtgtgcgtgcgtgtgtgtgtgtgtgtgtatcgtgtgtgtgtgttttgttttgatttgggggatattttgtacaaaaagaaaacccacgggaagatgtccgtggagaggcagagctttcatactgaattagatgtattttatgggaatttggtaaatttttctttgtatttttttttttacatataagtatatatacacttagagattgtcatatacttttaccacttgaattgatcttcttgccagcaatagatctcattttcaaaagcaattcttcggtgctgtgtagctggcagaaagttctgtccagtaaacgcaggatggaattttcctgggactctacacccatcttaaggtggtataccttccaaatcctggttcagatggaagaaatagcaggagagaggacccattagctggcagacccagggggaagaaaggagggctgtgaggagatacctcattaaacttggcttagtgaagaagagagatgccaaaggaatgaaccaacccttcacataaaggagactggctgaagctgaatgaggaggccctatagcagaagtctgattctaagagcagtagaaacttgtaccagaagcaaaatcccacttttaattttgagatggtgagtggatagtcagtagaccgtcagaaccactggccagagagggagctgctagagatccaagaaggctggcaggagtgaggctcacaactcagcctcgcaagaggtggcagaggcacaggaggccacagtccttcctggggcattccaggcagagaaggagcagaggctctcccggcaggagctggggtctcagggctcagatgagtctgttgcatttgaatggggtcatagcaggttctggtcattccccaagcaacatctcagcatctcttaaagttgcctgcaggaatgaagcatgacatacctgttgagggactaggggagtggtggggaggtgagtggaccaaaggatataggccccaggcatgcagatgggcccggtgtcggggaggggtgctttctttcctcatctccccactccccactctcagcctgggagactcctgccaagccctcattaaagatgccaccctgggctgccctggcacctagcaaggcacaccaagaacagcttttgagtctgtatcctccactgggggaagtgctcccagttcagaacaagggcagcccgtggtgctgacctaggatataacaaagctcttcacttcaaaacccctgcaatagctgggtttacagacatttaccacctgcggacccaaaagagaaggcctaggagagttttctagaaggttgggattgtcagggtcctggcccctcagaactggcttgatcaagggccttatgtggagcagaggttgtctctgaaccaggagagaaggtactatacctttcaaatccccagggcagacacacccccacccagcccctatttggacctaaactgtgccatttgaacagtcacttccaagctcagtctaaatgaaaccgaaacgtgaccacgcacaaaggcagtcactgcctcgaggggtgcagaccgcagaattttcacagcaggggctcttggaaccctggaaacccccttcttaaatttgggaggaggagtatgcctttggtgtccccctcccaaggggcaattctgaaccccatctttggcaggcatacatatttcactgtttccaaagctatctactctgccaaacaacacccagtcctattccaaactctcaacgattctatcttgttcctgtttttctatgtatttatggttgccgtttgtgtctgatttgattttactgttttttccctgattttatggagtagcattgtgacctgttttcctttgtcttatataactttagtaaactaaccactgtcaatgattgagggcaggtggcacgtggggaagaggggacttggcacgcagtggctacctgggcatttgtggtcatttcagtttccatctccccagcgggggctccctgggtgaaaggccacagtattttgggttggtaggcaaattgcaacattctggacatggcctgaggaaggcctcttcttataagattctcagaccaaattctagaccaaagacacaggcagaccaagtccccaggccccgcctggaaggaagtcgttcctcaactctccccaaggcacctgtctccaatcagagccctctcgcccagccagccctggctctgtgtgcagagcatagctctgcgagtacctgtgtaataatgctcaaccttcatgtctccgtataaacgaaactttccatgagagctcatgactctggtccacctgtctatagagaatgggcaaagtccttcacctgctttctgcttgggatgggtcagaaatgctgatgcccgcacatagcccagccagccagatctggaaaggaagcgagggggttgtttaaatcaattttttaagatgaagaagtgggagacactgcgttgagatgggccatgctagggccacagagatttcctgacggtcagggagagaagggcctccagggtcccctaacccaacgcccttgttgtaaatgaggtaactgaggctcagggaggcactgtgagccaggaatggattttcttgaaacagctctagctgcaggttctccgaggtaggtgcagggaatggtgagtgtctaaccagggctacatccagcaacatcctcaaggtcttcctgacaaccaaagacaagcctttatggaaaaggaaatgcgctcccctccatgttcagggatgaggggagcagcagcagccacactcccaccatcctcacagaattcctggacccatgcggtggctccgtgagctgggtgactccagcctcacctgcacaccccagccctgcacggggccctccttcctcccagcagcccttggtgagctaggaattgagatccctgtttgtgaaagagggaactgaggtgcagagaagccagaggtgtgccagatccttaggcaggatttagatgaagtcgccctggctccagactgaccccgaggctctgcggggagtttccaggcagcaggaagtggccttggatgctctccttccaggacagcataacccctgggccatgtgcagctccttcactgccccctggatccccagcatacccccaaagacagtggggaaacacaaggggagagcacagcatggcccctccagcccacttcagggcactcttgtatcacccgggtaccgccacactggtcccccacccagccagcatctcccagcacagcccctctccctggggaaatgctctgggtagccagtctaaaggcagaggcacctaactgctccccgcagcccaccccacccaagattcagacacaagccaggaaaggacccaagagaaaatccttcaaggtggcctgaggtcccatccctccctcagacccatgtggtcccaggccaggctgcctgggacacggtaaataccactgtgtgcaaaaatcgaagtacaaaaccacaagactaaacaaaacaaacccagagagccaaacttgtagaggtgggcagtccagaaagcagggggcagccctccccctttccttctctccctgatcctcagaatatatattgttgtaataggaagcatttttgcattgttctcttgtgggtgtcactacagacatgttctggcgtgttctccgagggatggagcatcctgttatatatttgacttcaaattgagatgttggcttcattttttttttttacccaattaatctcccaatccctagcaactgtgactctgtatttagcacaagagaaagctgagaatgtgggtcttgcctccttccagaaatatgtctggctcatcaggacatttttttaaaacttcaaaatatttttaagatattttaaacttttataaaaaaaaaatcaaccaacaagagacttttctgaggaggaacatttgtatttgaacaagatccttggtgtgtagttcagtcttgcagtatacaagcttttgtgtataaatgttttatgatatgattccctgtattttgcaggggtttttttctcttttgctttttagataaatatgtatatcaatattttaaattcatctttgctttttttagaggagtttgtaatcaccttataacatgaaaataaacatttcctttttaacatccaaaaaaaaaaaaaaaaaa

SEQ ID NO: 4603 - DNA, 1286 bp, Homo sapiens
gagagctgcctgctcagacaacagacacgcgaggtcaggaagaagccgcttataaattaccgcttccttcgcgccgccgccaacgccgagccccgaggaccgcaagcccagaggacaagctgcgccaagagggagtgcggagcgttcacccagcgggtcagagagcgagcgggcaggcagcccccggccggcggaacccggcacagccgagcagagcgcgggcggcgccgcagccaccccagatccagaaccagaaccacagcccttctgaggagctcccaaacaaagcaaggagatggccaccaaggagaagctgcagtgtctgaaagatttccacaaggacatcctgaagccctcaccagggaagagcccaggcacgcggcctgaggacgaggctgagggaaaacctccgcagagggagaagtggtctagcaagatcgactttgtgctctctgtggctggcggcttcgtgggcttgggcaacgtctggcgcttcccgtacctctgctacaagaatggtggaggtgcgtttctcataccgtattttattttcctgtttgggagcggcctgcctgtgtttttcttggagatcatcataggccagtacacctctgaagggggcatcacctgctgggaaaagatctgccccttgttctctggtatcggctatgcctccgttgtaattgtgtccctcctgaatgtctactacatcgtcatcctggcctgggccacatactacctgttccagtccttccagaaggagctgccctgggcacactgcaaccacagctggaacacacctcactgcatggaggacaccatgcgcaagaacaagagtgtctggatcaccatcagctccaccaacttcacctcccctgtcatcgagttctgggagtaaggccacctcattgaagcaaggaggaggacatgggtggggcagagaggatggcccacttccttatctcctcccctgggatacaggagccactgtcttcgggggagtgggaggagggtgcagatctggagataaatttatgcctttggccatagacaggactggaatcccagttctgccacttactggctgtttgaccttaggcaagccactcctcctttctgagcctcagtttctttacctgtaagataaaaagaatgaatcattactaccctgtgaggcaggtatgcatacttatgttgtctaaaaatgatacagttttcttaatgtattttaggaaaaaatatattctgttattgcacagagaaaaaaaaaaaaaaaaaaaaaaaaa

SEQ ID NO: 4604 - DNA, 3280 bp, Homo sapiens; identical to SEQ ID NO: 1580

SEQ ID NO: 4605 - DNA, 3378 bp, Homo sapiens
gtcgggggccgaagcgcctcccgcagggagtccccgtgaggccgcgctgccgcgttacccgcagcggccgggggtccggggagtgcggggctccgagacagagccaggcgccccccagcggtcggcgcgggccccatggctgggccgggcggagcggaaccggtgaggtgaagccccggggccggcagccggaggcgcgtggccggggcgccggctccatgggcagcggcacacggcggcgcgatgatggacgttaacagcagcggccgcccggacctctacgggcacctccgctctttccttctgccagaagtggggcgcgggctgcccgacttgagccccgacggtggcgccgacccggtcgcgggctcctgggcgccgcacctgctgagcgaggtgacagccagcccggcgcccacctgggacgcgcccccggacaatgcctccggctgtggggaacagatcaactacggcagagtcgagaaagttgtgatcggctccatcctgacgctcatcacgctgctgacgatcgcgggcaactgcctggtggtgatctccgtgtgcttcgtcaagaagctccgccagccctccaactacctgatcgtgtccctggcgctggccgacctctcggtggctgtggcggtcatgcccttcgtcagcgtcaccgacctcatcgggggcaagtggatctttggacactttttctgtaatgtcttcatcgccatggacgtcatgtgctgcacggcctcgatcatgaccctgtgcgtgatcagcattgacaggtaccttgggatcacaaggcccctcacataccctgtgaggcagaatgggaaatgcatggcgaagatgattctctccgtctggcttctctccgcctccatcaccttacctccactctttggatgggctcagaatgtaaatgatgataaggtgtgcttgatcagccaggactttggctatacgatttactctaccgcagtggcattttatatccccatgtccgtcatgcttttcatgtactaccagatttacaaggctgccaggaagagtgctgccaaacacaagtttcctggcttccctcgagtggagccagacagcgtcatcgccctgaatggcatagtgaagctccagaaggaggtggaagagtgtgcaaacctttcgagactcctcaagcatgaaaggaaaaacatctccatctttaagcgagaacagaaagcagccaccaccctggggatcatcgtcggggcctttaccgtgtgctggctgccatttttcctcctctcgacagccagacccttcatctgtggcacttcctgcagctgcatcccactgtgggtggagaggacatttctgtggctaggctatgcaaactctctcattaacccttttatatatgccttcttcaaccgggacctgaggaccacctatcgcagcctgctccagtgccagtaccggaatatcaaccggaagctctcagctgcaggcatgcatgaagccctgaagcttgctgagaggccagagagacctgagtttgtgctgagggcctgcacaaggagggtgctgttgagaccagaaaagaggccaccggtatctgtgtgggtgctacaatctccagaccatcacaattggttagcagacaaaatgctgactactgtagaaaaaaaggtcatgattcatgattgaaagcagaacaatggagatgaaataaacaaggcaaaatagaggtggaaacagaaggaagtcatttgctgagtctgcagaatggaatgcagcttctgtcctttcttgggatgtctaaaacatgacaaacagggtgatctgttgtacacactatcttatgagggagatggtgacttctccttttttctgtggatcagtgctattgtgtgttctcagtttaagatagcagatcatctcagcagtaagcacaccaacagaactgagttccagaaaggaagcagtttctggtgctttgcatatgtccaaatccatgcaagtgggagaaagttccagtgcacacttcccatgcttctgagtctaggcgttgtggtgaatatgcaggaatcattcatgagacagaatgtattttgttgtatgacagaaggcttttccaagcaaactgcggtgagcgtagtgttgaatatgttgcatgtccatgttagaaaacagaatccagtcatcagctaatacaaatgatttcccagagcagtgtttgtttcaagcttctgtcaaatagtttggcttttctgcagggtctctgtgatttccccacctatgtacttttctgtgttaactcacttattatggtataactcaggaacaggtctcaggatggagagaagcatacaacatgagcaaagctttttctcgtgctctgaagggtcttgagaggggagtgggatgccttctgtgaggatttttatcgcagtgaagctcaagtggtacccaactgcgttgtaattaacatgattattggcatgtttttgactctcattttctacaaggctgcagtgggcccacccatgggctggcccataactgtatgttatgtggaagaagtgtgggaatgatgggttttccatgaaatgtgatgcttctggagatggggcataaacatgttcattcttgttgagctgcattgtgttaaaccaaattgtgtgaagcgaggtcacctggaccactcttgggaaatgcttcagaacaccagtctgttccttctagagaatttgtttttgtgttctatgtatcttaaatcaaatgtgtgcctaagcaattctgtcctctgattcccacccctacccaccaaaaaatggtagacatgaaaggcaggtgaggaaacagaaaaggtctctttgcagatatatattttttaaatggcactatgtagtaattaagagctaaggagacagaaagacagtagatgagaatagaagagtacctgtacctacaaggggaaaaatgaatgcaattctttatttgataagagtgaactgaaagagaatattattttcctacaataaagcaagctgtcctctcacaggataaagtggaattctgacatggattatggacttcttctaactcccattgacattgcttcttaccagacatggggaaaagctacctttcctgaaaggggaggagggcactgtcctttcagacaaagcttgtacaaattcctgaaccgcaaatttgctgaagtgaccgtatatattatattcataatttaaatgattatttatggtcagatacatattgttaaacttgaaaatgttttattacattacatcaaataaagtttatttgtagctgaaataaagcaacgtaagtaacaatttttaattaaaaaaaaaaaaaaaaaaaaaaaaaaaaaaaaaa

SEQ ID NO: 4606 - DNA, 3285 bp, Homo sapiens
gtcgggggccgaagcgcctcccgcagggagtccccgtgaggccgcgctgccgcgttacccgcagcggccgggggtccggggagtgcggggctccgagacagagccaggcgccccccagcggtcggcgcgggccccatggctgggccgggcggagcggaaccggtgaggtgaagccccggggccggcagccggaggcgcgtggccggggcgccggctccatgggcagcggcacacggcggcgcgatgatggacgttaacagcagcggccgcccggacctctacgggcacctccgctctttccttctgccagaagtggggcgcgggctgcccgacttgagccccgacggtggcgccgacccggtcgcgggctcctgggcgccgcacctgctgagcgaggtgacagccagcccggcgcccacctgggacgcgcccccggacaatgcctccggctgtggggaacagatcaactacggcagagtcgagaaagttgtgatcggctccatcctgacgctcatcacgctgctgacgatcgcgggcaactgcctggtggtgatctccgtgtgcttcgtcaagaagctccgccagccctccaactacctgatcgtgtccctggcgctggccgacctctcggtggctgtggcggtcatgcccttcgtcagcgtcaccgacctcatcgggggcaagtggatctttggacactttttctgtaatgtcttcatcgccatggacgtcatgtgctgcacggcctcgatcatgaccctgtgcgtgatcagcattgacaggtaccttgggatcacaaggcccctcacataccctgtgaggcagaatgggaaatgcatggcgaagatgattctctccgtctggcttctctccgcctccatcaccttacctccactctttggatgggctcagaatgtaaatgatgataaggtgtgcttgatcagccaggactttggctatacgatttactctaccgcagtggcattttatatccccatgtccgtcatgcttttcatgtactaccagatttacaaggctgccaggaagagtgctgccaaacacaagtttcctggcttccctcgagtggagccagacagcgtcatcgccctgaatggcatagtgaagctccagaaggaggtggaagagtgtgcaaacctttcgagactcctcaagcatgaaaggaaaaacatctccatctttaagcgagaacagaaagcagccaccaccctggggatcatcgtcggggcctttaccgtgtgctggctgccatttttcctcctctcgacagccagacccttcatctgtggcacttcctgcagctgcatcccactgtgggtggagaggacatttctgtggctaggctatgcaaactctctcattaacccttttatatatgccttcttcaaccgggacctgaggaccacctatcgcagcctgctccagtgccagtaccggaatatcaaccggaagctctcagctgcaggcatgcatgaagccctgaagcttgctgagaggccagagagacctgagtttgtgctgtaagacaaaatgctgactactgtagaaaaaaaggtcatgattcatgattgaaagcagaacaatggagatgaaataaacaaggcaaaatagaggtggaaacagaaggaagtcatttgctgagtctgcagaatggaatgcagcttctgtcctttcttgggatgtctaaaacatgacaaacagggtgatctgttgtacacactatcttatgagggagatggtgacttctccttttttctgtggatcagtgctattgtgtgttctcagtttaagatagcagatcatctcagcagtaagcacaccaacagaactgagttccagaaaggaagcagtttctggtgctttgcatatgtccaaatccatgcaagtgggagaaagttccagtgcacacttcccatgcttctgagtctaggcgttgtggtgaatatgcaggaatcattcatgagacagaatgtattttgttgtatgacagaaggcttttccaagcaaactgcggtgagcgtagtgttgaatatgttgcatgtccatgttagaaaacagaatccagtcatcagctaatacaaatgatttcccagagcagtgtttgtttcaagcttctgtcaaatagtttggcttttctgcagggtctctgtgatttccccacctatgtacttttctgtgttaactcacttattatggtataactcaggaacaggtctcaggatggagagaagcatacaacatgagcaaagctttttctcgtgctctgaagggtcttgagaggggagtgggatgccttctgtgaggatttttatcgcagtgaagctcaagtggtacccaactgcgttgtaattaacatgattattggcatgtttttgactctcattttctacaaggctgcagtgggcccacccatgggctggcccataactgtatgttatgtggaagaagtgtgggaatgatgggttttccatgaaatgtgatgcttctggagatggggcataaacatgttcattcttgttgagctgcattgtgttaaaccaaattgtgtgaagcgaggtcacctggaccactcttgggaaatgcttcagaacaccagtctgttccttctagagaatttgtttttgtgttctatgtatcttaaatcaaatgtgtgcctaagcaattctgtcctctgattcccacccctacccaccaaaaaatggtagacatgaaaggcaggtgaggaaacagaaaaggtctctttgcagatatatattttttaaatggcactatgtagtaattaagagctaaggagacagaaagacagtagatgagaatagaagagtacctgtacctacaaggggaaaaatgaatgcaattctttatttgataagagtgaactgaaagagaatattattttcctacaataaagcaagctgtcctctcacaggataaagtggaattctgacatggattatggacttcttctaactcccattgacattgcttcttaccagacatggggaaaagctacctttcctgaaaggggaggagggcactgtcctttcagacaaagcttgtacaaattcctgaaccgcaaatttgctgaagtgaccgtatatattatattcataatttaaatgattatttatggtcagatacatattgttaaacttgaaaatgttttattacattacatcaaataaagtttatttgtagctgaaataaagcaacgtaagtaacaatttttaattaaaaaaaaaaaaaaaaaaaaaaaaaaaaaaaaaa

SEQ ID NO: 4607 - DNA, 6836 bp, Homo sapiens; identical to SEQ ID NO: 146

SEQ ID NO: 4608 - DNA, 3399 bp, Homo sapiens; identical to SEQ ID NO: 2415

SEQ ID NO: 4609 - DNA, 2021 bp, Homo sapiens; identical to SEQ ID NO: 1571

SEQ ID NO: 4610 - DNA, 2804 bp, Homo sapiens; identical to SEQ ID NO: 2530

SEQ ID NO: 4611 - DNA, 2301 bp, Homo sapiens
atgaagacaccgtggaaggttcttctgggactgctgggtgctgctgcgcttgtcaccatcatcaccgtgcccgtggttctgctgaacaaaggcacagatgatgctacagctgacagtcgcaaaacttacactctaactgattacttaaaaaatacttatagactgaagttatactccttaagatggatttcagatcatgaatatctctacaaacaagaaaataatatcttggtattcaatgctgaatatggaaacagctcagttttcttggagaacagtacatttgatgagtttggacattctatcaatgattattcaatatctcctgatgggcagtttattctcttagaatacaactacgtgaagcaatggaggcattcctacacagcttcatatgacatttatgatttaaataaaaggcagctgattacagaagagaggattccaaacaacacacagtgggtcacatggtcaccagtgggtcataaattggcatatgtttggaacaatgacatttatgttaaaattgaaccaaatttaccaagttacagaatcacatggacggggaaagaagatataatatataatggaataactgactgggtttatgaagaggaagtcttcagtgcctactctgctctgtggtggtctccaaacggcacttttttagcatatgcccaatttaacgacacagaagtcccacttattgaatactccttctactctgatgagtcactgcagtacccaaagactgtacgggttccatatccaaaggcaggagctgtgaatccaactgtaaagttctttgttgtaaatacagactctctcagctcagtcaccaatgcaacttccatacaaatcactgctcctgcttctatgttgataggggatcactacttgtgtgatgtgacatgggcaacacaagaaagaatttctttgcagtggctcaggaggattcagaactattcggtcatggatatttgtgactatgatgaatccagtggaagatggaactgcttagtggcacggcaacacattgaaatgagtactactggctgggttggaagatttaggccttcagaacctcattttacccttgatggtaatagcttctacaagatcatcagcaatgaagaaggttacagacacatttgctatttccaaatagataaaaaagactgcacatttattacaaaaggcacctgggaagtcatcgggatagaagctctaaccagtgattatctatactacattagtaatgaatataaaggaatgccaggaggaaggaatctttataaaatccaacttagtgactatacaaaagtgacatgcctcagttgtgagctgaatccggaaaggtgtcagtactattctgtgtcattcagtaaagaggcgaagtattatcagctgagatgttccggtcctggtctgcccctctatactctacacagcagcgtgaatgataaagggctgagagtcctggaagacaattcagctttggataaaatgctgcagaatgtccagatgccctccaaaaaactggacttcattattttgaatgaaacaaaattttggtatcagatgatcttgcctcctcattttgataaatccaagaaatatcctctactattagatgtgtatgcaggcccatgtagtcaaaaagcagacactgtcttcagactgaactgggccacttaccttgcaagcacagaaaacattatagtagctagctttgatggcagaggaagtggttaccaaggagataagatcatgcatgcaatcaacagaagactgggaacatttgaagttgaagatcaaattgaagcagccagacaattttcaaaaatgggatttgtggacaacaaacgaattgcaatttggggctggtcatatggagggtacgtaacctcaatggtcctgggatcgggaagtggcgtgttcaagtgtggaatagccgtggcgcctgtatcccggtgggagtactatgactcagtgtacacagaacgttacatgggtctcccaactccagaagacaaccttgaccattacagaaattcaacagtcatgagcagagctgaaaattttaaacaagttgagtacctccttattcatggaacagcagatgataacgttcactttcagcagtcagctcagatctccaaagccctggtcgatgttggagtggatttccaggcaatgtggtatactgatgaagaccatggaatagctagcagcacagcacaccaacatatatatacccacatgagccacttcataaaacaatgtttctctttaccttaa

SEQ ID NO: 4612 - DNA, 1990 bp, Homo sapiens
agtaggatgcggccagcgcaggagctggtggtgaaaaactgatctcgcatgttcagaaactgcacaagctctaccacatcctcgtcaacactgcccttccggctgaggtccgctttgctcaaacattgcgccttccatttcctgaactccgcgctgcgatccatgggtgacggactcagggtctgcgctcggctccttcatggtagcctcgtctctccctgggggcagccatattgaagcgagcggtggccgaaaaggtccaaacttcctcttcgttcttaatttgggaaattctagtgccttcgcctaggggtggagagaggcgcacatcctgggtggagcgaggcgcacatcctgggtggagcctgcaaaagttggagaaggtgtggcagtcctcatttctgtggaatctgaagaagcccacgcagattttaattcccactctagattctggttctaatcaaggtccatgcatgtggtgtcaaccccgtggagacatacattcgctctggtacttatagtagaaaaccactcttaccctatactcctggctcagatgtggctggggtgatagaagctgttggagataatgcatctgctttcaagtgcctgtgtgaaagctggagagagtgttctggttcatggggcaagtggaggagttggattagcagcatgccaaattgctagagcttatggcttaaagattttgggcactgctggtactgaggaaggacaaaagattgttttgcaaaatggagcccatgaagtgttcaatcacagagaagtgaattacattgataaaattaagaagtatgttggtgagaaaggaattgatataattattgaaatgttagctaatgtaaatcttagtaaagacttgagtcttctgtcacatggaggacgagtgatagttgttggcagcagaggtactattgaaataaacccacgagacaccatggcaaaggagtcgagtataattggagttactctcttttcctcaaccaaggaggaatttcagcaatatgcagcagcccttcaagctggaatggaaattggctggttgaaacctgtgataggttctcaatatccattggagaaggtggccgaggctcatgaaaatatcattcatggtagtggggctactggaaaaatgattcttctcttatgatgattaattctttcatggatttcctatgtaattagaggtactgtctttcccccagttgtacttaccctatcttttctttaattaacattcgattccatgagcttcttatgtgaaaaaataagatttttctttagagagcagaagcagaagagtaaaatttattgtatagctagcaatatttttttatgccatctgtctcaaatcaaagagtcatcatagtaggaaataacatgttagttgtcatttggcatgagtgtgcattccagtaattcttaattgatatttgattaattccatacctttgattaaaacatgctagttcaaaataagactgctcagtttccaagggttttcaagcctacttacctttataaaggttctctagtctctgattagccatgactgtattggactttgaacattttctgaactaaaaacctctattctaaactaatctcatttggatgtgtaagtcttttgtaaaggcaagaataaataatatccaggacaatttattagttttctcagtattttcccaaatattagaatatttacttcattattggttggctgccaatgaccccatatgttctgtgagaatagtagctttatctttgatataatacatagtctccaaataggtaatacttcgcaattgattagattttcagagtagatttagagttatctgtttttctggtgagggtcaaatatttttgttaattaagctcacaaatttgataaattaagaattatctgcatttgtctcgtaacataataatgtgtaataaagtctatagaaaattaaaaaaaaaaaaaaaa

SEQ ID NO: 4613 - DNA, 705 bp, Homo sapiens; identical to SEQ ID NO: 614

SEQ ID NO: 4614 - DNA, 7802 bp, Homo sapiens; identical to SEQ ID NO: 650

SEQ ID NO: 4615 - DNA, 117 bp, Homo sapiens; identical to SEQ ID NO: 1505

SEQ ID NO: 4616 - DNA, 6644 bp, Homo sapiens; identical to SEQ ID NO: 2426

SEQ ID NO: 4617 - DNA, 466 bp, Homo sapiens; identical to SEQ ID NO: 731

SEQ ID NO: 4618 - DNA, 3321 bp, Homo sapiens
atcttaatgcttacagctgagaagcaggtcagtcaggttcctgggcgctctgttacacaagcaagatacagccagccccacctaattttgtttccctggcaccctcctgctcagtgcgacattgtcacacttaacccatctgttttctctaatgcacgacagattcctttcagacaggacaactgtgatatttcagttcctgattgtaaatacctcctaagcctgaagattcctttaaaaaaaaaccaataccaaagaagcctacaatgttggccttagccaaaattctgttgatttcaacgttgttttattcacttctatcggggagccatggaaaagaaaatcaagacataaacacaacacagaacattgcagaagtttttaaaacaatggaaaataaacctatttctttggaaagtgaagcaaacttaaactcagataaagaaaatataaccacctcaaatctcaaggcgagtcattcccctcctttgaatctacccaacaacagccacggaataacagatttctccagtaactcatcagcagagcattctttgggcagtctaaaacccacatctaccatttccacaagccctcccttgatccatagctttgtttctaaagtgccttggaatgcacctatagcagatgaagatcttttgcccatctcagcacatcccaatgctacacctgctctgtcttcagaaaacttcacttggtctttggtcaatgacaccgtgaaaactcctgataacagttccattacagttagcatcctctcttcagaaccaacttctccatctgtgacccccttgatagtggaaccaagtggatggcttaccacaaacagtgatagcttcactgggtttaccccttatcaagaaaaaacaactctacagcctaccttaaaattcaccaataattcaaaactctttccaaatacgtcagatccccaaaaagaaaatagaaatacaggaatagtattcggggccattttaggtgctattctgggtgtctcattgcttactcttgtgggctacttgttgtgtggaaaaaggaaaacggattcattttcccatcggcgactttatgacgacagaaatgaaccagttctgcgattagacaatgcaccggaaccttatgatgtgagttttgggaattctagctactacaatccaactttgaatgattcagccatgccagaaagtgaagaaaatgcacgtgatggcattcctatggatgacatacctccacttcgtacttctgtatagaactaacagcaaaaaggcgttaaacagcaagtgtcatctacatcctagccttttgacaaattcatctttcaaaaggttacacaaaattactgtcacgtggattttgtcaaggagaatcataaaagcaggagaccagtagcagaaatgtagacaggatgtatcatccaaaggttttctttcttacaatttttggccatcctgaggcatttactaagtagccttaatttgtattttagtagtattttcttagtagaaaatatttgtggaatcagataaaactaaaagatttcaccattacagccctgcctcataactaaataataaaaattattccaccaaaaaattctaaaacaatgaagatgactctttactgctctgcctgaagccctagtaccataattcaagattgcattttcttaaatgaaaattgaaagggtgctttttaaagaaaatttgacttaaagctaaaaagaggacatagcccagagtttctgttattgggaaattgaggcaatagaaatgacagacctgtattctagtacgttataattttctagatcagcacacacatgatcagcccactgagttatgaagctgacaatgactgcattcaacggggccatggcaggaaagctgaccctacccaggaaagtaatagcttctttaaaagtcttcaaaggttttgggaattttaacttgtcttaatatatcttaggcttcaattatttgggtgccttaaaaactcaatgagaatcatggtaaaaaaaaaaagttaaccaaagaatatacctgtacataatttgtacagttttaagttgttagataggaactggatttcttatgtattagacattattgctcaatcataatggaatagattctgcatccctaaatgtatgaaccataaggttaaaaaagatgaatggaaatatcaaacaactttttactgagcatcagtttcataatcaataatataagaagattaatttggattctagtatgtttcagtttgtttttaattaccaccttcctttggtagaaaaaatatgttccttgatgtaggaaagtctaggttttagagattagaggatgagatcaagagttaaattcctaaagaagcactgaatatatgaagagagcaaacaaatcaagtaccaacctagaggctttatttttgaattgattcatggtgtgtgtgtgtgtgtgtgtgtgtgtgtgtgtgtgtgtgtaacacagaaacagcttcagaaaataagggatagaaagtaatgaagaaagtacttaccccatattgccataaaaatagcaaagaagactgtccctccattatcgaacaaatatgtcacctgagtagaaaacaaacagaaatattagtcatgcaaattgattataataagccagtgaatactgtttgcactcaggtactatgattttttctcaaatagaatcatattattttatagtacagaaatattatatatgaattcctttcatgggtcttgcaacaatttcacatgatttttctcatggggagaggtgaagaaacaacattagccctcttctctcctctcttgattccctttataccccaccatcatttctgattataaataattctaccattctatggaagtatttgtgggtcacagattgtcaaactacttaatgaaagttgtatgaaattagtttttcaggtgaggcattcctagttgcaattcctgttagcaaaacttctaggagtggggaagttggaaaatgcaggattcttccagtgagccagcatttcccatagctaaccctattctcttagtctttcaaaatgtagaatgggtccaataatggctataagatgtaataaatcccatcttaatttgttttaaaagtttcataaatcactgaacacttatgaaacaaagtgttttttaatcagatatcaactgaaacttcataaaggatgcatagttttataatgttattgaatcaaattttaaggcttgtattgtttgattttaataaagtataaattcaatttaaaaaaaaaaaaaaaaaa

SEQ ID NO: 4619 - DNA, 3409 bp, Homo sapiens; identical to SEQ ID NO: 2298

SEQ ID NO: 4620 - DNA, 3259 bp, Homo sapiens
atcttaatgcttacagctgagaagcaggtcagtcaggttcctgggcgctctgttacacaagcaagatacagccagccccacctaattttgtttccctggcaccctcctgctcagtgcgacattgtcacacttaacccatctgttttctctaatgcacgacagattcctttcagacaggacaactgtgatatttcagttcctgattgtaaatacctcctaagcctgaagcttctgttactagccattgtgagcttcagtttcttcatctgcaaaatgggcataatacaatctattcttgccacatcaagggattgttattcctttaaaaaaaaaccaataccaaagaagcctacaatgttggccttagccaaaattctgttgatttcaacgttgttttattcacttctatcggggagccatggaaaagaaaatcaagacataaacacaacacagaacattgcagaagtttttaaaacaatggaaaataaacctatttctttggaaagtgaagcaaacttaaactcagataaagaaaatataaccacctcaaatctcaaggcgagtcattcccctcctttgaatctacccaacaacagccacggaataacagatttctccagtaactcatcagcagagcattctttgggcagtctaaaacccacatctaccatttccacaagccctcccttgatccatagctttgtttctaaagtgccttggaatgcacctatagcagatgaagatcttttgcccatctcagcacatcccaatgctacacctgctctgtcttcagaaaacttcacttggtctttggtcaatgacaccgtgaaaactcctgataacagttccattacagttagcatcctctcttcagaaccaacttctccatctgtgacccccttgatagtggaaccaagtggatggcttaccacaaacagtgatagcttcactgggtttaccccttatcaagaaaaaacaactctacagcctaccttaaaattcaccaataattcaaaactctttccaaatacgtcagatccccaaaaagttctgcgattagacaatgcaccggaaccttatgatgtgagttttgggaattctagctactacaatccaactttgaatgattcagccatgccagaaagtgaagaaaatgcacgtgatggcattcctatggatgacatacctccacttcgtacttctgtatagaactaacagcaaaaaggcgttaaacagcaagtgtcatctacatcctagccttttgacaaattcatctttcaaaaggttacacaaaattactgtcacgtggattttgtcaaggagaatcataaaagcaggagaccagtagcagaaatgtagacaggatgtatcatccaaaggttttctttcttacaatttttggccatcctgaggcatttactaagtagccttaatttgtattttagtagtattttcttagtagaaaatatttgtggaatcagataaaactaaaagatttcaccattacagccctgcctcataactaaataataaaaattattccaccaaaaaattctaaaacaatgaagatgactctttactgctctgcctgaagccctagtaccataattcaagattgcattttcttaaatgaaaattgaaagggtgctttttaaagaaaatttgacttaaagctaaaaagaggacatagcccagagtttctgttattgggaaattgaggcaatagaaatgacagacctgtattctagtacgttataattttctagatcagcacacacatgatcagcccactgagttatgaagctgacaatgactgcattcaacggggccatggcaggaaagctgaccctacccaggaaagtaatagcttctttaaaagtcttcaaaggttttgggaattttaacttgtcttaatatatcttaggcttcaattatttgggtgccttaaaaactcaatgagaatcatggtaaaaaaaaaaagttaaccaaagaatatacctgtacataatttgtacagttttaagttgttagataggaactggatttcttatgtattagacattattgctcaatcataatggaatagattctgcatccctaaatgtatgaaccataaggttaaaaaagatgaatggaaatatcaaacaactttttactgagcatcagtttcataatcaataatataagaagattaatttggattctagtatgtttcagtttgtttttaattaccaccttcctttggtagaaaaaatatgttccttgatgtaggaaagtctaggttttagagattagaggatgagatcaagagttaaattcctaaagaagcactgaatatatgaagagagcaaacaaatcaagtaccaacctagaggctttatttttgaattgattcatggtgtgtgtgtgtgtgtgtgtgtgtgtgtgtgtgtgtgtgtaacacagaaacagcttcagaaaataagggatagaaagtaatgaagaaagtacttaccccatattgccataaaaatagcaaagaagactgtccctccattatcgaacaaatatgtcacctgagtagaaaacaaacagaaatattagtcatgcaaattgattataataagccagtgaatactgtttgcactcaggtactatgattttttctcaaatagaatcatattattttatagtacagaaatattatatatgaattcctttcatgggtcttgcaacaatttcacatgatttttctcatggggagaggtgaagaaacaacattagccctcttctctcctctcttgattccctttataccccaccatcatttctgattataaataattctaccattctatggaagtatttgtgggtcacagattgtcaaactacttaatgaaagttgtatgaaattagtttttcaggtgaggcattcctagttgcaattcctgttagcaaaacttctaggagtggggaagttggaaaatgcaggattcttccagtgagccagcatttcccatagctaaccctattctcttagtctttcaaaatgtagaatgggtccaataatggctataagatgtaataaatcccatcttaatttgttttaaaagtttcataaatcactgaacacttatgaaacaaagtgttttttaatcagatatcaactgaaacttcataaaggatgcatagttttataatgttattgaatcaaattttaaggcttgtattgtttgattttaataaagtataaattcaatttaaaaaaaaaaaaaaaaaa

SEQ ID NO: 4621 - DNA, 3924 bp, Homo sapiens; identical to SEQ ID NO: 235

SEQ ID NO: 4622 - DNA, 3620 bp, Homo sapiens
ctgcatgtttgatttagcaggtgaagtttttagtatttaatgtgagtattttagaaccccagatatgatgtttgttatgtaatctgtactaacagttttgcaatgggaaactcttcccttactggtttgagagttgagtcatatcctgtgaatctaaagctacgttatttaaacatcacgggttcttcttactttcattccaagtcgctgctgtgcagagcagcaagtgctccgtgcagggctgttgctatcacttggaggtgaacagcctcttttgccggtattcagtgaagaaagcaagtctaaatatgcagttctctcactggagtgaaagatgttttgttcatttctaatcaactatgctagacagctgcaagctgaaaagtgcctgcaatttgccatttatttgtaataagaaaataataaacactgctggaaccagtaatgcagaagtccccttggctgatcccggaatgtaccagctggacattacattaagaaggggtcaaagtttagctgctcgagatcgaggagggacgagtgatccatatgtgaagtttaaaatcggaggaaaagaagtttttagaagtaagataatacacaagaacctcaaccctgtgtgggaagaaaaagcttgtattctggttgatcatcttagggagccattgtatataaaggtatttgactatgattttggactacaggatgactttatgggctcagcctttctggatctgacacaattggagttaaacaggcccacagatgtgacccttactctgaaagatcctcattatcctgaccatgatcttggaatcattttgctctcagtcatccttacccctaaagaaggagagtccagggatgtgacaatgctaatgaggaagagttggaaaagatcaagtaaggaactttcagaaaatgaagtggttggatcttatttctctgtgaagtctctcttttggaggacgtgcggcaggccagctcttcctgtcctgggcttctgcagagcagagcttcagaatccttattgcaaaaatgtacaatttcagacccaaagtttacgcctatcagacctacacagaaaatcgcatctttggagaggaatagtcagcatcaccttgattgaagggagagacctcaaggccatggattccaacgggttgagcgatccctacgtgaagttccggcttgggcatcagaagtacaagagcaagattatgccaaaaacgttgaatcctcagtggagggaacaatttgattttcacctttatgaagaaagaggaggagtcattgatatcactgcatgggacaaagatgctgggaaaagggatgatttcattggcaggtgccaggtcgacctgtcagccctcagtagggaacagacgcacaagctggagttgcagctggaagagggtgagggacacctggtgctgctggtcactctgacagcatcagccacagtcagcatctctgacctgtctgtcaactccctggaggaccagaaggaacgagaggagatattaaagagatatagcccattgaggatatttcacaacctgaaagatgtgggatttctccaggtgaaagtcatcagagcggaagggttaatggctgccgacgtcactggaaaaagtgacccattttgtgtggtagaactgaacaacgatagactgctaacacatactgtctacaaaaatctcaatcctgagtggaataaagtcttcacgttcaacattaaagatatccattcagttcttgaagtgacagtttatgatgaagatcgggatcgaagtgctgactttctgggcaaagttgctataccattgctgtctattcaaaatggtgaacagaaagcctacgtcttgaaaaacaagcagctgacagggccaacaaagggggtcatctatcttgaaatagatgtgatttttaatgctgtgaaagccagcttacgaacattaatacccaaagaacagaagtacattgaagaggaaaacagactctctaaacagctgctactaagaaactttatcagaatgaaacgttgtgtcatggtgctggtaaatgctgcatactacgttaatagttgctttgattgggattcacccccaaggagtctcgctgcttttgtgctctttctctttgttgtctggaactttgagctctacatgataccactggttttgttgttactattgacatggaactacttcttgataatatcagggaaagataacaggcaacgtgatacagtagtggaggacatgctagaggacgaggaagaagaagatgacaaagatgacaaggacagtgaaaaaaagggatttataaataaaatctatgccatccaggaggtatgtgtcagtgtccagaacatcctagatgaagtggcttcctttggcgaaaggataaagaatactttcaactggactgtcccattcttaagctggctggccattgtagccctctgtgtgttcacagccatcctgtactgcattccgctgagatacattgtccttgtctggggcatcaataaatttacaaaaaagcttcggagtccatatgcaattgataacaatgaactacttgacttcctttccagagtcccttcagatgtacaagtggtgcaataccaagaactgaaaccagatccttctcatagcccatataaaagaaagaaaaacaatcttggctagccagctcccagcactgaggagaccagcatctgtttgggaagataaaagaaaaagccctcagcctcagcagcatttcctttctttctgctttttatttattttgcctttttatcatgatcgagagaatctgtaaatagtgtacaaaggcatatgtctttgaatatatacttctattgtacagactcaacttgataaaggttttgctactgctgtgtcaaaaccttgttagctgtggataataatataacacactgaaagaacaaatataagaatgataacactggaagatatattcttatctaattactagtggattaaatactcacctgtgctctgattaaatctacatcaattgtaaatgtcgatttgattttaaagtttttttttaatgcgactattttttatctgaaaagtaatccattacacttttctatgttttatacatttcaaaagggagggaaattccaaagcctgaataatggaatggatacatttcaatttaacatatattctggctttagatcccgacattcactcctgtgcaaattacttaggtatgacttaggctaattttaagctaataagtgaaggtacattcactccctcaagagaatcaatactcagaaggttacaaagttttctttatagaatttcaatcaatcattccatctaaaaccttaaaatctctacaggactacataacataaatactgccagtttataaacgattgcctatctgaatttttatacctaccactactttaatttatacagttagttagcaaattagcaacccagtaagtacagttatcaaaaatactaggaaactatatccatatcgcttttggtgtcagattgtatctgtgcatctaaaaatattttaataaatactcaagtgctctcagagaaaaaaaaaaaaaaaaa

SEQ ID NO: 4623 - DNA, 3187 bp, Homo sapiens; identical to SEQ ID NO: 1414

SEQ ID NO: 4624 - DNA, 4098 bp, Homo sapiens
gactccggaagagcccttttctgcagctccttggggactgcacgtctcacttctaagtttgcggcggagagaataaagcagaaagacaggaagaggaggtggagttctacagctctccaggaggccggggggcccactccgcctatcgctcccctcggctacgctgccacttcaatgccccgcaggtcgcgagctgctgttctttcgaaggcgtcggagaaccaggggcgtcccgcgccacctctgactcggagcagcgccgagcactgacgctcccgcccttgggcaaggacgccagtgcgcccgcgcgcgtccctctgcgcggcagcccgtcgcgggccctcaaggggaagcccaggccaggatggccccgggtcgcgcggtggccgggctcctgttgctggcggccgccggcctcggaggagtggcggaggggccagggctagccttcagcgaggatgtgctgagcgtgttcggcgcgaatctgagcctgtcggcggcgcagctccagcacttgctggagcagatgggagccgcctcccgcgtgggcgtcccggagcctggccagctgcacttcaaccagtgtttaactgctgaagagatcttttcccttcatggcttttcaaatgctacccaaataaccagctccaaattctctgtcatctgtccagcagtcttacagcaattgaactttcacccatgtgaggatcggcccaagcacaaaacaagaccaagtcattcagaagtttggggatatggattcctgtcagtgacgattattaatctggcatctctcctcggattgattttgactccactgataaagaaatcttatttcccaaagattttgaccttttttgtggggctggctattgggactcttttttcaaatgcaattttccaacttattccagaggcatttggatttgatcccaaagtcgacagttatgttgagaaggcagttgctgtgtttggtggattttacctacttttcttttttgaaagaatgctaaagatgttattaaagacatatggtcagaatggtcatacccactttggaaatgataactttggtcctcaagaaaaaactcatcaacctaaagcattacctgccatcaatggtgtgacatgctatgcaaatcctgctgtcacagaagctaatggacatatccattttgataatgtcagtgtggtatctctacaggatggaaaaaaagagccaagttcatgtacctgtttgaaggggcccaaactgtcagaaatagggacgattgcctggatgataacgctctgcgatgccctccacaatttcatcgatggcctggcgattggggcttcctgcaccttgtctctccttcagggactcagtacttccatagcaatcctatgtgaggagtttccccacgagttaggagactttgtgatcctactcaatgcagggatgagcactcgacaagccttgctattcaacttcctttctgcatgttcctgctatgttgggctagcttttggcattttggtgggcaacaatttcgctccaaatattatatttgcacttgctggaggcatgttcctctatatttctctggcagatatgtttccagagatgaatgatatgctgagagaaaagataatcaaatgggctactgatgacatcaaatctcaacttcatttactttggatatatacggcaaggtagtaatttcattatctggagtatttcacctccacatctctgcaataccagcaccttcaacagtgattggttagaggttggcatatgacatagttatgaccattgagacgtgatgctgtgtgtgctgtgaagtttctcaaaaggagtaaggaagatacagcctcttctttctagggactttgtttgtaggtgtgacacctggagcagccattttgctactgttttgtttctaattgtgttccccgccgccctccccgctcgccccgaaaaacgacatgtttgagttctaatccccagtatttcagaatgtgaccttatttggaaatagagtcattgcaaatgtaatttgttaagatgagctcatactggagtagagtgggttcctgatctagtatgactggtattcttattaaaaagagaaatttgaatactagctacaccatgtaaagatgaaggcagagatcgtggtgatgcatctacaatgtcaacaattgccagcaaatcatcagaatctgggagagaggtatggaatgaattctctctcgcagccctaagaaggaaccaatcctgtgcacacctgaatcttggacttccagcctccacaactgtgagacaatacatttttgttatttaagctacccagttgtggcactttattactgcagttctagccgactaatacagctaccttgagaggaaatagcatggggatgaaggtgatgtgctgaagaagcacagcagaaagtggaaagatggtccatgaggacatccttagccactgaattgacaagcctcttccctggagtccctcttccttgggattttttttggtgtgtgtaataatcacttttcctaatggtgcaaaccattgtgagttgctctttgactgctagtaattaaagcaaactaaccaagtcagccctccccagtgttcctttttgcaatctaaattctgatgtccaactcctccctgggccactccctgtccccagatgtctctttgtatatctaaagaagaaaaagaaggataaatcctttttctcccaagagatctccctgcttttgtgaaaagcacaaagaagggcattatctaacttttctcatcattagaagtcaagcctggccgtgactcccgttatgacattttgatggccacattttatgagaaaagcccaaacagacagacctgtctgtaaattctttcatcctttgcattctttctttgactgtaccttagagagtgtttgattattgcaggggagatggaaaagaagcaggttctggcctatgctctagttcctcactttctggagttatcttttgggcctggagtctcttggagtgaggaaaggaagccatttttatactttacttatggtagagttaaacttcgtactcttaggaggctacatgcaatctccaagaggaagagagtgaagaggttaagaattatgccatcaaaatgtgctgctctggcatattgactatttgaattacagatattttaaaaacatcagatatgaagaggtcactctgatcttaattctgtgtcttaacagcaggagatgaaattcccacatgggagatggcctccctgtcacagaaggaataccattctccctatcaatgatgagaaattggaactgagagaattctgtatagaccttgttcaagtaattcttctattttaaacctccccacataatttagctgccttttcaaaactactgtcctttgtgcaaccagtatagaagcgattgactctcactgcatccttgggtcttcttttccctatatgggctcttttcccatatgggctcttatgtcctgtaaaacatgtattaaataaatttgtatgcttttctcccgttaacctgtcttacatcaatttaattcttgggcccaggtaggaccctaagaggacagaggtcgagttttgccacctctgcaagagaaaagagagatgcccagaccaccaggcctgggaaatctttgatttcccaggctttgaagtgggcactgtgtctgaacctggccctctgaaacttcctgttcctggacatcccagctgctaatgtgagttgcccttgcactggctcagggctgggacattaaaggaatttcccttttgttgacataacagtaggatggctatagctaacaataatatattatttagtttcaagtagctagaaggaacatatgaatgttcccaacacaaagaaatgacaactatttgagatgatggatatgctaataaccttaatctgattcctatacattatatgcatcacatatacatacattatatgtataacatcactatgtaccccataaatatgtgcaattattgtcaattaaacaaataaatttaaacaaacattaaaaaaaaaaaaaaaaaa

SEQ ID NO: 4625 - DNA, 2624 bp, Homo sapiens
agcgattctcctgcctcagccttccgagtagctgggattacaggcatgcaccaacacgctcagtgtttaactgctgaagagatcttttcccttcatggcttttcaaatgctacccaaataaccagctccaaattctctgtcatctgtccagcagtcttacagcaattgaactttcacccatgtgaggatcggcccaagcacaaaacaagaccaagtcattcagaagtttggggatatggattcctgtcagtgacgattattaatctggcatctctcctcggattgattttgactccactgataaagaaatcttatttcccaaagattttgaccttttttgtggggctggctattgggactcttttttcaaatgcaattttccaacttattccagaggcatttggatttgatcccaaagtcgacagttatgttgagaaggcagttgctgtgtttggtggattttacctacttttcttttttgaaagaatgctaaagatgttattaaagacatatggtcagaatggtcatacccactttggaaatgataactttggtcctcaagaaaaaactcatcaacctaaagcattacctgccatcaatggtgtgacatgctatgcaaatcctgctgtcacagaagctaatggacatatccattttgataatgtcagtgtggtatctctacaggatggaaaaaaagagccaagttcatgtacctgtttgaaggggcccaaactgtcagaaatagggacgattgcctggatgataacgctctgcgatgccctccacaatttcatcgatggcctggcgattggggcttcctgcaccttgtctctccttcagggactcagtacttccatagcaatcctatgtgaggagtttccccacgagttaggagactttgtgatcctactcaatgcagggatgagcactcgacaagccttgctattcaacttcctttctgcatgttcctgctatgttgggctagcttttggcattttggtgggcaacaatttcgctccaaatattatatttgcacttgctggaggcatgttcctctatatttctctggcagatatgtttccagagatgaatgatatgctgagagaaaaggtaactggaagaaaaaccgatttcaccttcttcatgattcagaatgctggaatgttaactggattcacagccattctactcattaccttgtatgcaggagaaatcgaattggagtaatagaaaatggaagatggtgttgttaataaaggcatttaatagataaaaacatctccaaaaaggattttgaagctgatcctatttagttaaaaagataattttgctttcaactgtaggtccagaaaactaattattggcatcagtctgtgaaatagtccattatttgttgttaaaaatgcttcaaaaggttttcagtgtcagtctgagatgcctggtatataggagcctttgggaaatacctatttttcagtattccatgcatattagatatcaccatgaagcaagagacatgcattctataatcatgtagacactcagactcaggggaaaatacaagttatatcctgaaagcctttaaaactctatggtaggatcaaagattcaaatggtttcagagaggttttatttcaattaatttgttctagtgctttcaagagcaagtacatcaaaatgtagaaggtaaaatgtatgcaacactaatataaattattccaagtctttaaggagccaaagaaaaaaaagatttctcacagctttttgttctgttttgtatttcaattaggaacttgcagtattattttgaaaaccattctaaaataataggagttaggaaataaataaagttttgctagccctgctaagttcaggcttagaggcttatcgctaagtataaacttcaccagattccacgaaaagctggatagctttttttctgacttatgttgtggttgcacccctcacaaatggcagaacagtatgtaaagctggtaacacctcggtttcagtgcaccatgtgtttgctttgtgaaggtgaagaatatgttggtttagagaaagaaattggatgtaattttatgcaatttacttttaaagacaaacataactatttagcagagaatattttaataaatgcaaaacaacagctggactgctgtacatcaaggacagattaactggaaaacatatgttccttatgtgtgatcgagagccattcagaaaagacttcctttgtgttcagcctatacttttccatatggtataccttgaaaaaaattagcacaccatggttatttttctaccttttataaaagacagagcctgtttactcatttagaagatagagaaaattggtctaaaattgaacatcctagattcacactcccaagtcacttaaggtgatttgatggtgaggaaaatgattgacaaagcccaacaatgatctcaggaattacattttccaacagaccaaaaaatgttttcatgtagcagcaatgcagatttggtgaatatttaatatatattttagtatgtatttcactttatgactgacaattaaaaaatattgtttggccaaatagtaaacacccttttgaaaccatgaaaaaaaaaaaaaaaaa

SEQ ID NO: 4626 - DNA, 3218 bp, Homo sapiens; identical to SEQ ID NO: 117

SEQ ID NO: 4627 - DNA, 3293 bp, Homo sapiens; identical to SEQ ID NO: 2378

SEQ ID NO: 4628 - DNA, 4797 bp, Homo sapiens; identical to SEQ ID NO: 2514

SEQ ID NO: 4629 - DNA, 8340 bp, Homo sapiens
actaattttctggagtttctgcccctgctctgcgtcagccctcacgtcacttcgccagcagtagcagaggcggcggcggcggctcccggaattgggttggagcaggagcctcgctggctgcttcgctcgcgctctacgcgctcagtccccggcggtagcaggagcctggacccaggcgccgccggcgggcgtgaggcgccggagcccggcctcgaggtgcataccggacccccattcgcatctaacaaggaatctgcgccccagagagtcccgggagcgccgccggtcggtgcccggcgcgccgggccatgcagcgacggccgccgcggagctccgagcagcggtagcgcccccctgtaaagcggttcgctatgccggggccactgtgaaccctgccgcctgccggaacactcttcgctccggaccagctcagcctctgataagctggactcggcacgcccgcaacaagcaccgaggagttaagagagccgcaagcgcagggaaggcctccccgcacgggtgggggaaagcggccggtgcagcgcggggacaggcactcgggctggcactggctgctagggatgtcgtcctggataaggtggcatggacccgccatggcgcggctctggggcttctgctggctggttgtgggcttctggagggccgctttcgcctgtcccacgtcctgcaaatgcagtgcctctcggatctggtgcagcgacccttctcctggcatcgtggcatttccgagattggagcctaacagtgtagatcctgagaacatcaccgaaattttcatcgcaaaccagaaaaggttagaaatcatcaacgaagatgatgttgaagcttatgtgggactgagaaatctgacaattgtggattctggattaaaatttgtggctcataaagcatttctgaaaaacagcaacctgcagcacatcaattttacccgaaacaaactgacgagtttgtctaggaaacatttccgtcaccttgacttgtctgaactgatcctggtgggcaatccatttacatgctcctgtgacattatgtggatcaagactctccaagaggctaaatccagtccagacactcaggatttgtactgcctgaatgaaagcagcaagaatattcccctggcaaacctgcagatacccaattgtggtttgccatctgcaaatctggccgcacctaacctcactgtggaggaaggaaagtctatcacattatcctgtagtgtggcaggtgatccggttcctaatatgtattgggatgttggtaacctggtttccaaacatatgaatgaaacaagccacacacagggctccttaaggataactaacatttcatccgatgacagtgggaagcagatctcttgtgtggcggaaaatcttgtaggagaagatcaagattctgtcaacctcactgtgcattttgcaccaactatcacatttctcgaatctccaacctcagaccaccactggtgcattccattcactgtgaaaggcaaccccaaaccagcgcttcagtggttctataacggggcaatattgaatgagtccaaatacatctgtactaaaatacatgttaccaatcacacggagtaccacggctgcctccagctggataatcccactcacatgaacaatggggactacactctaatagccaagaatgagtatgggaaggatgagaaacagatttctgctcacttcatgggctggcctggaattgacgatggtgcaaacccaaattatcctgatgtaatttatgaagattatggaactgcagcgaatgacatcggggacaccacgaacagaagtaatgaaatcccttccacagacgtcactgataaaaccggtcgggaacatctctcggtctatgctgtggtggtgattgcgtctgtggtgggattttgccttttggtaatgctgtttctgcttaagttggcaagacactccaagtttggcatgaaagatttctcatggtttggatttgggaaagtaaaatcaagacaaggtgttggcccagcctccgttatcagcaatgatgatgactctgccagcccactccatcacatctccaatgggagtaacactccatcttcttcggaaggtggcccagatgctgtcattattggaatgaccaagatccctgtcattgaaaatccccagtactttggcatcaccaacagtcagctcaagccagacacatggcccagaggttcccccaagaccgcctgataataatttggtatttggaggctcctgtgtcactgcaggaactaaaggaggctaaatccatgcctgatggaggagaagagttctatggttatctgcaaattctggccagacaacatcttgacgtcactccttagcttccataacctagccaagcaagaagttgcctttccaagacaaagcagtgtgctctaatgactaacccctcaaagtactatgccactttaactatagacccatctcctcgatcaatcaggatggcaagatggagctgaggagctcagcaacatcaagtctggagttggtctttaactcaactagctcgtttagacgtgtctgaacaccacatcacctgacagcacggggtggtttcccagtaaaatttacaaactcagctcaagggcagctgtgttgctttcctttccttgactgctgagaaactttttgacagggaacaatggaaacacaccttctgagctgaaacaaacaaacagaaacaaaacatactaaccagcaaaatccccaaatcatcaatcttgggttctcttgaagggcaggagtgtgttttatcttctcccgtcggagcaaacactatagatgtcctccctaaaattctgtcttccctagagcagccttgtaaattagctagggtcctagggttgaggcctaaatcaacttaaaattgtctctaaatatgtacctggatgtgtttgtacttgcagagcatgccctcttcatgtgcctagggctagtaactccctgtggcagaggcatgtaaagtattctgactttttttttttcaacttaattccatttccaatgaaatggatttttaaaaattttctccagagtgtgccatacttctccagctattatagttaatgtgtgtgtatccttgtgtatatgtgtgtttgtgtgtgcatatgtgttttcctagtggttacatgcttactaggcaattatgtaaataagcacagattcataggccagctaggcctgaggaaagaagacattataaagggagggagtattttaacattagctaaagctatcacacaaggcacccattctgctcccctcaacagccacagcccacttcgtccttgtcttaccaataaggggaaaggctggaggtgatatttttcacagaaccgcagaggttttgaacatatttgcaacattactttgagtacacatgagcaaaaattctgaattacatccaggaccccagaagctcattagatcaaagagtgcggggcccctcagagttaccagagattatctgcagacttcagtgcaatcgaatgaccatggtccattttgatggtcagaggtaggactgaaaaacgggtagaaacaattgctttagcgcttccttctgtactttgcctattaatgttttgtctttcaaaaatatattttctcctaattgtttaattggccaaataatggctgctttgggagttgtttgtatgccttggaaggccatggcctgcactttaaaaataagctaagtccattctgcccagcacgagcattaggacagagaatgcacttattttaggatccttaaaaattgcttcttttatggcacactgggttgacgactcatctcgtgggagccttcatggcacattgctgctgttctgcaggtcccaatacaattccttccccctctcagtgccacggcccccccattgctagctacaacaatttgatatcatattcccttttcaactccaaaggagatgataagaagctatcaaataatgctttaaaaaagcaacttgagtttcttaaaagaaaggaaatgaatacatgctgcataattacatttaaaatgtaagccatgttattataagccgcactgagatgaagatttgttagcaaaccagtttcaagcacactcacagtgaagtaaaatcatgtttttagcatctgaccattgggtaatattattctttgttatcaaaagagaaatatcacccaagtatagtatacttagacctcctagaggaaacactccagtcctaagcttggtgtctgaaaagaaaaacaaaaataaagattatggatttaggtcagggagacagagtgatattctgaagactgtgtttactccctcatcatcggccaaccaagatggagttctgcatcctgcacatatcagacatttcagtccaatttcaccaaagcatcagtgatgttctagaagcatcccagcagatggaggatcctaatgtatttgttctgggtatttcccaaggcccagcctgactggagtgtgtgtaccaacaggatgaatccaatcaagctacgcccccattttggtttcggattggccactcttgcatgtgctagtagattgtggaccaggaccagctgagcaaacacagttgcagagtagcctcctatgttgctaagaagctcctgctacccaggtgctttgaacaattgagtgctccctctggttaagtagagatggcaccaccggagtttttcttggatgtgaggctcaatcctttacggcagctattataacaaagtgaaggttttctccctgggaaatgcagcttttctctgtctttactaattctgccagcctgtgagagtaaccaccgtagctgggcttcttctcagattaattgtcatgccaggtctccttcctggggagctgtgatgctgctctgaggttgattgctgaggttgtagtgggtttttgtttgtttttgtttagtttttcttgattgttcttctttctcttgaatggcaagagaagaaacactttctctaacccacggccaggaaggaaatggggagagagctacttcttagttcaacctggttgccacataaaggaatctctctccttggactcagcccctaactggaagcaagagccactgccctctgagactgagagagcagcccgaggaggagatgaatccattctgccctttgtttgggtttgcttcctgtcagtgagagaatgctgaggcagttcctgttatgtgaaactttcatttttaaaaccaggacagtcctaaacagactggaatgagttggtcaatcccagttggtataggcccaatgatttttgctagtaagataggattgtcttcctcacccaaaatgccttcaagtgccctaaaatgggtattttaaaataagaataaataatgtagatttagtagaaaacctggaaaacataagaaacaaagatgaaacgaaaagtcccatgtaattccaccagttagagttaaccactgatatcgtttggatatatggctttctagtcttgtggatatccttttaatctcttgtaatataaagtctgaccatatgtgtccttgcatttgtttgtactggactctgttaatatttctatagtaatggctcactttggggagattgtgctgcacagtgtgtaggaagcacattgggtgtattattcccagttttgtattttgtatttccttggagatgtgcaggggttaagagcgggggtctggccatagctggccacgtcagactctcatatggtaagtatcacagagcacatgaggcctgtgttatgcgctggaaagactcaggaaatgagaggctctcttgttctgacaaggcaggctgagagctctcatttagggtcatcactccagataactccaaatgcagtttattgctcaactgaagcagatgatcactttttgcctccaagttcttcaccctagctagctcctttcaaagagccgagtatgctggatcttaaagggccaaactagttacatctcatacatttcctgatgtttagggatgccttcacttccatcaaggataccttggctgtgcaaggacctctgatagctggagtctccttttggtcactcccagctttgcttaaacttgatggagtttgctgtccagtgatccccggatctttcatcatgaaagccttccttcctctcctgatgtctcaggcctctagacctagactggggttctggcaaggaggcctctatcaatagtatgacatccaataatatgttagtgttgatattttgcacagtaatattaagtttaagagattataaaaatgagttcaaatgaataagttcctgtgatgtaagagattagatatgtgtgatttcagaaccaaaggcaggggggaatcccagaaagaaaacaataatataatcctagtttctatatattatttttattcattactgtatatgggtagagatcaatattctttcttatgctgttactattaattaacacattttttaaccatgccattgaacttttgggtgcattaaagtggaacccaagctcctcattagataataatggcatttggactgagtgccatattcctaaatttccaataaagtggttgatatagagaggacaggataaagccctatagtgtgcagttatatcaaaacagctagtctccactttagggaatgcctttactagagattacatgaaatgtctgcttataaaataagcagagatggcaccactaagcagccacctgaattgttttcctacaggaatgattacttttcagatccatttatgttttcatgctcaatacttactccccttccctgcaacacccaaagagtttacttttgcaagtcatttggtcttcagtctactactgaggaatagagaggcactaactgctttacccaggatcagaactcatgttcttaccttctattaatagagtacttgagccagatggactaactggtctcacattttctctatcttggttttacttccataaacatcaatatctttacccacatgatttttccatcctcccatttttttccatatgtattagggttcaggaactatgatgctaatgatcacatttcttcctagttcctaatttcattagtgccatttcctgatatctacagaaacaattatcaatacatgtagctgcttgagccttatttagaaggctagcctttcttttccaagtgctgtcagaatgtatacatttagtctgtctttttcccttttaggagtctttgttctgggttgatggcaaaattcctctttttacatgtgagatttttgatttcactgaattctacctagatttttatggacattggattttaaagaggaaaacactcattttcttagtaagatattggtgatacatagctatgccattgatttccatactcctgagctttggggagggagacagtggccaagtagcaggcagaataagatcatcactcatgtcctgaatcaatcacactttccttctcggattgtgtatatgctctgccacttcctacatattacatcctgagtttttaagtaaagtggatcttagccagatttgagtctaatggctgattcatcggcatagttcttggcgttaacatctcagtgtcctctttagttctctttgaggattcatgtcattgagggcctttgtgcctccacttgtctcagtatgaggaagaactttggtgtgagggcggagctatgtgaagggttgctgggttgggggattagttcatatggtccccatgccatctatttacttttggagagaggggactttgagtgggtgggtatggatagatgttcctcaaggaaaccctgctggctaatgggcactacatctgtgtattactgtgattctctctgtaagctccccatgtggccaaggacccccctcctaccagggcacttcctgccacctcattgcactggtctcaaccattcagcctgctgctgctgcaccatgttgggctgcggtaggatagggaaggggttctgttgattgctaaatgttgcctaactttatttccctctcccacatttcatgcaagggagcggacctaacacatgacttgcattctcttcctatgttcagaaactccagggcttgcccacgtgtatgtatgagtgaccaatggagcttggaattctttatctatatgatctgtccgaaaatgagatcttttgtactggaatttgtgatgtagttgatcattcagagccaaacgcatataccaataaagacaagactgtcatataaaaaaaaaaaaaaaaa

SEQ ID NO: 4630 - DNA, 8292 bp, Homo sapiens
actaattttctggagtttctgcccctgctctgcgtcagccctcacgtcacttcgccagcagtagcagaggcggcggcggcggctcccggaattgggttggagcaggagcctcgctggctgcttcgctcgcgctctacgcgctcagtccccggcggtagcaggagcctggacccaggcgccgccggcgggcgtgaggcgccggagcccggcctcgaggtgcataccggacccccattcgcatctaacaaggaatctgcgccccagagagtcccgggagcgccgccggtcggtgcccggcgcgccgggccatgcagcgacggccgccgcggagctccgagcagcggtagcgcccccctgtaaagcggttcgctatgccggggccactgtgaaccctgccgcctgccggaacactcttcgctccggaccagctcagcctctgataagctggactcggcacgcccgcaacaagcaccgaggagttaagagagccgcaagcgcagggaaggcctccccgcacgggtgggggaaagcggccggtgcagcgcggggacaggcactcgggctggcactggctgctagggatgtcgtcctggataaggtggcatggacccgccatggcgcggctctggggcttctgctggctggttgtgggcttctggagggccgctttcgcctgtcccacgtcctgcaaatgcagtgcctctcggatctggtgcagcgacccttctcctggcatcgtggcatttccgagattggagcctaacagtgtagatcctgagaacatcaccgaaattttcatcgcaaaccagaaaaggttagaaatcatcaacgaagatgatgttgaagcttatgtgggactgagaaatctgacaattgtggattctggattaaaatttgtggctcataaagcatttctgaaaaacagcaacctgcagcacatcaattttacccgaaacaaactgacgagtttgtctaggaaacatttccgtcaccttgacttgtctgaactgatcctggtgggcaatccatttacatgctcctgtgacattatgtggatcaagactctccaagaggctaaatccagtccagacactcaggatttgtactgcctgaatgaaagcagcaagaatattcccctggcaaacctgcagatacccaattgtggtttgccatctgcaaatctggccgcacctaacctcactgtggaggaaggaaagtctatcacattatcctgtagtgtggcaggtgatccggttcctaatatgtattgggatgttggtaacctggtttccaaacatatgaatgaaacaagccacacacagggctccttaaggataactaacatttcatccgatgacagtgggaagcagatctcttgtgtggcggaaaatcttgtaggagaagatcaagattctgtcaacctcactgtgcattttgcaccaactatcacatttctcgaatctccaacctcagaccaccactggtgcattccattcactgtgaaaggcaaccccaaaccagcgcttcagtggttctataacggggcaatattgaatgagtccaaatacatctgtactaaaatacatgttaccaatcacacggagtaccacggctgcctccagctggataatcccactcacatgaacaatggggactacactctaatagccaagaatgagtatgggaaggatgagaaacagatttctgctcacttcatgggctggcctggaattgacgatggtgcaaacccaaattatcctgatgtaatttatgaagattatggaactgcagcgaatgacatcggggacaccacgaacagaagtaatgaaatcccttccacagacgtcactgataaaaccggtcgggaacatctctcggtctatgctgtggtggtgattgcgtctgtggtgggattttgccttttggtaatgctgtttctgcttaagttggcaagacactccaagtttggcatgaaaggcccagcctccgttatcagcaatgatgatgactctgccagcccactccatcacatctccaatgggagtaacactccatcttcttcggaaggtggcccagatgctgtcattattggaatgaccaagatccctgtcattgaaaatccccagtactttggcatcaccaacagtcagctcaagccagacacatggcccagaggttcccccaagaccgcctgataataatttggtatttggaggctcctgtgtcactgcaggaactaaaggaggctaaatccatgcctgatggaggagaagagttctatggttatctgcaaattctggccagacaacatcttgacgtcactccttagcttccataacctagccaagcaagaagttgcctttccaagacaaagcagtgtgctctaatgactaacccctcaaagtactatgccactttaactatagacccatctcctcgatcaatcaggatggcaagatggagctgaggagctcagcaacatcaagtctggagttggtctttaactcaactagctcgtttagacgtgtctgaacaccacatcacctgacagcacggggtggtttcccagtaaaatttacaaactcagctcaagggcagctgtgttgctttcctttccttgactgctgagaaactttttgacagggaacaatggaaacacaccttctgagctgaaacaaacaaacagaaacaaaacatactaaccagcaaaatccccaaatcatcaatcttgggttctcttgaagggcaggagtgtgttttatcttctcccgtcggagcaaacactatagatgtcctccctaaaattctgtcttccctagagcagccttgtaaattagctagggtcctagggttgaggcctaaatcaacttaaaattgtctctaaatatgtacctggatgtgtttgtacttgcagagcatgccctcttcatgtgcctagggctagtaactccctgtggcagaggcatgtaaagtattctgactttttttttttcaacttaattccatttccaatgaaatggatttttaaaaattttctccagagtgtgccatacttctccagctattatagttaatgtgtgtgtatccttgtgtatatgtgtgtttgtgtgtgcatatgtgttttcctagtggttacatgcttactaggcaattatgtaaataagcacagattcataggccagctaggcctgaggaaagaagacattataaagggagggagtattttaacattagctaaagctatcacacaaggcacccattctgctcccctcaacagccacagcccacttcgtccttgtcttaccaataaggggaaaggctggaggtgatatttttcacagaaccgcagaggttttgaacatatttgcaacattactttgagtacacatgagcaaaaattctgaattacatccaggaccccagaagctcattagatcaaagagtgcggggcccctcagagttaccagagattatctgcagacttcagtgcaatcgaatgaccatggtccattttgatggtcagaggtaggactgaaaaacgggtagaaacaattgctttagcgcttccttctgtactttgcctattaatgttttgtctttcaaaaatatattttctcctaattgtttaattggccaaataatggctgctttgggagttgtttgtatgccttggaaggccatggcctgcactttaaaaataagctaagtccattctgcccagcacgagcattaggacagagaatgcacttattttaggatccttaaaaattgcttcttttatggcacactgggttgacgactcatctcgtgggagccttcatggcacattgctgctgttctgcaggtcccaatacaattccttccccctctcagtgccacggcccccccattgctagctacaacaatttgatatcatattcccttttcaactccaaaggagatgataagaagctatcaaataatgctttaaaaaagcaacttgagtttcttaaaagaaaggaaatgaatacatgctgcataattacatttaaaatgtaagccatgttattataagccgcactgagatgaagatttgttagcaaaccagtttcaagcacactcacagtgaagtaaaatcatgtttttagcatctgaccattgggtaatattattctttgttatcaaaagagaaatatcacccaagtatagtatacttagacctcctagaggaaacactccagtcctaagcttggtgtctgaaaagaaaaacaaaaataaagattatggatttaggtcagggagacagagtgatattctgaagactgtgtttactccctcatcatcggccaaccaagatggagttctgcatcctgcacatatcagacatttcagtccaatttcaccaaagcatcagtgatgttctagaagcatcccagcagatggaggatcctaatgtatttgttctgggtatttcccaaggcccagcctgactggagtgtgtgtaccaacaggatgaatccaatcaagctacgcccccattttggtttcggattggccactcttgcatgtgctagtagattgtggaccaggaccagctgagcaaacacagttgcagagtagcctcctatgttgctaagaagctcctgctacccaggtgctttgaacaattgagtgctccctctggttaagtagagatggcaccaccggagtttttcttggatgtgaggctcaatcctttacggcagctattataacaaagtgaaggttttctccctgggaaatgcagcttttctctgtctttactaattctgccagcctgtgagagtaaccaccgtagctgggcttcttctcagattaattgtcatgccaggtctccttcctggggagctgtgatgctgctctgaggttgattgctgaggttgtagtgggtttttgtttgtttttgtttagtttttcttgattgttcttctttctcttgaatggcaagagaagaaacactttctctaacccacggccaggaaggaaatggggagagagctacttcttagttcaacctggttgccacataaaggaatctctctccttggactcagcccctaactggaagcaagagccactgccctctgagactgagagagcagcccgaggaggagatgaatccattctgccctttgtttgggtttgcttcctgtcagtgagagaatgctgaggcagttcctgttatgtgaaactttcatttttaaaaccaggacagtcctaaacagactggaatgagttggtcaatcccagttggtataggcccaatgatttttgctagtaagataggattgtcttcctcacccaaaatgccttcaagtgccctaaaatgggtattttaaaataagaataaataatgtagatttagtagaaaacctggaaaacataagaaacaaagatgaaacgaaaagtcccatgtaattccaccagttagagttaaccactgatatcgtttggatatatggctttctagtcttgtggatatccttttaatctcttgtaatataaagtctgaccatatgtgtccttgcatttgtttgtactggactctgttaatatttctatagtaatggctcactttggggagattgtgctgcacagtgtgtaggaagcacattgggtgtattattcccagttttgtattttgtatttccttggagatgtgcaggggttaagagcgggggtctggccatagctggccacgtcagactctcatatggtaagtatcacagagcacatgaggcctgtgttatgcgctggaaagactcaggaaatgagaggctctcttgttctgacaaggcaggctgagagctctcatttagggtcatcactccagataactccaaatgcagtttattgctcaactgaagcagatgatcactttttgcctccaagttcttcaccctagctagctcctttcaaagagccgagtatgctggatcttaaagggccaaactagttacatctcatacatttcctgatgtttagggatgccttcacttccatcaaggataccttggctgtgcaaggacctctgatagctggagtctccttttggtcactcccagctttgcttaaacttgatggagtttgctgtccagtgatccccggatctttcatcatgaaagccttccttcctctcctgatgtctcaggcctctagacctagactggggttctggcaaggaggcctctatcaatagtatgacatccaataatatgttagtgttgatattttgcacagtaatattaagtttaagagattataaaaatgagttcaaatgaataagttcctgtgatgtaagagattagatatgtgtgatttcagaaccaaaggcaggggggaatcccagaaagaaaacaataatataatcctagtttctatatattatttttattcattactgtatatgggtagagatcaatattctttcttatgctgttactattaattaacacattttttaaccatgccattgaacttttgggtgcattaaagtggaacccaagctcctcattagataataatggcatttggactgagtgccatattcctaaatttccaataaagtggttgatatagagaggacaggataaagccctatagtgtgcagttatatcaaaacagctagtctccactttagggaatgcctttactagagattacatgaaatgtctgcttataaaataagcagagatggcaccactaagcagccacctgaattgttttcctacaggaatgattacttttcagatccatttatgttttcatgctcaatacttactccccttccctgcaacacccaaagagtttacttttgcaagtcatttggtcttcagtctactactgaggaatagagaggcactaactgctttacccaggatcagaactcatgttcttaccttctattaatagagtacttgagccagatggactaactggtctcacattttctctatcttggttttacttccataaacatcaatatctttacccacatgatttttccatcctcccatttttttccatatgtattagggttcaggaactatgatgctaatgatcacatttcttcctagttcctaatttcattagtgccatttcctgatatctacagaaacaattatcaatacatgtagctgcttgagccttatttagaaggctagcctttcttttccaagtgctgtcagaatgtatacatttagtctgtctttttcccttttaggagtctttgttctgggttgatggcaaaattcctctttttacatgtgagatttttgatttcactgaattctacctagatttttatggacattggattttaaagaggaaaacactcattttcttagtaagatattggtgatacatagctatgccattgatttccatactcctgagctttggggagggagacagtggccaagtagcaggcagaataagatcatcactcatgtcctgaatcaatcacactttccttctcggattgtgtatatgctctgccacttcctacatattacatcctgagtttttaagtaaagtggatcttagccagatttgagtctaatggctgattcatcggcatagttcttggcgttaacatctcagtgtcctctttagttctctttgaggattcatgtcattgagggcctttgtgcctccacttgtctcagtatgaggaagaactttggtgtgagggcggagctatgtgaagggttgctgggttgggggattagttcatatggtccccatgccatctatttacttttggagagaggggactttgagtgggtgggtatggatagatgttcctcaaggaaaccctgctggctaatgggcactacatctgtgtattactgtgattctctctgtaagctccccatgtggccaaggacccccctcctaccagggcacttcctgccacctcattgcactggtctcaaccattcagcctgctgctgctgcaccatgttgggctgcggtaggatagggaaggggttctgttgattgctaaatgttgcctaactttatttccctctcccacatttcatgcaagggagcggacctaacacatgacttgcattctcttcctatgttcagaaactccagggcttgcccacgtgtatgtatgagtgaccaatggagcttggaattctttatctatatgatctgtccgaaaatgagatcttttgtactggaatttgtgatgtagttgatcattcagagccaaacgcatataccaataaagacaagactgtcatataaaaaaaaaaaaaaaaa

SEQ ID NO: 4631 - DNA, 1023 bp, Homo sapiens
atggacaagttttggtggcacgcagcctggggactctgcctcgtgccgctgagcctggcgcagatcgatttgaatataacctgccgctttgcaggtgtattccacgtggagaaaaatggtcgctacagcatctctcggacggaggccgctgacctctgcaaggctttcaatagcaccttgcccacaatggcccagatggagaaagctctgagcatcggatttgagacctgcaggtatgggttcatagaagggcacgtggtgattccccggatccaccccaactccatctgtgcagcaaacaacacaggggtgtacatcctcacatccaacacctcccagtatgacacatattgcttcaatgcttcagctccacctgaagaagattgtacatcagtcacagacctgcccaatgcctttgatggaccaattaccataactattgttaaccgtgatggcacccgctatgtccagaaaggagaatacagaacgaatcctgaagacatctaccccagcaaccctactgatgatgacgtgagcagcggctcctccagtgaaaggagcagcacttcaggaggttacatcttttacaccttttctactgtacaccccatcccagacgaagacagtccctggatcaccgacagcacagacagaatccctgctaccagacactcacatgggagtcaagaaggtggagcaaacacaacctctggtcctataaggacaccccaaattccagaatggctgatcatcttggcatccctcttggccttggctttgattcttgcagtttgcattgcagtcaacagtcgaagaaggtgtgggcagaagaaaaagctagtgatcaacagtggcaatggagctgtggaggacagaaagccaagtggactcaacggagaggccagcaagtctcaggaaatggtgcatttggtgaacaaggagtcgtcagaaactccagaccagtttatgacagctgatgagacaaggaacctgcagaatgtggacatgaagattggggtgtaa

SEQ ID NO: 4632 - DNA, 4841 bp, Homo sapiens
atctcggctccaccgcacccttcgcgggaagtccccaggcttccagcaaagctcagcttatcccgcccccgcttccaacccggaaccccagaagaacagcatgatgagcctccggcagccaggtgggccacctccccgcggctcagtttgaggacacttgtgcggaaccctttcacatccccaccctacccagctttcacaactccgccgggttaaatggccaaagacaaacttctacctctcctgtccccggtcccagcttttcaaaaacccacagctggcgaacccacacacatcgaaactcctaggtcgctgttgcagtctgggcatgctcagtatcagggctgcccctccaagagcggaggcagcgagagtacgcgtgtgcctcgcgccggtccacgcggggagagcactggggaccgagacccggcaccacctcccggtccgccctccagggaaaacgggaaaactagcaagagctagcaagaactagcaagagcttgaacaaacgcctggactcagattggaagactgctcatttgtctactgcctcattcctggaaattgcactggaactgtctgattaagaaaaacagaataattctgaaagaaagaaaacaaagaaaaacatactccagaattcctaatagaacacttcacctgaacctaaaatggtgagcgagagtcaccatgaggccctggcagccccgcctgtcaccactgtcgcgactgttctgccaagcaacgccacagagccagccagtcctggagaaggaaaggaagatgcattttctaagctgaaggagaagtttatgaatgagttgcataaaattccattgccaccgtgggccttaattgcaatagccatagtcgcagtccttttagtcctgacctgctgcttttgtatctgtaagaaatgtttgttcaaaaagaaaaacaagaagaagggaaaggaaaaaggagggaagaatgccattaacatgaaagatgtaaaagacttagggaagacgatgaaagatcaggccctcaaggatgatgatgctgaaactggattgacagatggagaagaaaaagaagaacccaaagaagaggagaaactgggaaaacttcagtattcactggattatgatttccaaaataaccagctgctggtagggatcattcaggctgccgaactgcccgccttggacatggggggcacatctgatccttacgtgaaagtgtttctgctacctgataagaagaagaaatttgagacaaaagtccaccgaaaaacccttaatcctgtcttcaatgagcaatttactttcaaggtaccatactcggaattgggtggcaaaaccctagtgatggctgtatatgattttgatcgtttctctaagcatgacatcattggagaatttaaagtccctatgaacacagtggattttggccatgtaactgaggaatggcgtgacctgcaaagtgctgagaaggaagagcaagagaaattgggtgatatctgcttctcccttcgctacgtacctactgctggtaagctgactgttgtcattctggaggcaaagaacctgaagaagatggatgtgggtggcttatccgatccttatgtgaagattcatctgatgcagaatggtaagaggctgaagaagaaaaagacaacaattaaaaagaacacacttaacccctactacaatgagtcattcagctttgaagtaccttttgaacaaatccagaaagtgcaggtggtggtaactgttttggactatgacaagattggcaagaacgatgccatcggcaaagtctttgtgggctacaacagcaccggcgcggagctgcgacactggtcagacatgctggccaaccccaggcgacctattgcccagtggcacaccctgcaggtagaggaggaagttgatgccatgctggccgtcaagaagtaaaggaaagaagaagcctttctgcatttgcccatatagtgctctttagccagtatctgtaaatacctcagtaatatgggtcctttcatttttccagccatgcattcctaacacaattcagtggtacttggaatcctgttttaatttgcacaaatttaaatgtagagagcccctaagtccttcatcataccactgccctccaaatctactcttcttttaagcaatatgatgtgtagatagagcatgaatgaaattatttattgtatcacactgttgtatataccagtatgctaaagatttatttctagtttgtgtatttgtatgttgtaagcgtttcctaatctgtgtatatctagatgtttttaataagatgttctattttaaactatgtaaattgactgagatataggagagctgataatatattatacggtaaatatagtatcgtctgcattccagcaaaaatatcaactcgtaaggcactagtacagttaaactgacatcttaaaggacaacttaaacctgagctttctattgaatcatttgagtaccaagataaacttacaccacatacttggtgggtgaatccaattttgtagaattcctacacaggcaaaatagcatgatctgagcagcagcatccaggctgacctcaaggaagcatagccacaaaacagaatagcacctgtctgtacatatttacaaagctaaaataatggcttcactcttatatttgaggaagcaactgaacaggagtcaatgatttcatattactgcatatagaataacaacaaggtgttccgtgtgtgtgtgtgtgtgtgtgtgtgtgtgtgtgtgcacatttgtttggggatgggggagaagaagctaaggggagaagtcaacatttatgaaatattgcctgactatttaaaaagaaaaaagtagctctccattatcacctttatacaaaatgtacatcctgtgaattctgttccagatttcacacctacaataattccaaaaggtttgcacattagagtttgtaacaaaatattttattatataaaaccaggttagaaggaatgcaggatatttttaacacaacaatctgtgcttattacacaaaattactttgtggtaaacagacagtattgtaatcccatcaaaagatgaaagaaaaacaaaaacaaaaaccaacaacaattagccatagttctgaatgcacttcaattaagccaaaacagacagctagtgatctttttatatgctctttttacttaagttttaatttgtcctttaaaaaaaggtgaaacaaaccaagaacaagttctagaaaactgaagcaacctcttatgtatactagatgcttgatttaggaggagtttttaaacgttttcaatgttattatgtagtaaatgacactattatgaagctactagtcattccataagagtcttaaaggactgctctgtgtaacactgtgactgccgtgtgtgcttagacccgtagtttcctcagtggatagcactcaatttattccgtagtgatattgtaacaatactgccattcccttctactgcactgcccaaggtgtgtgtagcacaaacagttctcattacaaaggaccaattcagaactgaaaagctatgcataggacaaggaagatacatagaatggggtggaacacagcattttgtcaagcactgtgcaatattccatatttttccccactatggtagacaaccatttcgtggaagggcagcctattatcccacactgcatctagccttttgtcccattcacttctgtgatccattttaatttccaggccacaagacagtagtgatgctctgaaatgaaagtttgtcttcacaaatatcaaaacaaaatggaggaaaactaagcattggcctcatgttcagtcttcaggatatcacaccacgtcttttcaaaaactaaagagaattcaaaaagggctgatggtaggctttgaacatggggttggctgtttcccagtaaaactggaattcctgtcgttactgtttccttatcaaagaaggggcaagctcttttgccttttaggccagacatagcaaacgctttataattggcatagacataaaggataaaaggaaaataaccgtctgccgatggtccgtacttcttaaaaaacataggtaatagaaaatatacacaagtcagaatgtgaaattaaataatggtttgaacagaaaattcaaacaagactctttccaatttaaagggccaaaccctaccaaagagagggagttgactggcttttaaaaagtatttaaataccacaaatgacatttaatttcactgtattcagctttaagttgttcacaatgaaaccacactttcaaacaagcaggttcaagctgctgaatagacattatttcttgcattaaaataccactaatgcattctcttgcaacactgccagacatgggattgtcaccatagaattagttggtactatgccatctttcactctttcacaagtcagtgatggaacctgctttatgaccaagattcatcctcaaataagccacatgtacccttctgacaaagctgtgtaaagtattagaatctgatgctctagaaagatcctagttgcctttgtgtatatttactgcctgcttgagtgtttctatgtgtgggttttccctgtatcttgtagaaatgttggggtgttttcctctgccatatggctcgtggcctgcgagccaactatttcagctgtattttaccttcatttttgatgaggtgatttaaattttgtttcactttgtgtagtgaattccacagtagttttctgattgttgttaaaaatgacttaacatattacacagatattcaataaaaatgttttatttcctgttgaaaaaaaaaaaaaaaaaa

SEQ ID NO: 4633 - DNA, 4827 bp, Homo sapiens; identical to SEQ ID NO: 2430

SEQ ID NO: 4634 - DNA, 4427 bp, Homo sapiens
accaccaagaataaaatagttgtttgtcccctacagtagaacaagtttgcccattcatccttgtgatagatatgcatgcaaaaccaaaatgaaatcaaatccccacagatggctcgtaagtcaaaaacactgtttaattctttcactgcatccctttgggaagcctggcccttgaaaaacagaataattctgaaagaaagaaaacaaagaaaaacatactccagaattcctaatagaacacttcacctgaacctaaaatggtgagcgagagtcaccatgaggccctggcagccccgcctgtcaccactgtcgcgactgttctgccaagcaacgccacagagccagccagtcctggagaaggaaaggaagatgcattttctaagctgaaggagaagtttatgaatgagttgcataaaattccattgccaccgtgggccttaattgcaatagccatagtcgcagtccttttagtcctgacctgctgcttttgtatctgtaagaaatgtttgttcaaaaagaaaaacaagaagaagggaaaggaaaaaggagggaagaatgccattaacatgaaagatgtaaaagacttagggaagacgatgaaagatcaggccctcaaggatgatgatgctgaaactggattgacagatggagaagaaaaagaagaacccaaagaagaggagaaactgggaaaacttcagtattcactggattatgatttccaaaataaccagctgctggtagggatcattcaggctgccgaactgcccgccttggacatggggggcacatctgatccttacgtgaaagtgtttctgctacctgataagaagaagaaatttgagacaaaagtccaccgaaaaacccttaatcctgtcttcaatgagcaatttactttcaaggtaccatactcggaattgggtggcaaaaccctagtgatggctgtatatgattttgatcgtttctctaagcatgacatcattggagaatttaaagtccctatgaacacagtggattttggccatgtaactgaggaatggcgtgacctgcaaagtgctgagaaggaagagcaagagaaattgggtgatatctgcttctcccttcgctacgtacctactgctggtaagctgactgttgtcattctggaggcaaagaacctgaagaagatggatgtgggtggcttatccgatccttatgtgaagattcatctgatgcagaatggtaagaggctgaagaagaaaaagacaacaattaaaaagaacacacttaacccctactacaatgagtcattcagctttgaagtaccttttgaacaaatccagaaagtgcaggtggtggtaactgttttggactatgacaagattggcaagaacgatgccatcggcaaagtctttgtgggctacaacagcaccggcgcggagctgcgacactggtcagacatgctggccaaccccaggcgacctattgcccagtggcacaccctgcaggtagaggaggaagttgatgccatgctggccgtcaagaagtaaaggaaagaagaagcctttctgcatttgcccatatagtgctctttagccagtatctgtaaatacctcagtaatatgggtcctttcatttttccagccatgcattcctaacacaattcagtggtacttggaatcctgttttaatttgcacaaatttaaatgtagagagcccctaagtccttcatcataccactgccctccaaatctactcttcttttaagcaatatgatgtgtagatagagcatgaatgaaattatttattgtatcacactgttgtatataccagtatgctaaagatttatttctagtttgtgtatttgtatgttgtaagcgtttcctaatctgtgtatatctagatgtttttaataagatgttctattttaaactatgtaaattgactgagatataggagagctgataatatattatacggtaaatatagtatcgtctgcattccagcaaaaatatcaactcgtaaggcactagtacagttaaactgacatcttaaaggacaacttaaacctgagctttctattgaatcatttgagtaccaagataaacttacaccacatacttggtgggtgaatccaattttgtagaattcctacacaggcaaaatagcatgatctgagcagcagcatccaggctgacctcaaggaagcatagccacaaaacagaatagcacctgtctgtacatatttacaaagctaaaataatggcttcactcttatatttgaggaagcaactgaacaggagtcaatgatttcatattactgcatatagaataacaacaaggtgttccgtgtgtgtgtgtgtgtgtgtgtgtgtgtgtgtgtgcacatttgtttggggatgggggagaagaagctaaggggagaagtcaacatttatgaaatattgcctgactatttaaaaagaaaaaagtagctctccattatcacctttatacaaaatgtacatcctgtgaattctgttccagatttcacacctacaataattccaaaaggtttgcacattagagtttgtaacaaaatattttattatataaaaccaggttagaaggaatgcaggatatttttaacacaacaatctgtgcttattacacaaaattactttgtggtaaacagacagtattgtaatcccatcaaaagatgaaagaaaaacaaaaacaaaaaccaacaacaattagccatagttctgaatgcacttcaattaagccaaaacagacagctagtgatctttttatatgctctttttacttaagttttaatttgtcctttaaaaaaaggtgaaacaaaccaagaacaagttctagaaaactgaagcaacctcttatgtatactagatgcttgatttaggaggagtttttaaacgttttcaatgttattatgtagtaaatgacactattatgaagctactagtcattccataagagtcttaaaggactgctctgtgtaacactgtgactgccgtgtgtgcttagacccgtagtttcctcagtggatagcactcaatttattccgtagtgatattgtaacaatactgccattcccttctactgcactgcccaaggtgtgtgtagcacaaacagttctcattacaaaggaccaattcagaactgaaaagctatgcataggacaaggaagatacatagaatggggtggaacacagcattttgtcaagcactgtgcaatattccatatttttccccactatggtagacaaccatttcgtggaagggcagcctattatcccacactgcatctagccttttgtcccattcacttctgtgatccattttaatttccaggccacaagacagtagtgatgctctgaaatgaaagtttgtcttcacaaatatcaaaacaaaatggaggaaaactaagcattggcctcatgttcagtcttcaggatatcacaccacgtcttttcaaaaactaaagagaattcaaaaagggctgatggtaggctttgaacatggggttggctgtttcccagtaaaactggaattcctgtcgttactgtttccttatcaaagaaggggcaagctcttttgccttttaggccagacatagcaaacgctttataattggcatagacataaaggataaaaggaaaataaccgtctgccgatggtccgtacttcttaaaaaacataggtaatagaaaatatacacaagtcagaatgtgaaattaaataatggtttgaacagaaaattcaaacaagactctttccaatttaaagggccaaaccctaccaaagagagggagttgactggcttttaaaaagtatttaaataccacaaatgacatttaatttcactgtattcagctttaagttgttcacaatgaaaccacactttcaaacaagcaggttcaagctgctgaatagacattatttcttgcattaaaataccactaatgcattctcttgcaacactgccagacatgggattgtcaccatagaattagttggtactatgccatctttcactctttcacaagtcagtgatggaacctgctttatgaccaagattcatcctcaaataagccacatgtacccttctgacaaagctgtgtaaagtattagaatctgatgctctagaaagatcctagttgcctttgtgtatatttactgcctgcttgagtgtttctatgtgtgggttttccctgtatcttgtagaaatgttggggtgttttcctctgccatatggctcgtggcctgcgagccaactatttcagctgtattttaccttcatttttgatgaggtgatttaaattttgtttcactttgtgtagtgaattccacagtagttttctgattgttgttaaaaatgacttaacatattacacagatattcaataaaaatgttttatttcctgttgaaaaaaaaaaaaaaaaaa

SEQ ID NO: 4635 - DNA, 3827 bp, Homo sapiens
tatgatctcgtgaaatcttgagagaaactgaatgacgaatgaaactattgttcctgtttcacacagaagaaaactgaggttaaaaggggtaaagtaattttgcatggcatgaagtagaaattcaaagtacaggaatttgaacttggttctgtccttttctgaagcccttgaccactatagactcaaacatcaccttgtttttccactcattcaacacttttttttttaaattatctaataggttggcactcatcatgagcccctgttctcattctgcaaatggtgaagctctctattgtcctgaccccacagttcctgtcccatgaccagggccagctcaccaaggagctgcagcagcatgtaaagtcagtgacatgcccatgcgagtacctgaggaaggttatcaatactctggctgaccatcatcatcgtgggactgactttggtggaagtccttggttacatgtcattattgcgtttccgacaagttataaagttgtcattaccctctggatagtttacctttgggtgtctctcctgaagactatcttctggtctcgaaatggacatgatggatccacggatgtacagcagagagcctggaggtccaaccgccgtagacaggaagggctgaggtccatttgtatgcacacaaagaaaagagtttcttcctttcgaggaaataaaattggcctgaaagacgtcattactctacggagacatgtggaaacaaaagttagagctaaaatccgtaagaggaaggtgacaacgaaaatcaaccatcatgacaaaatcaatggaaagaggaagaccgccagaaaacagaaaatgtttcaacgtgcgcaagagttgcggcggcgagcagaggactaccacaaatgcaaaatccccccttctgcaagaaaggctctttgcaactgggtcagaatggcggcagcggagcatcgtcattcttcaggattgccctactggccctacctcacagctgaaactttaaaaaacaggatgggccaccagccacctcctccaactcaacaacattctataactgataactccctgagcctcaagacacctcccgagtgtctgctcactccccttccaccctcagcggatgataatctcaagacacctcccgagtgtgtgctcactccccttccaccctcagcggatgataatctcaagacacctcccgagtgtgtgctcactccccttccaccctcagcggatgataatctcaagacacctcctgagtgtctgctcactccccttccaccctcagcggatgataatctcaagacacctcccgagtgtctgctcactccccttccaccctcagctctaccctcagctccaccctcagcggatgataatctcaagacacgtgccgagtgtctgctccatccccttccaccctcagcggatgataatctcaagacaccttccgagcgtcagctcactccccttccaccctcagctccaccctcagcagatgataatatcaagacacctgccgagcgtctgcgggggccgcttccaccctcagcggatgataatctcaagacaccttccgagcgtcagctcactccccttccaccctcagctccaccctcagcagatgataatatcaagacacctgctgagcgtctgcgggggccgcttccaccctcagcggatgataatctcaagacaccttccgagcgtcagctcactccccttccaccctcagctccaccctcagcagatgataatatcaagacacctgccgagcgtctgcgggggccgcttccaccctcagcggatgataatctcaagacaccttccgagcgtcagctcactgcccttccaccctcagcagatgataatatcaagacacctgccgagcgtctgcgggggccgcttccaccctcagcggatgataatctcaagacaccttccgagcgtcagctcactccccttccaccctcagctccaccctcagcagatgataatatcaagacacctgccttccaccctcagcggatgatctcaagacaccttccgagcgtcagctcactccccttccaccctcagctccaccctcagcagatgataatatcaagatacctgctgagcgtctgcggattccgcttccaccatcagccgatgataatctcaagacaccttccgagcgtcagctcactccccttccaccctcagctccaccctcagcagatgataatatcaagacacctgccgagcgtctgcgggggccgcttccaccctgagcggatgataatctcaagacaccttccgagcgtcagctcactccccttccaccctcagctccaccctcagcagatgataatatcaagacacctgccgagcgtctgcgggggccgcttccaccctcagcagatgataatctcaagacaccttccgagcgtcagctcactccccttccaccctcagctccaccctcagcagatgataatatcaagacacctgccgagcgtctgcgggggccgcttccaccctcagcggatgataatctcaagacaccttccgagcgtcagctcactccccttccaccctcagctccaccctcagcagatgataatatcaagacacctgccgagcgtctgcgggggccgcttccaccctcagcagatgataatctcaagacaccttccgagcgtcagctcactccccttccaccctcagctccaccctcagcagatgataatatcaagacacctgccgagcgtctgcgggggccgcttccaccctcagcggatgataatctcaagacaccttccgagcgtcagctcactccctttccaccctcagctccaccctcagcagatgataatatcaagacacctgccgagcgtctgcggggagcgtctgcgggggccgcttccaccctcagcggatgataatctcaagacaccttccgagcgtcagctcactccccttccaccctcagctccaccctcagcagatgataatatcaagacacctgccgagcgtctgcgggggccgcttccaccctcagcggatgataatctcaagacaccttccgagcgtcagctcactccccttccaccctcagctccaccctcagcagatgataatatcaagacacctgccgagcgtctgcgggggccgcttccaccctcagcggatgataatctcaagacaccttccgagcgtcagctcactccccttccaccctcagctccaccctcagcagatgataatatcaagacacctgccgagcgtctgcgggggccgcttccaccctcagccgatgataatctcaagacacctcccttagctactcaggaggctgaggcagaaaaaccacgcaaacccaagaggcagagggcggctgagatggaaccacctcccgaacccaagaggcggagggtcggtgacgtggaaccgtcacgcaaacccaagaggcggagggccgctgacgtggaaccatcatcacccgaacccaagaggcggagggtcggtgatgtggaaccgtcacgcaaacccaagaggcggagggccgctgacgtggaaccatcatcacccgaacccaagaggcggagggtcggtgacgtggaaccgtcacgcaaacccaagaggcggagggccgctgacgtggaaccatcattacccgaacccaagaggcggaggttgagctgagaagaggccagtgcactcaagcctgagcaataagaataaaaccgagtagaacaaaataaaaaattcaaaaaacaaaacaaaacccacactccaaaaactaacaaagaataaataaataatataaaaataaaataaaaaaaaaaaaa

SEQ ID NO: 4636 - DNA, 7357 bp, Homo sapiens; identical to SEQ ID NO: 228

SEQ ID NO: 4637 - DNA, 2234 bp, Homo sapiens; identical to SEQ ID NO: 797

SEQ ID NO: 4638 - DNA, 2391 bp, Homo sapiens; identical to SEQ ID NO: 1765

SEQ ID NO: 4639 - DNA, 3662 bp, Homo sapiens
gtaactgaagtcaggcttttcatttgggaagccccctcaacagaattcggtcattctccaagttatggtggacgtacttctgttgttctccctctgcttgctttttcacattagcagaccggacttaagtcacaacagattatctttcatcaaggcaagttccatgagccaccttcaaagccttcgagaagtgaaactgaacaacaatgaattggagaccattccaaatctgggaccagtctcggcaaatattacacttctctccttggctggaaacaggattgttgaaatactccctgaacatctgaaagagtttcagtcccttgaaactttggaccttagcagcaacaatatttcagagctccaaactgcatttccagccctacagctcaaatatctgtatctcaacagcaaccgagtcacatcaatggaacctgggtattttgacaatttggccaacacactccttgtgttaaagctgaacaggaaccgaatctcagctatcccacccaagatgtttaaactgccccaactgcaacatctcgaattgaaccgaaacaagattaaaaatgtagatggactgacattccaaggccttggtgctctgaagtctctgaaaatgcaaagaaatggagtaacgaaacttatggatggagctttttgggggctgagcaacatggaaattttgcagctggaccataacaacctaacagagattaccaaaggctggctttacggcttgctgatgctgcaggaacttcatctcagccaaaatgccatcaacaggatcagccctgatgcctgggagttctgccagaagctcagtgagctggacctaactttcaatcacttatcaaggttagatgattcaagcttccttggcctaagcttactaaatacactgcacattgggaacaacagagtcagctacattgctgattgtgccttccgggggctttccagtttaaagactttggatctgaagaacaatgaaatttcctggactattgaagacatgaatggtgctttctctgggcttgacaaactgaggcgactgatactccaaggaaatcggatccgttctattactaaaaaagccttcactggtttggatgcattggagcatctagacctgagtgacaacgcaatcatgtctttacaaggcaatgcattttcacaaatgaagaaactgcaacaattgcatttaaatacatcaagccttttgtgcgattgccagctaaaatggctcccacagtgggtggcggaaaacaactttcagagctttgtaaatgccagttgtgcccatcctcagctgctaaaaggaagaagcatttttgctgttagcccagatggctttgtgtgtgatgattttcccaaaccccagatcacggttcagccagaaacacagtcggcaataaaaggttccaatttgagtttcatctgctcagctgccagcagcagtgattccccaatgacttttgcttggaaaaaagacaatgaactactgcatgatgctgaaatggaaaattatgcacacctccgggcccaaggtggcgaggtgatggagtataccaccatccttcggctgcgcgaggtggaatttgccagtgaggggaaatatcagtgtgtcatctccaatcactttggttcatcctactctgtcaaagccaagcttacagtaaatatgcttccctcattcaccaagacccccatggatctcaccatccgagctggggccatggcacgcttggagtgtgctgctgtggggcacccagccccccagatagcctggcagaaggatgggggcacagacttcccagctgcacgggagagacgcatgcatgtgatgcccgaggatgacgtgttctttatcgtggatgtgaagatagaggacattggggtatacagctgcacagctcagaacagtgcaggaagtatttcagcaaatgcaactctgactgtcctagaaacaccatcatttttgcggccactgttggaccgaactgtaaccaagggagaaacagccgtcctacagtgcattgctggaggaagccctccccctaaactgaactggaccaaagatgatagcccattggtggtaaccgagaggcacttttttgcagcaggcaatcagcttctgattattgtggactcagatgtcagtgatgctgggaaatacacatgtgagatgtctaacacccttggcactgagagaggaaacgtgcgcctcagtgtgatccccactccaacctgcgactcccctcagatgacagccccatcgttagacgatgacggatgggccactgtgggtgtcgtgatcatagccgtggtttgctgtgtggtgggcacgtcactcgtgtgggtggtcatcatataccacacaaggcggaggaatgaagattgcagcattaccaacacagatgagaccaacttgccagcagatattcctagttatttgtcatctcagggaacgttagctgacaggcaggatgggtacgtgtcttcagaaagtggaagccaccaccagtttgtcacatcttcaggtgctggatttttcttaccacaacatgacagtagtgggacctgccatattgacaatagcagtgaagctgatgtggaagctgccacagatctgttcctttgtccgtttttgggatccacaggccctatgtatttgaagggaaatgtgtatggctcagatccttttgaaacatatcatacaggttgcagtcctgacccaagaacagttttaatggaccactatgagcccagttacataaagaaaaaggagtgctacccatgttctcatccttcagaagaatcctgcgaacggagcttcagtaatatatcgtggccttcacatgtgaggaagctacttaacactagttactctcacaatgaaggacctggaatgaaaaatctgtgtctaaacaagtcctctttagattttagtgcaaatccagagccagcgtcggttgcctcgagtaattctttcatgggtacctttggaaaagctctcaggagacctcacctagatgcctattcaagctttggacagccatcagattgtcagccaagagccttttatttgaaagctcattcttccccagacttggactctgggtcagaggaagatgggaaagaaaggacagattttcaggaagaaaatcacatttgtacctttaaacagactttagaaaactacaggactccaaattttcagtcttatgacttggacacatagactgaatgagaccaaaggaaaagcttaacatactacctcaagtgaacttttatttaaaagagagagaatcttatgttttttaaatggagttatgaattttaaaaggataaaaatgctttatttatacagatgaaccaaaattacaaaaagttatgaaaatttttatactgggaatgatgctcatataagaatacctttttaaactattttttaactttgttttatgcaaaaaagtatcttacgtaaattaatgatataaatcatgattattttatgtatttttataatgccagatttctttttatggaaaatgagttactaaagcattttaaataatacctgccttgtaccattttttaaatagaagttacttcattatattttgcacattatatttaataaaatgtgtcaatttgaa

SEQ ID NO: 4640 - DNA, 3390 bp, Homo sapiens; identical to SEQ ID NO: 1486

SEQ ID NO: 4641 - DNA, 3219 bp, Homo sapiens
agactctcaggttgatgcagtgttccctcccacaactctgacatgtatataaattctgagctctccaaagcccactgccagttctcttcggggactaactgcaacggagagactcaagatgattccctttttacccatgttttctctactattgctgcttattgttaaccctataaacgccaacaatcattatgacaagatcttggctcatagtcgtatcaggggtcgggaccaaggcccaaatgtctgtgcccttcaacagattttgggcaccaaaaagaaatacttcagcacttgtaagaactggtataaaaagtccatctgtggacagaaaacgactgtgttatatgaatgttgccctggttatatgagaatggaaggaatgaaaggctgcccagcagttttgcccattgaccatgtttatggcactctgggcatcgtgggagccaccacaacgcagcgctattctgacgcctcaaaactgagggaggagatcgagggaaagggatccttcacttactttgcaccgagtaatgaggcttgggacaacttggattctgatatccgtagaggtttggagagcaacgtgaatgttgaattactgaatgctttacatagtcacatgattaataagagaatgttgaccaaggacttaaaaaatggcatgattattccttcaatgtataacaatttggggcttttcattaaccattatcctaatggggttgtcactgttaattgtgctcgaatcatccatgggaaccagattgcaacaaatggtgttgtccatgtcattgaccgtgtgcttacacaaattggtacctcaattcaagacttcattgaagcagaagatgacctttcatcttttagagcagctgccatcacatcggacatattggaggcccttggaagagacggtcacttcacactctttgctcccaccaatgaggcttttgagaaacttccacgaggtgtcctagaaaggatcatgggagacaaagtggcttccgaagctcttatgaagtaccacatcttaaatactctccagtgttctgagtctattatgggaggagcagtctttgagacgctggaaggaaatacaattgagataggatgtgacggtgacagtataacagtaaatggaatcaaaatggtgaacaaaaaggatattgtgacaaataatggtgtgatccatttgattgatcaggtcctaattcctgattctgccaaacaagttattgagctggctggaaaacagcaaaccaccttcacggatcttgtggcccaattaggcttggcatctgctctgaggccagatggagaatacactttgctggcacctgtgaataatgcattttctgatgatactctcagcatggatcagcgcctccttaaattaattctgcagaatcacatattgaaagtaaaagttggccttaatgagctttacaacgggcaaatactggaaaccatcggaggcaaacagctcagagtcttcgtatatcgtacagctgtctgcattgaaaattcatgcatggagaaagggagtaagcaagggagaaacggtgcgattcacatattccgcgagatcatcaagccagcagagaaatccctccatgaaaagttaaaacaagataagcgctttagcaccttcctcagcctacttgaagctgcagacttgaaagagctcctgacacaacctggagactggacattatttgtgccaaccaatgatgcttttaagggaatgactagtgaagaaaaagaaattctgatacgggacaaaaatgctcttcaaaacatcattctttatcacctgacaccaggagttttcattggaaaaggatttgaacctggtgttactaacattttaaagaccacacaaggaagcaaaatctttctgaaagaagtaaatgatacacttctggtgaatgaattgaaatcaaaagaatctgacatcatgacaacaaatggtgtaattcatgttgtagataaactcctctatccagcagacacacctgttggaaatgatcaactgctggaaatacttaataaattaatcaaatacatccaaattaagtttgttcgtggtagcaccttcaaagaaatccccgtgactgtctataagccaattattaaaaaatacaccaaaatcattgatggagtgcctgtggaaataactgaaaaagagacacgagaagaacgaatcattacaggtcctgaaataaaatacactaggatttctactggaggtggagaaacagaagaaactctgaagaaattgttacaagaagaggtcaccaaggtcaccaaattcattgaaggtggtgatggtcatttatttgaagatgaagaaattaaaagactgcttcagggagacacacccgtgaggaagttgcaagccaacaaaaaagttcaaggatctagaagacgattaagggaaggtcgttctcagtgaaaatccaaaaaccagaaaaaaatgtttatacaaccctaagtcaataacctgaccttagaaaattgtgagagccaagttgacttcaggaactgaaacatcagcacaaagaagcaatcatcaaataattctgaacacaaatttaatatttttttttctgaatgagaaacatgagggaaattgtggagttagcctcctgtggtaaaggaattgaagaaaatataacaccttacaccctttttcatcttgacattaaaagttctggctaactttggaatccattagagaaaaatccttgtcaccagattcattacaattcaaatcgaagagttgtgaactgttatcccattgaaaagaccgagccttgtatgtatgttatggatacataaaatgcacgcaagccattatctctccatgggaagctaagttataaaaataggtgcttggtgtacaaaactttttatatcaaaaggctttgcacatttctatatgagtgggtttactggtaaattatgttattttttacaactaattttgtactctcagaatgtttgtcatatgcttcttgcaatgcatattttttaatctcaaacgtttcaataaaaccatttttcagatataaagagaattacttcaaattgagtaattcagaaaaactcaagatttaagttaaaaagtggtttggacttgggaacaggactttatacctcttttactgtaacaagtactcattaaaggaaattgaatgaaattaaaaaaaaaaa

SEQ ID NO: 4642 - DNA, 3225 bp, Homo sapiens
agactctcaggttgatgcagtgttccctcccacaactctgacatgtatataaattctgagctctccaaagcccactgccagttctcttcggggactaactgcaacggagagactcaagatgattccctttttacccatgttttctctactattgctgcttattgttaaccctataaacgccaacaatcattatgacaagatcttggctcatagtcgtatcaggggtcgggaccaaggcccaaatgtctgtgcccttcaacagattttgggcaccaaaaagaaatacttcagcacttgtaagaactggtataaaaagtccatctgtggacagaaaacgactgtgttatatgaatgttgccctggttatatgagaatggaaggaatgaaaggctgcccagcagttttgcccattgaccatgtttatggcactctgggcatcgtgggagccaccacaacgcagcgctattctgacgcctcaaaactgagggaggagatcgagggaaagggatccttcacttactttgcaccgagtaatgaggcttgggacaacttggattctgatatccgtagaggtttggagagcaacgtgaatgttgaattactgaatgctttacatagtcacatgattaataagagaatgttgaccaaggacttaaaaaatggcatgattattccttcaatgtataacaatttggggcttttcattaaccattatcctaatggggttgtcactgttaattgtgctcgaatcatccatgggaaccagattgcaacaaatggtgttgtccatgtcattgaccgtgtgcttacacaaattggtacctcaattcaagacttcattgaagcagaagatgacctttcatcttttagagcagctgccatcacatcggacatattggaggcccttggaagagacggtcacttcacactctttgctcccaccaatgaggcttttgagaaacttccacgaggtgtcctagaaaggatcatgggagacaaagtggcttccgaagctcttatgaagtaccacatcttaaatactctccagtgttctgagtctattatgggaggagcagtctttgagacgctggaaggaaatacaattgagataggatgtgacggtgacagtataacagtaaatggaatcaaaatggtgaacaaaaaggatattgtgacaaataatggtgtgatccatttgattgatcaggtcctaattcctgattctgccaaacaagttattgagctggctggaaaacagcaaaccaccttcacggatcttgtggcccaattaggcttggcatctgctctgaggccagatggagaatacactttgctggcacctgtgaataatgcattttctgatgatactctcagcatggatcagcgcctccttaaattaattctgcagaatcacatattgaaagtaaaagttggccttaatgagctttacaacgggcaaatactggaaaccatcggaggcaaacagctcagagtcttcgtatatcgtacagctgtctgcattgaaaattcatgcatggagaaagggagtaagcaagggagaaacggtgcgattcacatattccgcgagatcatcaagccagcagagaaatccctccatgaaaagttaaaacaagataagcgctttagcaccttcctcagcctacttgaagctgcagacttgaaagagctcctgacacaacctggagactggacattatttgtgccaaccaatgatgcttttaagggaatgactagtgaagaaaaagaaattctgatacgggacaaaaatgctcttcaaaacatcattctttatcacctgacaccaggagttttcattggaaaaggatttgaacctggtgttactaacattttaaagaccacacaaggaagcaaaatctttctgaaagaagtaaatgatacacttctggtgaatgaattgaaatcaaaagaatctgacatcatgacaacaaatggtgtaattcatgttgtagataaactcctctatccagcagacacacctgttggaaatgatcaactgctggaaatacttaataaattaatcaaatacatccaaattaagtttgttcgtggtagcaccttcaaagaaatccccgtgactgtctatagacccacactaacaaaagtcaaaattgaaggtgaacctgaattcagactgattaaagaaggtgaaacaataactgaagtgatccatggagagccaattattaaaaaatacaccaaaatcattgatggagtgcctgtggaaataactgaaaaagagacacgagaagaacgaatcattacaggtcctgaaataaaatacactaggatttctactggaggtggagaaacagaagaaactctgaagaaattgttacaagaagacacacccgtgaggaagttgcaagccaacaaaaaagttcaaggatctagaagacgattaagggaaggtcgttctcagtgaaaatccaaaaaccagaaaaaaatgtttatacaaccctaagtcaataacctgaccttagaaaattgtgagagccaagttgacttcaggaactgaaacatcagcacaaagaagcaatcatcaaataattctgaacacaaatttaatatttttttttctgaatgagaaacatgagggaaattgtggagttagcctcctgtggtaaaggaattgaagaaaatataacaccttacaccctttttcatcttgacattaaaagttctggctaactttggaatccattagagaaaaatccttgtcaccagattcattacaattcaaatcgaagagttgtgaactgttatcccattgaaaagaccgagccttgtatgtatgttatggatacataaaatgcacgcaagccattatctctccatgggaagctaagttataaaaataggtgcttggtgtacaaaactttttatatcaaaaggctttgcacatttctatatgagtgggtttactggtaaattatgttattttttacaactaattttgtactctcagaatgtttgtcatatgcttcttgcaatgcatattttttaatctcaaacgtttcaataaaaccatttttcagatataaagagaattacttcaaattgagtaattcagaaaaactcaagatttaagttaaaaagtggtttggacttgggaacaggactttatacctcttttactgtaacaagtactcattaaaggaaattgaatgaaattaaaaaaaaaaa

SEQ ID NO: 4643 - DNA, 3534 bp, Homo sapiens; identical to SEQ ID NO: 1612

SEQ ID NO: 4644 - DNA, 3549 bp, Homo sapiens
cttcgctttcagagcatcctcactccgcccagttcggtgccagctgcgtgggctccagcttcgatcgttttccttggaatgctccaaaactcagcagcgactaagggaattccattggaatttgccgggcgtgctctcaccccgcacggcacccgcgccgtcagtcctcggatcccatcacttcagcccgaagattgcaactttgcagagacgaagaaatagcatggcatgaaacatggctcagttctattacaaaagaaatgttaatgctccctatagagaccgcatccctctaaggatagtaagagcagaatcagaactctcgccatcagaaaaagcctacttgaatgctgtggaaaagggagattatgccagtgtcaagaaatccctagaggaagctgaaatttattttaaaatcaatattaattgcattgatcctctcggaagaactgctctcctcattgcaattgaaaatgagaacttggagctcatcgaactactcttaagctttaatgtctatgttggagatgctctattacatgctatcagaaaagaagtcgtcggagctgttgagctgttattgaaccacaaaaaacctagtggagaaaaacaggtgcctcctatactccttgataagcagttctctgaattcactccagacattacaccaatcattttggcagcccatacaaataattatgagataataaaactcttggttcagaaaggagtctcagtgcctcgaccccacgaggtccgctgtaactgtgtggaatgcgtgtccagttcagatgtggacagcctccgtcactcacgctccagactcaacatctacaaggccttggccagtccctctctcattgcactgtcaagcgaagatccttttctcacagcctttcagttaagttgggaacttcaggaactgagcaaggtggaaaatgaattcaagtcggagtatgaagagctgtcacggcagtgcaaacaatttgctaaggacctactggatcagacgagaagttccagagaactggaaatcattcttaattaccgagatgacaatagtctcatagaagaacaaagtggaaatgatcttgcaagactaaaattggccattaagtaccgtcaaaaagagtttgttgcccagcccaattgtcaacagctgctggcatctcgctggtacgatgagtttccaggctggaggagaagacactgggcagtgaagatggtgacatgtttcataataggacttctttttcctgtcttctctgtgtgctacctgatagctcccaaaagcccacttggactgttcatcaggaagccatttatcaagtttatctgccacacagcctcctatttgacttttttgttcctgctgctgcttgcctctcagcacatcgacaggtcagacttgaacaggcaaggtccaccaccaaccatcgtcgagtggatgatattaccgtgggtcctgggcttcatatggggagaaattaaacagatgtgggatggcggacttcaggactacatccatgattggtggaatctaatggactttgtaatgaactccttatatttagcaacaatctccttgaaaattgttgcatttgtaaagtacagtgcccttaatccacgagaatcatgggacatgtggcatcccactctggtggcagaggctttatttgctattgcaaacatcttcagttctctgcgtctgatctcactgtttactgcaaattctcacctgggacctctgcaaatatctctgggaagaatgctcctggacattttgaagtttctattcatatactgccttgtgttgctagcatttgcaaatggcctaaatcaattgtacttctattatgaagaaacgaaagggttaacctgcaaaggcataagatgtgaaaagcagaataatgcattttcaacgttatttgagacactgcagtccctgttttggtcaatatttgggctcatcaatttatatgtgaccaatgtcaaagcacagcatgaatttactgagtttgttggtgccaccatgtttgggacatacaatgtcatctctctggttgttctactcaacatgttaatagctatgatgaataattcttaccaactgattgctgaccatgcagatatagaatggaaatttgcacgaacaaagctttggatgagttattttgaagaaggaggtactctgcctactcccttcaatgtcatcccgagccccaagtctctctggtacctgatcaaatggatctggacacacttgtgcaagaaaaagatgagaagaaagccagaaagttttggaacaataggggtaagaacacagcataggcgagctgctgataacttgagaagacatcaccaataccaagaagttatgaggaacctggtgaagcgatacgttgctgcaatgattagagatgctaaaactgaagaaggcctgaccgaagagaactttaaggaactaaagcaagacatttctagtttccgctttgaagtcctgggattactaagaggaagcaaactttccacaatacaatctgcgaatgcctcgaaggagtcttcaaattcggcagactcagatgaaaagagtgatagcgaaggtaatagcaaggacaagaaaaagaatttcagcctttttgatttaaccaccctgattcatccgagatcagcagcaattgcctctgaaagacataacataagcaatggctctgccctggtggttcaggagccgcccagggagaagcagagaaaagtgaattttgtgaccgatatcaaaaactttgggttatttcatagacgatcaaaacaaaatgctgctgagcaaaatgcaaaccaaatcttctctgtttcagaagaagttgctcgtcaacaggctgcaggaccacttgagagaaatattcaactggaatctcgaggattagcttcacggggtgacctgagcattcccggtctcagtgaacaatgtgtgttagtagaccatagagaaaggaatacggacacactggggttacaggtaggaaagagagtgtgtccattcaagtcagagaaggtggtggtggaggacacggttcctataataccaaaggagaaacatgcaaaagaagaggactctagtatagactatgatctaaacctcccagacacagtcacccacgaagattacgtgaccacaagattgtgatacttgaaggaggaagcgtttaccatacacatacgtattttccgtagtgctctgggtgggggaaaatgtttaaattgtattagcaaatgctaacttacactttatagcgtttatcagctgtggcatattacctgtaacatgtttaaataaggcaaaggcaatcaaaaacctttttgttttgtagcctgcttttgctttcacaatttgtcttacaattgtttttgttaataaataaatgcaccttgtattcttgtactgttgcaataaaaaaaaaaaaaaaaaaaaaaaaaaaaaaaaaaaaaaaaaaaaaaaaaaaaaaaaaaaaaaaaaaaaaaaaaaaaaaaaaaaaaaaaaaaaaaaaaaaa

SEQ ID NO: 4645 - DNA, 3282 bp, Homo sapiens
cttcgctttcagagcatcctcactccgcccagttcggtgccagctgcgtgggctccagcttcgatcgttttccttggaatgctccaaaactcagcagcgactaagggaattccattggaatttgccgggcgtgctctcaccccgcacggcacccgcgccgtcagtcctcggatcccatcacttcagcccgaagattgcaactttgcagagacgaagaaatagcatggcatgaaacatggctcagttctattacaaaagaaatgttaatgctccctatagagaccgcatccctctaaggatagtaagagcagaatcagaactctcgccatcagaaaaagcctacttgaatgctgtggaaaagggagattatgccagtgtcaagaaatccctagaggaagctgaaatttattttaaaatcaatattaattgcattgatcctctcggaagaactgctctcctcattgcaattgaaaatgagaacttggagctcatcgaactactcttaagctttaatgtctatgttggagatgctctattacatgctatcagaaaagaagtcgtcggagctgttgagctgttattgaaccacaaaaaacctagtggagaaaaacaggtgcctcctatactccttgataagcagttctctgaattcactccagacattacaccaatcattttggcagcccatacaaataattatgagataataaaactcttggttcagaaaggagtctcagtgcctcgaccccacgaggtccgctgtaactgtgtggaatgcgtgtccagttcagatgtggacagcctccgtcactcacgctccagactcaacatctacaaggccttggccagtccctctctcattgcactgtcaagcgaagatccttttctcacagcctttcagttaagttgggaacttcaggaactgagcaaggtggaaaatgaattcaagtcggagtatgaagagctgtcacggcagtgcaaacaatttgctaaggacctactggatcagacgagaagttccagagaactggaaatcattcttaattaccgagatgacaatagtctcatagaagaacaaagtggaaatgatcttgcaagactaaaattggccattaagtaccgtcaaaaagagtttgttgcccagcccaattgtcaacagctgctggcatctcgctggtacgatgagtttccaggctggaggagaagacactgggcagtgaagatggtgacatgtttcataataggacttctttttcctgtcttctctgtgtgctacctgatagctcccaaaagcccacttggactgttcatcaggaagccatttatcaagtttatctgccacacagcctcctatttgacttttttgttcctgctgctgcttgcctctcagcacatcgacaggtcagacttgaacaggcaaggtccaccaccaaccatcgtcgagtggatgatattaccgtgggtcctgggcttcatatggggagaaattaaacagatgtgggatggcggacttcaggactacatccatgattggtggaatctaatggactttgtaatgaactccttatatttagcaacaatctccttgaaaattgttgcatttgtaaagtacagtgcccttaatccacgagaatcatgggacatgtggcatcccactctggtggcagaggctttatttgctattgcaaacatcttcagttctctgcgtctgatctcactgtttactgcaaattctcacctgggacctctgcaaatatctctgggaagaatgctcctggacattttgaagtttctattcatatactgccttgtgttgctagcatttgcaaatggcctaaatcaattgtacttctattatgaagaaacgaaagggttaacctgcaaaggcataagatgtgaaaagcagaataatgcattttcaacgttatttgagacactgcagtccctgttttggtcaatatttgggctcatcaatttatatgtgaccaatgtcaaagcacagcatgaatttactgagtttgttggtgccaccatgtttgggacatacaatgtcatctctctggttgttctactcaacatgttaatagctatgatgaataattcttaccaactgattgctgaccatgcagatatagaatggaaatttgcacgaacaaagctttggatgagttattttgaagaaggaggtactctgcctactcccttcaatgtcatcccgagccccaagtctctctggtacctgatcaaatggatctggacacacttgtgcaagaaaaagatgagaagaaagccagaaagttttggaacaatagggaggcgagctgctgataacttgagaagacatcaccaataccaagaagttatgaggaacctggtgaagcgatacgttgctgcaatgattagagatgctaaaactgaagaaggcctgaccgaagagaactttaaggaactaaagcaagacatttctagtttccgctttgaagtcctgggattactaagaggaagcaaactttccacaatacaatctgcgaatgcctcgaaggagtcttcaaattcggcagactcagatgaaaagagtgatagcgaagaagaagttgctcgtcaacaggctgcaggaccacttgagagaaatattcaactggaatctcgaggattagcttcacggggtgacctgagcattcccggtctcagtgaacaatgtgtgttagtagaccatagagaaaggaatacggacacactggggttacaggtaggaaagagagtgtgtccattcaagtcagagaaggtggtggtggaggacacggttcctataataccaaaggagaaacatgcaaaagaagaggactctagtatagactatgatctaaacctcccagacacagtcacccacgaagattacgtgaccacaagattgtgatacttgaaggaggaagcgtttaccatacacatacgtattttccgtagtgctctgggtgggggaaaatgtttaaattgtattagcaaatgctaacttacactttatagcgtttatcagctgtggcatattacctgtaacatgtttaaataaggcaaaggcaatcaaaaacctttttgttttgtagcctgcttttgctttcacaatttgtcttacaattgtttttgttaataaataaatgcaccttgtattcttgtactgttgcaataaaaaaaaaaaaaaaaaaaaaaaaaaaaaaaaaaaaaaaaaaaaaaaaaaaaaaaaaaaaaaaaaaaaaaaaaaaaaaaaaaaaaaaaaaaaaaaaaaaa

SEQ ID NO: 4646 - DNA, 3087 bp, Homo sapiens
cttcgctttcagagcatcctcactccgcccagttcggtgccagctgcgtgggctccagcttcgatcgttttccttggaatgctccaaaactcagcagcgactaagggaattccattggaatttgccgggcgtgctctcaccccgcacggcacccgcgccgtcagtcctcggatcccatcacttcagcccgaagattgcaactttgcagagacgaagaaatagcatggcatgaaacatggctcagttctattacaaaagaaatgttaatgctccctatagagaccgcatccctctaaggatagtaagagcagaatcagaactctcgccatcagaaaaagcctacttgaatgctgtggaaaagggagattatgccagtgtcaagaaatccctagaggaagctgaaatttattttaaaatcaatattaattgcattgatcctctcggaagaactgctctcctcattgcaattgaaaatgagaacttggagctcatcgaactactcttaagctttaatgtctatgttggagatgctctattacatgctatcagaaaagaagtcgtcggagctgttgagctgttattgaaccacaaaaaacctagtggagaaaaacaggtgcctcctatactccttgataagcagttctctgaattcactccagacattacaccaatcattttggcagcccatacaaataattatgagataataaaactcttggttcagaaaggagtctcagtgcctcgaccccacgaggtccgctgtaactgtgtggaatgcgtgtccagttcagatgtggacagcctccgtcactcacgctccagactcaacatctacaaggccttggccagtccctctctcattgcactgtcaagcgaagatccttttctcacagcctttcagttaagttgggaacttcaggaactgagcaaggtggaaaatgaattcaagtcggagtatgaagagctgtcacggcagtgcaaacaatttgctaaggacctactggatcagacgagaagttccagagaactggaaatcattcttaattaccgagatgacaatagtctcatagaagaacaaagtggaaatgatcttgcaagactaaaattggccattaagtaccgtcaaaaagagtttgttgcccagcccaattgtcaacagctgctggcatctcgctggtacgatgagtttccaggctggaggagaagacactgggcagtgaagatggtgacatgtttcataataggacttctttttcctgtcttctctgtgtgctacctgatagctcccaaaagcccacttggactgttcatcaggaagccatttatcaagtttatctgccacacagcctcctatttgacttttttgttcctgctgctgcttgcctctcagcacatcgacaggtcagacttgaacaggcaaggtccaccaccaaccatcgtcgagtggatgatattaccgtgggtcctgggcttcatatggggagaaattaaacagatgtgggatggcggacttcaggactacatccatgattggtggaatctaatggactttgtaatgaactccttatatttagcaacaatctccttgaaaattgttgcatttgtaaagtacagtgcccttaatccacgagaatcatgggacatgtggcatcccactctggtggcagaggctttatttgctattgcaaacatcttcagttctctgcgtctgatctcactgtttactgcaaattctcacctgggacctctgcaaatatctctgggaagaatgctcctggacattttgaagtttctattcatatactgccttgtgttgctagcatttgcaaatggcctaaatcaattgtacttctattatgaagaaacgaaagggttaacctgcaaaggcataagatgtgaaaagcagaataatgcattttcaacgttatttgagacactgcagtccctgttttggtcaatatttgggctcatcaatttatatgtgaccaatgtcaaagcacagcatgaatttactgagtttgttggtgccaccatgtttgggacatacaatgtcatctctctggttgttctactcaacatgttaatagctatgatgaataattcttaccaactgattgctaggcgagctgctgataacttgagaagacatcaccaataccaagaagttatgaggaacctggtgaagcgatacgttgctgcaatgattagagatgctaaaactgaagaaggcctgaccgaagagaactttaaggaactaaagcaagacatttctagtttccgctttgaagtcctgggattactaagaggaagcaaactttccacaatacaatctgcgaatgcctcgaaggagtcttcaaattcggcagactcagatgaaaagagtgatagcgaagaagaagttgctcgtcaacaggctgcaggaccacttgagagaaatattcaactggaatctcgaggattagcttcacggggtgacctgagcattcccggtctcagtgaacaatgtgtgttagtagaccatagagaaaggaatacggacacactggggttacaggtaggaaagagagtgtgtccattcaagtcagagaaggtggtggtggaggacacggttcctataataccaaaggagaaacatgcaaaagaagaggactctagtatagactatgatctaaacctcccagacacagtcacccacgaagattacgtgaccacaagattgtgatacttgaaggaggaagcgtttaccatacacatacgtattttccgtagtgctctgggtgggggaaaatgtttaaattgtattagcaaatgctaacttacactttatagcgtttatcagctgtggcatattacctgtaacatgtttaaataaggcaaaggcaatcaaaaacctttttgttttgtagcctgcttttgctttcacaatttgtcttacaattgtttttgttaataaataaatgcaccttgtattcttgtactgttgcaataaaaaaaaaaaaaaaaaaaaaaaaaaaaaaaaaaaaaaaaaaaaaaaaaaaaaaaaaaaaaaaaaaaaaaaaaaaaaaaaaaaaaaaaaaaaaaaaaaaa

SEQ ID NO: 4647 - DNA, 3111 bp, Homo sapiens
cttcgctttcagagcatcctcactccgcccagttcggtgccagctgcgtgggctccagcttcgatcgttttccttggaatgctccaaaactcagcagcgactaagggaattccattggaatttgccgggcgtgctctcaccccgcacggcacccgcgccgtcagtcctcggatcccatcacttcagcccgaagattgcaactttgcagagacgaagaaatagcatggcatgaaacatggctcagttctattacaaaagaaatgttaatgctccctatagagaccgcatccctctaaggatagtaagagcagaatcagaactctcgccatcagaaaaagcctacttgaatgctgtggaaaagggagattatgccagtgtcaagaaatccctagaggaagctgaaatttattttaaaatcaatattaattgcattgatcctctcggaagaactgctctcctcattgcaattgaaaatgagaacttggagctcatcgaactactcttaagctttaatgtctatgttggagatgctctattacatgctatcagaaaagaagtcgtcggagctgttgagctgttattgaaccacaaaaaacctagtggagaaaaacaggtgcctcctatactccttgataagcagttctctgaattcactccagacattacaccaatcattttggcagcccatacaaataattatgagataataaaactcttggttcagaaaggagtctcagtgcctcgaccccacgaggtccgctgtaactgtgtggaatgcgtgtccagttcagatgtggacagcctccgtcactcacgctccagactcaacatctacaaggccttggccagtccctctctcattgcactgtcaagcgaagatccttttctcacagcctttcagttaagttgggaacttcaggaactgagcaaggtggaaaatgaattcaagtcggagtatgaagagctgtcacggcagtgcaaacaatttgctaaggacctactggatcagacgagaagttccagagaactggaaatcattcttaattaccgagatgacaatagtctcatagaagaacaaagtggaaatgatcttgcaagactaaaattggccattaagtaccgtcaaaaagagtttgttgcccagcccaattgtcaacagctgctggcatctcgctggtacgatgagtttccaggctggaggagaagacactgggcagtgaagatggtgacatgtttcataataggacttctttttcctgtcttctctgtgtgctacctgatagctcccaaaagcccacttggactgttcatcaggaagccatttatcaagtttatctgccacacagcctcctatttgacttttttgttcctgctgctgcttgcctctcagcacatcgacaggtcagacttgaacaggcaaggtccaccaccaaccatcgtcgagtggatgatattaccgtgggtcctgggcttcatatggggagaaattaaacagatgtgggatggcggacttcaggactacatccatgattggtggaatctaatggactttgtaatgaactccttatatttagcaacaatctccttgaaaattgttgcatttgtaaagtacagtgcccttaatccacgagaatcatgggacatgtggcatcccactctggtggcagaggctttatttgctattgcaaacatcttcagttctctgcgtctgatctcactgtttactgcaaattctcacctgggacctctgcaaatatctctgggaagaatgctcctggacattttgaagtttctattcatatactgccttgtgttgctagcatttgcaaatggcctaaatcaattgtacttctattatgaagaaacgaaagggttaacctgcaaaggcataagatgtgaaaagcagaataatgcattttcaacgttatttgagacactgcagtccctgttttggtcaatatttgggctcatcaatttatatgtgaccaatgtcaaagcacagcatgaatttactgagtttgttggtgccaccatgtttgggacatacaatgtcatctctctggttgttctactcaacatgttaatagctatgatgaataattcttaccaactgattgctgaccatgcagatatagaatggaaatttgcacgaacaaagctttggatgagttattttgaagaaggaggtactctgcctactcccttcaatgtcatcccgagccccaagtctctctggtacctgatcaaatggatctggacacacttgtgcaagaaaaagatgagaagaaagccagaaagttttggaacaatagggaggcgagctgctgataacttgagaagacatcaccaataccaagaagttatgaggaacctggtgaagcgatacgttgctgcaatgattagagatgctaaaactgaagaagttgctcgtcaacaggctgcaggaccacttgagagaaatattcaactggaatctcgaggattagcttcacggggtgacctgagcattcccggtctcagtgaacaatgtgtgttagtagaccatagagaaaggaatacggacacactggggttacaggtaggaaagagagtgtgtccattcaagtcagagaaggtggtggtggaggacacggttcctataataccaaaggagaaacatgcaaaagaagaggactctagtatagactatgatctaaacctcccagacacagtcacccacgaagattacgtgaccacaagattgtgatacttgaaggaggaagcgtttaccatacacatacgtattttccgtagtgctctgggtgggggaaaatgtttaaattgtattagcaaatgctaacttacactttatagcgtttatcagctgtggcatattacctgtaacatgtttaaataaggcaaaggcaatcaaaaacctttttgttttgtagcctgcttttgctttcacaatttgtcttacaattgtttttgttaataaataaatgcaccttgtattcttgtactgttgcaataaaaaaaaaaaaaaaaaaaaaaaaaaaaaaaaaaaaaaaaaaaaaaaaaaaaaaaaaaaaaaaaaaaaaaaaaaaaaaaaaaaaaaaaaaaaaaaaaaaa

SEQ ID NO: 4648 - DNA, 3015 bp, Homo sapiens
cttcgctttcagagcatcctcactccgcccagttcggtgccagctgcgtgggctccagcttcgatcgttttccttggaatgctccaaaactcagcagcgactaagggaattccattggaatttgccgggcgtgctctcaccccgcacggcacccgcgccgtcagtcctcggatcccatcacttcagcccgaagattgcaactttgcagagacgaagaaatagcatggcatgaaacatggctcagttctattacaaaagaaatgttaatgctccctatagagaccgcatccctctaaggatagtaagagcagaatcagaactctcgccatcagaaaaagcctacttgaatgctgtggaaaagggagattatgccagtgtcaagaaatccctagaggaagctgaaatttattttaaaatcaatattaattgcattgatcctctcggaagaactgctctcctcattgcaattgaaaatgagaacttggagctcatcgaactactcttaagctttaatgtctatgttggagatgctctattacatgctatcagaaaagaagtcgtcggagctgttgagctgttattgaaccacaaaaaacctagtggagaaaaacagtttgttgcccagcccaattgtcaacagctgctggcatctcgctggtacgatgagtttccaggctggaggagaagacactgggcagtgaagatggtgacatgtttcataataggacttctttttcctgtcttctctgtgtgctacctgatagctcccaaaagcccacttggactgttcatcaggaagccatttatcaagtttatctgccacacagcctcctatttgacttttttgttcctgctgctgcttgcctctcagcacatcgacaggtcagacttgaacaggcaaggtccaccaccaaccatcgtcgagtggatgatattaccgtgggtcctgggcttcatatggggagaaattaaacagatgtgggatggcggacttcaggactacatccatgattggtggaatctaatggactttgtaatgaactccttatatttagcaacaatctccttgaaaattgttgcatttgtaaagtacagtgcccttaatccacgagaatcatgggacatgtggcatcccactctggtggcagaggctttatttgctattgcaaacatcttcagttctctgcgtctgatctcactgtttactgcaaattctcacctgggacctctgcaaatatctctgggaagaatgctcctggacattttgaagtttctattcatatactgccttgtgttgctagcatttgcaaatggcctaaatcaattgtacttctattatgaagaaacgaaagggttaacctgcaaaggcataagatgtgaaaagcagaataatgcattttcaacgttatttgagacactgcagtccctgttttggtcaatatttgggctcatcaatttatatgtgaccaatgtcaaagcacagcatgaatttactgagtttgttggtgccaccatgtttgggacatacaatgtcatctctctggttgttctactcaacatgttaatagctatgatgaataattcttaccaactgattgctgaccatgcagatatagaatggaaatttgcacgaacaaagctttggatgagttattttgaagaaggaggtactctgcctactcccttcaatgtcatcccgagccccaagtctctctggtacctgatcaaatggatctggacacacttgtgcaagaaaaagatgagaagaaagccagaaagttttggaacaatagggaggcgagctgctgataacttgagaagacatcaccaataccaagaagttatgaggaacctggtgaagcgatacgttgctgcaatgattagagatgctaaaactgaagaaggcctgaccgaagagaactttaaggaactaaagcaagacatttctagtttccgctttgaagtcctgggattactaagaggaagcaaactttccacaatacaatctgcgaatgcctcgaaggagtcttcaaattcggcagactcagatgaaaagagtgatagcgaaggtaatagcaaggacaagaaaaagaatttcagcctttttgatttaaccaccctgattcatccgagatcagcagcaattgcctctgaaagacataacataagcaatggctctgccctggtggttcaggagccgcccagggagaagcagagaaaagtgaattttgtgaccgatatcaaaaactttgggttatttcatagacgatcaaaacaaaatgctgctgagcaaaatgcaaaccaaatcttctctgtttcagaagaagttgctcgtcaacaggctgcaggaccacttgagagaaatattcaactggaatctcgaggattagcttcacggggtgacctgagcattcccggtctcagtgaacaatgtgtgttagtagaccatagagaaaggaatacggacacactggggttacaggtaggaaagagagtgtgtccattcaagtcagagaaggtggtggtggaggacacggttcctataataccaaaggagaaacatgcaaaagaagaggactctagtatagactatgatctaaacctcccagacacagtcacccacgaagattacgtgaccacaagattgtgatacttgaaggaggaagcgtttaccatacacatacgtattttccgtagtgctctgggtgggggaaaatgtttaaattgtattagcaaatgctaacttacactttatagcgtttatcagctgtggcatattacctgtaacatgtttaaataaggcaaaggcaatcaaaaacctttttgttttgtagcctgcttttgctttcacaatttgtcttacaattgtttttgttaataaataaatgcaccttgtattcttgtactgttgcaataaaaaaaaaaaaaaaaaaaaaaaaaaaaaaaaaaaaaaaaaaaaaaaaaaaaaaaaaaaaaaaaaaaaaaaaaaaaaaaaaaaaaaaaaaaaaaaaaaaa

SEQ ID NO: 4649 - DNA, 3135 bp, Homo sapiens
agactctcaggttgatgcagtgttccctcccacaactctgacatgtatataaattctgagctctccaaagcccactgccagttctcttcggggactaactgcaacggagagactcaagatgattccctttttacccatgttttctctactattgctgcttattgttaaccctataaacgccaacaatcattatgacaagatcttggctcatagtcgtatcaggggtcgggaccaaggcccaaatgtctgtgcccttcaacagattttgggcaccaaaaagaaatacttcagcacttgtaagaactggtataaaaagtccatctgtggacagaaaacgactgtgttatatgaatgttgccctggttatatgagaatggaaggaatgaaaggctgcccagcagttttgcccattgaccatgtttatggcactctgggcatcgtgggagccaccacaacgcagcgctattctgacgcctcaaaactgagggaggagatcgagggaaagggatccttcacttactttgcaccgagtaatgaggcttgggacaacttggattctgatatccgtagaggtttggagagcaacgtgaatgttgaattactgaatgctttacatagtcacatgattaataagagaatgttgaccaaggacttaaaaaatggcatgattattccttcaatgtataacaatttggggcttttcattaaccattatcctaatggggttgtcactgttaattgtgctcgaatcatccatgggaaccagattgcaacaaatggtgttgtccatgtcattgaccgtgtgcttacacaaattggtacctcaattcaagacttcattgaagcagaagatgacctttcatcttttagagcagctgccatcacatcggacatattggaggcccttggaagagacggtcacttcacactctttgctcccaccaatgaggcttttgagaaacttccacgaggtgtcctagaaaggatcatgggagacaaagtggcttccgaagctcttatgaagtaccacatcttaaatactctccagtgttctgagtctattatgggaggagcagtctttgagacgctggaaggaaatacaattgagataggatgtgacggtgacagtataacagtaaatggaatcaaaatggtgaacaaaaaggatattgtgacaaataatggtgtgatccatttgattgatcaggtcctaattcctgattctgccaaacaagttattgagctggctggaaaacagcaaaccaccttcacggatcttgtggcccaattaggcttggcatctgctctgaggccagatggagaatacactttgctggcacctgtgaataatgcattttctgatgatactctcagcatggatcagcgcctccttaaattaattctgcagaatcacatattgaaagtaaaagttggccttaatgagctttacaacgggcaaatactggaaaccatcggaggcaaacagctcagagtcttcgtatatcgtacagctgtctgcattgaaaattcatgcatggagaaagggagtaagcaagggagaaacggtgcgattcacatattccgcgagatcatcaagccagcagagaaatccctccatgaaaagttaaaacaagataagcgctttagcaccttcctcagcctacttgaagctgcagacttgaaagagctcctgacacaacctggagactggacattatttgtgccaaccaatgatgcttttaagggaatgactagtgaagaaaaagaaattctgatacgggacaaaaatgctcttcaaaacatcattctttatcacctgacaccaggagttttcattggaaaaggatttgaacctggtgttactaacattttaaagaccacacaaggaagcaaaatctttctgaaagaagtaaatgatacacttctggtgaatgaattgaaatcaaaagaatctgacatcatgacaacaaatggtgtaattcatgttgtagataaactcctctatccagcagacacacctgttggaaatgatcaactgctggaaatacttaataaattaatcaaatacatccaaattaagtttgttcgtggtagcaccttcaaagaaatccccgtgactgtctataagccaattattaaaaaatacaccaaaatcattgatggagtgcctgtggaaataactgaaaaagagacacgagaagaacgaatcattacaggtcctgaaataaaatacactaggatttctactggaggtggagaaacagaagaaactctgaagaaattgttacaagaagacacacccgtgaggaagttgcaagccaacaaaaaagttcaaggatctagaagacgattaagggaaggtcgttctcagtgaaaatccaaaaaccagaaaaaaatgtttatacaaccctaagtcaataacctgaccttagaaaattgtgagagccaagttgacttcaggaactgaaacatcagcacaaagaagcaatcatcaaataattctgaacacaaatttaatatttttttttctgaatgagaaacatgagggaaattgtggagttagcctcctgtggtaaaggaattgaagaaaatataacaccttacaccctttttcatcttgacattaaaagttctggctaactttggaatccattagagaaaaatccttgtcaccagattcattacaattcaaatcgaagagttgtgaactgttatcccattgaaaagaccgagccttgtatgtatgttatggatacataaaatgcacgcaagccattatctctccatgggaagctaagttataaaaataggtgcttggtgtacaaaactttttatatcaaaaggctttgcacatttctatatgagtgggtttactggtaaattatgttattttttacaactaattttgtactctcagaatgtttgtcatatgcttcttgcaatgcatattttttaatctcaaacgtttcaataaaaccatttttcagatataaagagaattacttcaaattgagtaattcagaaaaactcaagatttaagttaaaaagtggtttggacttgggaacaggactttatacctcttttactgtaacaagtactcattaaaggaaattgaatgaaattaaaaaaaaaaa

SEQ ID NO: 4650 - DNA, 7859 bp, Homo sapiens
tttttttttttttttcctaatttttggtcggcggcggtgctgggccaggggaaggaagggacacggaggccgccctcgtcccgccacctcctacccgcttccccccagccccggctccgggagatgtgccgggcggggggcccgggttcgccgagccgcaggagagacacgctgggccgaccccagagaggcgctggacaggctggtggtccaggccgtggtgcctgccaggtgatgtggggcaaagccccccgcacaggccactgagagctccggacacgcacccggctgccaccatggcccgcctagccgcagtgctctggaatctgtgtgtcaccgccgtcctggtcacctcggccacccaaggcctgagccgggccgggctcccgttcgggctgatgcgccgggagctggcgtgtgaaggctaccccatcgagctgcggtgccccggcagcgacgtcatcatggtggagaatgccaactacgggcgcacggacgacaagatttgcgatgctgaccctttccagatggagaatgtgcagtgctacctgccggacgccttcaagatcatgtcacagaggtgtaacaaccgcacccagtgcgtggtggtcgccggctcggatgcctttcctgacccctgtcctgggacctacaagtacctggaggtgcagtacgactgtgtcccctacatcttcgtgtgcccagggaccctgcagaaggtgctggagcccacctcgacacacgagtcagagcaccagtctggcgcatggtgcaaggacccgctgcaggcgggtgaccgcatctacgtgatgccctggatcccctaccgcacggacacactgactgagtatgcctcgtgggaggactacgtggccgcccgccacaccaccacctaccgcctgcccaaccgcgtggatggcacaggctttgtggtctacgatggtgccgtcttctacaacaaggagcgcacgcgcaacatcgtcaagtatgacctacggacgcgcatcaagagcggggagacggtcatcaataccgccaactaccatgacacctcgccctaccgctggggcggaaagaccgacattgacctggcggtggacgagaacgggctgtgggtcatctacgccactgagggcaacaacgggcggctggtggtgagccagctgaacccctacacactgcgctttgagggcacgtgggagacgggttacgacaagcgctcggcatccaacgccttcatggtgtgtggggtcctgtacgtcctgcgttccgtgtacgtggatgatgacagcgaggcggctggcaaccgcgtggactatgccttcaacaccaatgccaaccgcgaggagcctgtcagcctcaccttccccaacccctaccagttcatctcctccgttgactacaaccctcgcgacaaccagctgtacgtctggaacaactatttcgtggtgcgctacagcctggagttcgggccgcccgaccccagtgctggcccagccacttccccacccctcagcacgaccaccacagccaggcccacgcccctcaccagcacagcctcgcccgcagccaccaccccgctccgccgggcacccctcaccacgcacccagtgggtgccatcaaccagctgggacctgatctgcctccagccacagccccagtccccagcacccggcggcccccagccccgaatctacacgtgtcccctgagctcttctgcgagccccgagaggtacggcgggtccagtggccggccacccagcagggcatgctggtggagaggccctgccccaaggggactcgaggaattgcctccttccagtgtctaccagccttggggctctggaacccccggggccctgacctcagcaactgcacctccccctgggtcaaccaggtggcccagaagatcaagagtggggagaacgcggccaacatcgccagcgagctggcccgacacacccggggctccatctacgcgggggacgtctcctcctctgtgaagctgatggagcagctgctggacatcctggatgcccagctgcaggccctgcggcccatcgagcgcgagtcagccggcaagaactacaacaagatgcacaagcgagagagaacttgtaaggattatatcaaggccgtggtggagacagtggacaatctgctccggccagaagctctggagtcctggaaggacatgaatgccacggagcaggtgcacacggccaccatgctcctcgacgtcctggaggagggcgccttcctgctggccgacaatgtcagggagcctgcccgcttcctggctgccaaggagaacgtggtcctggaggtcacagtcctgaacacagagggccaggtgcaggagctggtgttcccccaggaggagtacccgagaaagaactccatccagctgtctgccaaaaccatcaagcagaacagccgcaatggggtggtcaaagttgtcttcatcctctacaacaacctgggcctcttcctgtccacggagaatgccacagtgaagctggccggcgaagcaggcccgggtggccctgggggcgcctctctagtggtgaactcacaggtcatcgcagcatccatcaacaaggagtccagccgcgtcttcctcatggaccctgtcatcttcaccgtggcccacctggaggacaagaaccacttcaatgctaactgctccttctggaactactcggagcgttccatgctgggctactggtcgacccaaggctgccgcctggtggagtccaacaagacccataccacgtgtgcctgcagccacctcaccaacttcgctgtgctcatggctcaccgtgagatctaccagggccgcatcaacgagctgctgctgtcggtcatcacctgggtgggcattgtgatctccctggtctgcttggccatctgcatctccaccttctgcttcctgcgggggctgcagaccgaccgcaacaccatccacaagaacctgtgcatcaacctcttcctggctgagctgctcttcctggtcgggatcgacaagactcagtatgagattgcctgccccatcttcgccggcctgctgcactatttcttcctggctgccttctcctggctgtgcctggagggcgtgcacctctacctgctactagtggaggtgtttgagagcgagtattcccgcaccaagtactactacctgggtggctactgcttcccggccctggtggtgggcatcgcggctgccattgactaccgcagctacggcaccgagaaggcctgctggctccgagtggacaattacttcatctggagtttcatcgggccagtctccttcgttatcgtggtcaacctggtgttcctcatggtgaccctgcacaagatgatccgaagctcatctgtgctcaagcccgactccagccgcctggacaacattaaatcctgggcgctgggggccatcgcgctgctgttcctgctgggcctcacctgggctttcggcctcctcttcatcaacaaggagtcggtggtcatggcctatctcttcaccaccttcaacgccttccagggggtcttcatcttcgtctttcactgcgccttacagaagaaggtgcacaaggagtacagcaagtgcctgcgtcactcctactgctgcatccgctccccacccgggggcactcacggatccctcaagacctcagccatgcgaagcaacacccgctactacacagggacccagagccgaattcggaggatgtggaatgacactgtgaggaaacagacggagtcctccttcatggcgggtgacatcaacagcacccccaccctgaaccgaggtaccatggggaaccacctgctgaccaaccccgtgctgcagccccgtgggggcaccagtccctacaacaccctcatcgccgagtcagtgggcttcaatccctcctcgccccctgtcttcaactccccagggagctaccgggaacccaagcaccccttgggaggccgggaagcctgtggcatggacaccctgcccctgaacggcaacttcaataacagttactccttgcgaagtggggatttccctcccggggatgggggccctgagccgccccgaggccggaacctagccgatgcggcggcctttgagaagatgatcatctcagagctggtgcacaacaacctgcgggggagcagcagcgcggccaagggccctccaccgcctgagccccctgtgccacctgtgccagggggcgggggcgaggaagaggcgggcgggcccgggggtgctgaccgggccgagattgaacttctctataaggccctggaggagcctctgctgctgccccgggcccagtcggtgctgtaccagagcgatctggacgagtcggagagctgcacggccgaggacggcgccaccagccggcccctctcctcccctcctggccgggactccctctatgccagcggggccaacctgcgggactcaccctcctacccggacagcagccctgaggggcccagtgaggccctgcccccaccccctcccgcaccccccggcccccccgaaatctactacacctcgcgcccgccagccctggtggcccggaatcccctgcagggctactaccaggtgcggcgtcctagccacgagggctacctggcagccccaggccttgaggggccagggcccgatggggacgggcagatgcagctggtcaccagtctctgagggcacctcatggaccaggggctggtggcccaggccagggagggaaccctgggcagggctctggtgggagagggagacagatggaggcagtggctggtgggccactctctccaggtgcccctcagccatgggccctacagtcccctcaggggactctaacctgggggcctgaggtgccagggttcacagacagggtttcccaccagccacacgcaccagctctatttgggggaagtgtagtgaggaggagcccagaggaccccaggggagtgaggagggagaacttggaagggtgcagcccacttccagactctcccctctcccacccttctaccctgtgaagggaaatgagggctttagtttcctgggcagggaggggcagcttctgaggttgccaaaggcccccactggatggaacctgttagctgctcctctccgcagccagaaatgctgccggctgcacccagagggagcagtgaggcaggacagatggacaggttcctcctgcgctgtaattccctgctccctggagactgggaaaaggccgcagggcagggggactgggcggtggtggctggtggtttaaaggttgaactttctctgaagctcctttccccttgctcttggtccctgccccgcaagcaaacctgccccctctgcctcccagtgcacccaatgaccccctcccttggggcgactcctgatgaagcacaactccccgcagggcccccagcccacaggggtggccatatttgggcagttcccagtcctgtgggctcggctatctggggagcagattttgggtctggatctccctggggagtgggtcctgggcttggatctttccctagggggccctcttactccttcctctctcctcctccttccccattgctgtaaatatttcaacgaaatggaaaagaaaaaaaaaagacaaaaaaaaaaaaaaagaaaagaaaaaaaatctcatcacttgaagccaccgggagcctgcggcccgggccagcccgggctttctccggagcagagcagcgctgctggcctggcagccaggacttctccgtgtacgtgcatccccagtccccgccggggcgggcgggccgccagagcagctttttacaatccagagacagaaaacaaaatctagatgcaacagcgaaacaaagaacccatttccttcctggcaccctcctttcctgctccgcctgcccggcatcatcagcccttctggggcgtgtacctctcactgcctgccccaggaccagaggcctgtctcccccttccctccccaccggcccgggggagacctcttcacacccaaagatgctttgtcaagatggctgcgctgtccctttgagttcctgcttcttgtatattgctctggggactctcgccggggaagatggggctgatttcccacctagagaggttgatggcagaaggaaaatggggaggcactggggttgtggagggcatgggtatggctgaggagggtgctgggaacggcaaggcggtctgggggatggggaggggcaaaggtgagagatcaccttccctatcctccaccttcccgcagggaagacgaagccaggtgccagggctggggtcgggacacccatgttctgggcggcttgaccccaaatcccagaccccggaagctccaggctcgggatgtgtcctgagcacctgtcccggccccctcctctccagcctgtcaggccagcctccccagcccccttccctcaactctaggggcagcatagccccaggccaccctagcccagcccctgcattgccgtttccccagaggtggcccctccacctctgctctgacctctccccatctctctgcccctccttttctcacaagtgccatgagttttcaaacatcttcgggtctcagcctgctgctgccatgaactttgttgggttaagggggaggggctctaggaaggaactggggggaaggggacaggtaggtggctggagggaccctttttgctgctagaaagcccctcccttctcccggggagctggggctggcttgtccccatcaattaggggagaaggggtcagaccaaagatggtggtttgtcccgtgtaagggaacaggtgtggggaagaggtggggttgggttccaactctggctttttctggtagaaaggcctaacccattacaccagaagaccatgggtgaagtctagatggggaggagaagtgaggccagggacagtcttgccagacgactctgaggagggcaagggacagttccatggcccttcccggactgcactaggctgggagctctgttgtgtggaggggtggtcagaggtctgtgaagagcgggcaggaggcatgagcaggcgaggagctggcctgtcccgggaagcagcccagcctgtggctgcccccgacaccaggaggagggccaggagagttccagggggctgaggcacacagagaggccaacttcctccctgcccagccttccttgtatctctccagactcggacaatcaaagggagagagggtgtatcgggtcctgttccagccggcatcgccgggtggcttccaggcctcagagctgtgtggcagggccccctgctggggctggacatcactgcagtccagtgcaaagccgcccccagagcccaggtgtccccccaacctaaccagacctggtgccttgacgcccccaccccagctgggacggtacagagaagggtcttggtttcctctcctactcccttccttaggctcctgaactcgtttgctcctaaatcttgttaattctttttctctggattttggtttcttttggctttcccttgccttcccctttctctgtctccaacactctttccccatgtctttctggctgtctctatgttcctcttctcttatcctcaactttctgtccattcgggcctcctccccacctcccacgccccagcccctccctccttggtctccttttcgatatgccaaaccaattttgggtcgagtgcatttaacgagaacaaaacaaaaggctcataacaacaagaacgtttcagaaaaaaacaaaaagttttaaaaaaattgttgagtcaaaaagtcaaacaataaagaaattaagatttcttggaatgacaaaaaaaaaaaaaaaaaaa

SEQ ID NO: 4651 - DNA, 7874 bp, Homo sapiens; identical to SEQ ID NO: 2313

SEQ ID NO: 4652 - DNA, 1997 bp, Homo sapiens
gcgcgccctgtcgcgcagccggcgctacgtgtgcgcccgggacgcggacgcaagccgccgacggaggaggccttttaactacggcctctccatcgaagaaaaaaatgaaaatgatgaaaactcattaagcagttcctctgacagtagtgaagacaaggatgaaaaaataagtgaagaatgtgatattgaagaaaagactgaagtgaaagaagaaccggagcttcaaacaaaaagggaaatggaagaaagaacagtaactctagaaatccctgaagttctgaagaggcagctggaggatgattgttactacattaatcggaggaaacggttagtgcaacttccatgccacaccaacatcataacgattttggaatcctatgtgaagcattttgctatcagtgcagccttttcagccaatgagaggcctcgtcaccatcacgctatgccacatgccagcatgaacgtgccttatatcccagcagaaaagaatattgacctttgtaaggagatggtggatggattaagaataacctttgattacactctcccgttggttttactctatccctatgaacaagctcagtataaaaaggtgactgcatctaaggtttttcttgcaattaaggaaagtgccacaaatactaataggagccaggagaagctctctcccagcttacgtttgttgaatccatccaggccgcagtctacagagagtcagtcgaccagcggtgaaccagccacccctaaaaggcgcaaagccgagccgcaagcagtgcagtctctgaggcggtcctcgccccacaccgccaactgtgacaggctttctaagagcagcacctcacctcagcccaagcgctggcagcaggacatgtccaccagtgtgcccaagctgttcctgcacctggaaaagaagacacctgtgcatagcagatcatcttcacctactctgactcctagccaggaagggagtcctgtgtttgctggctttgaagggagaagaactaatgaaataaatgaggtcctctcctggaagctcgtacctgacaattacccaccaggtgaccagccacctccaccctcttacatttacggggcgcaacatttgctgcgattgtttgtcaaacttccagaaattcttggaaaaatgtcctttactgagaagaatctgaaggctttattgaagcactttgatctctttgtgaggtttttagcagaataccacgatgacttcttcccagagtcagcttacgtcgctgcctctgaggtgcattacagcaccaggaacccccaggcagtcaataagtgttgatggttctgtaagaacaactgctccatctagcatggtgttctgagttccaggtaaaaaattaacaaggtggtgggtttttatccagagcacaaaacaaagtgcccaccagggggctttgacagaggtgtgccctgttgtttgagttccccatgtactgtagttactctgtttagaattatttcctaggtgcctgaaagtgttctgacatgacacttgctactttgtaggccatctgtgatggcaggtaaaaagcaactgttcacagtgaaatgttcatggaagtgtacataggttaggccatttcagcagacattgcagttagtcagcaagaaccacattgtttcgttatttgttagcattaaacaaaattttttttgcaaattggtttcattctcttgatgaagctgagcaactgtccaacaaggtttagtttgtacttgaaaactgcaaagtagtctcaaagtattttagagggaatccatattgatggcaaaagaaaatttgcagctataatttgcttctgacggttccttctctgtgaaacattatttttggtgatctaaagaaagcattgcctttcttgtttgcaattttacagctatacttttttgtgtaatgttacggttccctttctgtaaaatgttctttttggtgatctaaataaagcctctcttgtttgaaaaaaaaa

SEQ ID NO: 4653 - DNA, 4337 bp, Homo sapiens
ggaacatcggcggctgcccgggtgacttggttatatgtcacagaataacattcgagaatgggacatggaatgaggcgacggccccagcaagccccagcagccccagccccagccccaggcccagcagcagcagcagcagcccctgctctcccgccgcccggagaggctctgcagccatgaagccaaccgtcccgaggcaccgccggtaagcagggagcctccgcggagctcccgccgccgctcccccttggtgagtcctgccgcagcgagaggcatggagaaggccgcccccgcggggcgctgatcccctcgccgcgcccgcgcgcacacgccccccgccgccgccgccgctgccgccgccgcgcgcccccagtacctcgctccccgcccaggccccaccatgaccggctccgcggccgacactcaccgctgcccccaccccaaaggcgccaaaggcacccggtcccggagcagccacgcgcggcccgtgagcctcgccaccagcgggggctcagaggaggaggacaaagacggcggggtgctgttccacgtcaacaagagcggcttccccatcgacagccacacctgggagcgcatgtggatgcacgtggccaaggtgcaccctaaggggggagaaatggtgggcgccatcaggaacgccgccttcttggcaaagccttcaataccccaggtcccaaactacaggctgtcgatgacgatcccagactggctccaggcgatccagaattacatgaagaccctacactacttaaccaatgggcagccttccattgagcggttccccatcagctttaaaacctacttctcaggaaactactttcaccacgttgtgctggggatttactgcaatggccgctatggctcattgggcatgagccgcagggctgagctgatggacaagccattgacttttcggactctgagtgacctcatctttgactttgaggactcttacaagaaatacctgcacacagtcaagaaggtcaagattgggctgtacgtcccccatgagcctcatagcttccagcccattgagtggaagcagctggtcctcaacgtctcaaagatgctgagggctgacataaggaaggagctggagaaatatgccagggacatgagaatgaagatcctgaaacctgcaagtgcccactctccgacccaagtgagaagccggggaaaatccctgtcccccagaaggagacaggcaagccccccgaggaggctcggccggcgagagaagtcgcctgcactgcctgaaaagaaggtggctgatctgagcactctgaatgaagtgggctatcaaatccgaatttagccaagccataccggccagcaagagggtttctgtggtgcttctctctgcactttacccagcatcttcaggaggaactgcaactatttattaagaacttgtgaattttatttttaaggattcacctggaaatagaatctgagtgggtggtaaccattagctttaaaaaattcactaaaaggcaccatgaaaaggctgaagtaataagccccactggggttggactatgtccctcactcaagatcttaaggataaccgtaactgaagttttatatttttccatttacctactttcttttacttgctttgaacattatgcctcaccaatagtaaatgttcatgaaataatctcttgaacttttggtatagtaaggtaactctaacagtattactgtctttttcagcaataacagaaagcaaaaatgggtgggttttttttaagcagttattacctcagcattttgacatcagatatgcaaacttaatggcgttttgtttttttatattctatttgtattctttccccagtatttcccatggggatctccacaagtttggagttttttcctggtgcacacacgtgaggagatttaaggtactatatgcaagtgttttactaaaaagcactgaaattcttctggcaatacaagaaccattttcaggatcttggagttacttccttcttaatctttcttaaagcattcactgatgtttttgttttttcaaaatgaaacaaaaatatcacattgagaagctagtctatgttctgtcactaacatttaaactttgcagactctaacaaaaagcacaagaggtcacgtactattatacaaatttagcggtactggatttacctctgacattaacacactcaggcagagaccaggagtgatcagcaggtcttcagaaccaaaaaacctttctgttcacatttcatctgatttttaaactgaggcaggctttgattcttctgaaggatgccaagaatcaaactaagggaggactcactgttaaagatgtgttctgatgtcttatattaagaccaaatgtgacatgatgtgattatcttccagtactttgcttttaggtaccatttcatgacattttaggaatgagtattggaaaatataaagaattagaaaagcagcactttttttttaatggaaaagtcttcggtccagtgttacaccttatagtgtaattcagtccctaagcacagaatgaatgtctggcctgcatatggtagttacagtgtaacctctggctgcagaccacacaggacaaccctaacagcctagtcttgtatggtgtaaatatcaagagtacagcttcaatttcatttgctttatcttagcaacaatgccaactcaggagagcagacggccgatttcagtgaagtctggtagtcaacagatgttatttcagtctcagtgcatctcctctggctttctttgactgaaggtgtttataggaaggaagttaaaaaaaaaaaaagctcattgagattctttaccaattctttacaagatttctgggggtgacagggaaagcaaaaggacttcaaagcaaaagggtgcacaagagcttacttcaccctgaaaatcagtattattaatgaaaagtactgttttcttaaagaagtcgaatgtcctttagatgaacaagaccaagtatacatctccattagattaaaatgtagcacagggttaaaaattatcagtttaatctctttaagaacagtattatcagagtttaaaatgagttagctctgtttatctacacacagcaaacccattcgcagcctcttggccacatgtattcagatgtttgaaatagtgaatcatttcattttcattctaaaacaatactgacttagccatataccttctgtttgtcaatctgaaacttgcttacatctaataagtagacctcttataacactgcaaccattctaagagttggaatttatttttgccaagtattaagtactgttacatctaaaatacagaatgtcaaatggttgcatagcttgtttcccacaacaaggaggaaaagaacaggaatacaaactctgtaatatgctgataaagaagccttagaactgccaactggcttgatggttcaattagtaagctaatttctcccacacccgctccttgatttttagactaattttcccaaagcaaggtttagtcacacaaacttgaaagtacatttaaaatgttcttagttgtcatcctacttttattgcctatggaatatgctaatttctaaaaaaaatacgggagaggcaccaaacccctaaattctagtgcaataatttaaaaaacaaaaaacaaaacaaaacaaaaaacatgttatatgcacccccctcccaaagctgattttaagactggctagaattcaaaatataaaaaataaaactatgaagtgatttgaaatcggttttaaaaagttgttagtgcaagagaaattttatgtttaagccatcatggcaatatatgcaaagtttaaatgaatgacagaaatcttgattttagactgtatgttgtgctgttttgagtacactttatttcggagatatttagtattttctatacactctgaaatcatgagcatttcactttttctaagtcaattatttcataaggattttattaatagatattggtaaatagaactttggaaatcttaattcagaattcttactatacctgagtcttttgtaagctatagttttatgtacaaccttgtacagtttttttgacatacaattcagaactttgtttattctcttggactttgttctggccaatacattttttttaaatctttaagaagaactgtgattgttttagtgggtatttttctaattaaatgaaaacttgtataatggtattttagagaatgccagtaagtgcatgtttcaagttaatgtttttctcatcacttgtatgtttctaacacagcatgggactttaataaaaccatcctggaaacttaa

SEQ ID NO: 4654 - DNA, 4273 bp, Homo sapiens
ggaacatcggcggctgcccgggtgacttggttatatgtcacagaataacattcgagaatgggacatggaatgaggcgacggccccagcaagccccagcagccccagccccagccccaggcccagcagcagcagcagcagcccctgctctcccgccgcccggagaggctctgcagccatgaagccaaccgtcccgaggcaccgccggtaagcagggagcctccgcggagctcccgccgccgctcccccttggcgccaaaggcacccggtcccggagcagccacgcgcggcccgtgagcctcgccaccagcgggggctcagaggaggaggacaaagacggcggggtgctgttccacgtcaacaagagcggcttccccatcgacagccacacctgggagcgcatgtggatgcacgtggccaaggtgcaccctaaggggggagaaatggtgggcgccatcaggaacgccgccttcttggcaaagccttcaataccccaggtcccaaactacaggctgtcgatgacgatcccagactggctccaggcgatccagaattacatgaagaccctacaatataatcacacagggacccagttctttgaaattaggaaaatgagaccgctgagtgggttaatggaaacagcaaaagaaatgacccgagagtccttgcctatcaaatgccttgaagctgtcatcctgggcatctacttaaccaatgggcagccttccattgagcggttccccatcagctttaaaacctacttctcaggaaactactttcaccacgttgtgctggggatttactgcaatggccgctatggctcattgggcatgagccgcagggctgagctgatggacaagccattgacttttcggactctgagtgacctcatctttgactttgaggactcttacaagaaatacctgcacacagtcaagaaggtcaagattgggctgtacgtcccccatgagcctcatagcttccagcccattgagtggaagcagctggtcctcaacgtctcaaagatgctgagggctgacataaggaaggagctggagaaatatgccagggacatgagaatgaagatcctgaaacctgcaagtgcccactctccgacccaagtgagaagccggggaaaatccctgtcccccagaaggagacaggcaagccccccgaggaggctcggccggcgagagaagtcgcctgcactgcctgaaaagaaggtggctgatctgagcactctgaatgaagtgggctatcaaatccgaatttagccaagccataccggccagcaagagggtttctgtggtgcttctctctgcactttacccagcatcttcaggaggaactgcaactatttattaagaacttgtgaattttatttttaaggattcacctggaaatagaatctgagtgggtggtaaccattagctttaaaaaattcactaaaaggcaccatgaaaaggctgaagtaataagccccactggggttggactatgtccctcactcaagatcttaaggataaccgtaactgaagttttatatttttccatttacctactttcttttacttgctttgaacattatgcctcaccaatagtaaatgttcatgaaataatctcttgaacttttggtatagtaaggtaactctaacagtattactgtctttttcagcaataacagaaagcaaaaatgggtgggttttttttaagcagttattacctcagcattttgacatcagatatgcaaacttaatggcgttttgtttttttatattctatttgtattctttccccagtatttcccatggggatctccacaagtttggagttttttcctggtgcacacacgtgaggagatttaaggtactatatgcaagtgttttactaaaaagcactgaaattcttctggcaatacaagaaccattttcaggatcttggagttacttccttcttaatctttcttaaagcattcactgatgtttttgttttttcaaaatgaaacaaaaatatcacattgagaagctagtctatgttctgtcactaacatttaaactttgcagactctaacaaaaagcacaagaggtcacgtactattatacaaatttagcggtactggatttacctctgacattaacacactcaggcagagaccaggagtgatcagcaggtcttcagaaccaaaaaacctttctgttcacatttcatctgatttttaaactgaggcaggctttgattcttctgaaggatgccaagaatcaaactaagggaggactcactgttaaagatgtgttctgatgtcttatattaagaccaaatgtgacatgatgtgattatcttccagtactttgcttttaggtaccatttcatgacattttaggaatgagtattggaaaatataaagaattagaaaagcagcactttttttttaatggaaaagtcttcggtccagtgttacaccttatagtgtaattcagtccctaagcacagaatgaatgtctggcctgcatatggtagttacagtgtaacctctggctgcagaccacacaggacaaccctaacagcctagtcttgtatggtgtaaatatcaagagtacagcttcaatttcatttgctttatcttagcaacaatgccaactcaggagagcagacggccgatttcagtgaagtctggtagtcaacagatgttatttcagtctcagtgcatctcctctggctttctttgactgaaggtgtttataggaaggaagttaaaaaaaaaaaaagctcattgagattctttaccaattctttacaagatttctgggggtgacagggaaagcaaaaggacttcaaagcaaaagggtgcacaagagcttacttcaccctgaaaatcagtattattaatgaaaagtactgttttcttaaagaagtcgaatgtcctttagatgaacaagaccaagtatacatctccattagattaaaatgtagcacagggttaaaaattatcagtttaatctctttaagaacagtattatcagagtttaaaatgagttagctctgtttatctacacacagcaaacccattcgcagcctcttggccacatgtattcagatgtttgaaatagtgaatcatttcattttcattctaaaacaatactgacttagccatataccttctgtttgtcaatctgaaacttgcttacatctaataagtagacctcttataacactgcaaccattctaagagttggaatttatttttgccaagtattaagtactgttacatctaaaatacagaatgtcaaatggttgcatagcttgtttcccacaacaaggaggaaaagaacaggaatacaaactctgtaatatgctgataaagaagccttagaactgccaactggcttgatggttcaattagtaagctaatttctcccacacccgctccttgatttttagactaattttcccaaagcaaggtttagtcacacaaacttgaaagtacatttaaaatgttcttagttgtcatcctacttttattgcctatggaatatgctaatttctaaaaaaaatacgggagaggcaccaaacccctaaattctagtgcaataatttaaaaaacaaaaaacaaaacaaaacaaaaaacatgttatatgcacccccctcccaaagctgattttaagactggctagaattcaaaatataaaaaataaaactatgaagtgatttgaaatcggttttaaaaagttgttagtgcaagagaaattttatgtttaagccatcatggcaatatatgcaaagtttaaatgaatgacagaaatcttgattttagactgtatgttgtgctgttttgagtacactttatttcggagatatttagtattttctatacactctgaaatcatgagcatttcactttttctaagtcaattatttcataaggattttattaatagatattggtaaatagaactttggaaatcttaattcagaattcttactatacctgagtcttttgtaagctatagttttatgtacaaccttgtacagtttttttgacatacaattcagaactttgtttattctcttggactttgttctggccaatacattttttttaaatctttaagaagaactgtgattgttttagtgggtatttttctaattaaatgaaaacttgtataatggtattttagagaatgccagtaagtgcatgtttcaagttaatgtttttctcatcacttgtatgtttctaacacagcatgggactttaataaaaccatcctggaaacttaa

SEQ ID NO: 4655 - DNA, 3989 bp, Homo sapiens; identical to SEQ ID NO: 1690

SEQ ID NO: 4656 - DNA, 2259 bp, Homo sapiens; identical to SEQ ID NO: 1887

SEQ ID NO: 4657 - DNA, 2256 bp, Homo sapiens
cgataaagcccccgccgccgcggcagccagcttgcgctgtggggctgcccgggctgcgcggcgtctgcaggcgccaccgctgcctctttccggctgtgaccctcctcgccgccgccgcttggctgcgtcctccgactccccgcgccgccgagaccaggctcccgctccggttgcggccgcaccgccctccgcggccgccccctggggatccagcgagcgcggtcgtccttggtggaaggaaccatgaactggcatctccccctcttcctcttggcctctgtgacgctgccttccatctgctcccacttcaatcctctgtctctcgaggaactaggctccaacacggggatccaggttttcaatcagattgtgaagtcgaggcctcatgacaacatcgtgatctctccccatgggattgcgtcggtcctggggatgcttcagctgggggcggacggcaggaccaagaagcagctcgccatggtgatgagatacggcgtaaatggagttggtaaaatattaaagaagatcaacaaggccatcgtctccaagaagaataaagacattgtgacagtggctaacgccgtgtttgttaagaatgcctctgaaattgaagtgccttttgttacaaggaacaaagatgtgttccagtgtgaggtccggaatgtgaactttgaggatccagcctctgcctgtgattccatcaatgcatgggttaaaaatgaaaccagggatatgattgacaatctgctgtccccagatcttattgatggtgtgctcaccagactggtcctcgtcaacgcagtgtatttcaagggtctgtggaaatcacggttccaacccgagaacacaaagaaacgcactttcgtggcagccgacgggaaatcctatcaagtgccaatgctggcccagctctccgtgttccggtgtgggtcgacaagtgcccccaatgatttatggtacaacttcattgaactgccctaccacggggaaagcatcagcatgctgattgcactgccgactgagagctccactccgctgtctgccatcatcccacacatcagcaccaagaccatagacagctggatgagcatcatggtgcccaagagggtgcaggtgatcctgcccaagttcacagctgtagcacaaacagatttgaaggagccgctgaaagttcttggcattactgacatgtttgattcatcaaaggcaaattttgcaaaaataacaaggtcagaaaacctccatgtttctcatatcttgcaaaaagcaaaaattgaagtcagtgaagatggaaccaaagcttcagcagcaacaactgcaattctcattgcaagatcatcgcctccctggtttatagtagacagaccttttctgtttttcatccgacataatcctacaggtgctgtgttattcatggggcagataaacaaaccctgaagagtatacaaaagaaaccatgcaaagcaacgactactttgctacgaagaaagactcctttcctgcatctttcatagttctgttaaatatttttgtacatcgcttctttttcaaaactagttcttaggaacagactcgatgcaagtgtttctgttctgggaggtattggagggaaaaaacaagcaggatggctggaacactgtactgaggaatgaatagaaaggcttccagatgtctaaaagattctttaaactactgaactgttacctaggttaacaaccctgttgagtatttgctgtttgtccagttcaggaatttttgttttgttttgtctatatgtgcggcttttcagaagaaatttaatcagtgtgacagaaaaaaaaatgttttatggtagcttttactttttatgaaaaaaaaattatttgccttttaaattcttttcccccatccccctccaaagtcttgatagcaagcgttattttgggggtagaaacggtgaaatctctagcctctttgtgtttttgttgttgttgttgttgttgttttatataatgcatgtattcactaaaataaaatttaaaaaactcctgtcttgctagacaaggttgctgttgtgcagtgtgcctgtcactactggtctgtactccttggatttgcatttttgtattttgtacaaagtaaaaataaactgttatgagtagtaaaaataaagctatttctctgctatttgaaaatacaatagaagaaactgagccttttagacattcgtcagcctcttctaataaacctttgtactatgtaaacatcaggaaattc

SEQ ID NO: 4658 - DNA, 2186 bp, Homo sapiens
gttacctctgcctgggcagagggaggtgacgcgcggtgtggggaaagcctttaacttggcctctggcagccgatttaacccgagcgagcaggtctttgctattttcatcatctgtagaaacgggagttgcgaggcggatgagtgactgcaggtcgtccttggtggaaggaaccatgaactggcatctccccctcttcctcttggcctctgtgacgctgccttccatctgctcccacttcaatcctctgtctctcgaggaactaggctccaacacggggatccaggttttcaatcagattgtgaagtcgaggcctcatgacaacatcgtgatctctccccatgggattgcgtcggtcctggggatgcttcagctgggggcggacggcaggaccaagaagcagctcgccatggtgatgagatacggcgtaaatggagttggtaaaatattaaagaagatcaacaaggccatcgtctccaagaagaataaagacattgtgacagtggctaacgccgtgtttgttaagaatgcctctgaaattgaagtgccttttgttacaaggaacaaagatgtgttccagtgtgaggtccggaatgtgaactttgaggatccagcctctgcctgtgattccatcaatgcatgggttaaaaatgaaaccagggatatgattgacaatctgctgtccccagatcttattgatggtgtgctcaccagactggtcctcgtcaacgcagtgtatttcaagggtctgtggaaatcacggttccaacccgagaacacaaagaaacgcactttcgtggcagccgacgggaaatcctatcaagtgccaatgctggcccagctctccgtgttccggtgtgggtcgacaagtgcccccaatgatttatggtacaacttcattgaactgccctaccacggggaaagcatcagcatgctgattgcactgccgactgagagctccactccgctgtctgccatcatcccacacatcagcaccaagaccatagacagctggatgagcatcatggtgcccaagagggtgcaggtgatcctgcccaagttcacagctgtagcacaaacagatttgaaggagccgctgaaagttcttggcattactgacatgtttgattcatcaaaggcaaattttgcaaaaataacaaggtcagaaaacctccatgtttctcatatcttgcaaaaagcaaaaattgaagtcagtgaagatggaaccaaagcttcagcagcaacaactgcaattctcattgcaagatcatcgcctccctggtttatagtagacagaccttttctgtttttcatccgacataatcctacaggtgctgtgttattcatggggcagataaacaaaccctgaagagtatacaaaagaaaccatgcaaagcaacgactactttgctacgaagaaagactcctttcctgcatctttcatagttctgttaaatatttttgtacatcgcttctttttcaaaactagttcttaggaacagactcgatgcaagtgtttctgttctgggaggtattggagggaaaaaacaagcaggatggctggaacactgtactgaggaatgaatagaaaggcttccagatgtctaaaagattctttaaactactgaactgttacctaggttaacaaccctgttgagtatttgctgtttgtccagttcaggaatttttgttttgttttgtctatatgtgcggcttttcagaagaaatttaatcagtgtgacagaaaaaaaaatgttttatggtagcttttactttttatgaaaaaaaaattatttgccttttaaattcttttcccccatccccctccaaagtcttgatagcaagcgttattttgggggtagaaacggtgaaatctctagcctctttgtgtttttgttgttgttgttgttgttgttttatataatgcatgtattcactaaaataaaatttaaaaaactcctgtcttgctagacaaggttgctgttgtgcagtgtgcctgtcactactggtctgtactccttggatttgcatttttgtattttgtacaaagtaaaaataaactgttatgagtagtaaaaataaagctatttctctgctatttgaaaatacaatagaagaaactgagccttttagacattcgtcagcctcttctaataaacctttgtactatgtaaacatcaggaaattc

SEQ ID NO: 4659 - DNA, 2241 bp, Homo sapiens
gttgtccaaagtcattccggctccaaagggcgaattctcttttcgccatctctcccagccctggaacagcttagggtccctctcgaagagcacagcgccagcccagaccccatacacccaccgtccctggcacccgaacgcgctgcgagccccgggcctcccacaggagcggagacgcgggtccctgcgcctcacgccggaacggacccgtcagagccgccgagccccgcacctggaagctgggaggccgcgaggacggagaatcgaggcggagacccagcccagcgcccgcgcagctcggtgccctcccgccagtgcccgcactcgggtcacaccgcttgctctcgggagaagccccaaggctcgcggtgcaccgagaggcgcccgggctggagcgccccggccgtgttggccacggagttcttcagctgcttgatgaccacgaagagcaggaggaaaagtaagaagagcaggaagaagaagagcgccaggtagagcagcaagttgagttcccactccatgctggaggcgccggcgctcgctggccctgcgcgctcggcgcgggctgcagctggagggcgagcgcgccgcccgcacacccacctcccgcactcccgcccctcgcgagggcgtcccgctatgggcgccgactccggggtccgtgctttgcctcccccggctccgaggaaacgcgccaaggagctgaggaaatccggcgcagactctcccagctggcaccaaagccttccgcttcgccgagatcctctcaggtgctcttgaggacgcgagcgacttccctaggagcgaacttccgcgggcacggacgccagaagaggtaacagctcagtcttccaggggaggtcgggactggtgttttgtaaatgatttaaaagttccacccccaacatccagtagggtccctagctccgctgcgttcccaattaatttatttcgttatatccctccgttcctgctttccgaaaggacaggggatgtcatggcccagagacccaaaagaatgaaaggtggcagtgaagatggggtctgaaaggctatgagatgatttcgtgctatgaggtgtctgagtgaattccagttcgagctgtcttgctcttcagagtagcagatacattcagtgttgagtgtacttttctatggacaacaggtcacttggaaacgcattaagaatacaatgtatttcagaagttatatagcacaaagatttcaaatattggcctcaaattcagtttatttggtgaaaagaggaaaacaagtttactcaaagtgtttcttgagtccctaaagcctttctgtatctggttgacgtgacccaaagcccatatcgcgcagctttaaaagctgttcagtgtatctattactgcagaacaaattacccccaaatttagtggcttcaaacagcataaacattgatcatctctcacagtttctgtgggtccgaaatgtgggagcactggctgggtgattctggtgtcgggttactcatgaggctccgttcagatgtcagccaggtctgccttcagctgaatgcttgtgtagaggtggaggatccacttccagggtggctcactcactgcttgccaggtagggctggttgttggtgggaggcctcagttcccttccatgggtgcttccaatacagctgcgggattcccccagaacaagtgatgaaagaaaacaaagcagaggctgcagtgctctttaccgccagcttcagaagtcacgtgccatcagatctgtaatatcctactggtcacacaggtcagccctattcagggtaggagtccaaggacacgaacgccaaggagtaaggatcactggggctcatcttagagtcggctatgacagctgttaatacagccagctatcattgcccatttgtaggcctaactttattttattctttatttgtgaagatgcagaattgcctcctggactgaattctggggatgagggctgacaacatcccagattgtaataagtggctgctccagggatgacaggggttcaaagagacagggtggtatgaaaacagtctgtgaactgcaagtctcatggacccgattctagtgtcagctctgtcagtggtcacttttgctcagtgactctcagtcccctcatctgtaacatgccttgcttatctttcccttggatttgttgtgaggctcaaaaatgagaaaatgttaaataaaaatgtgttttgctaaaaaaaaaaaaaaaaaa

SEQ ID NO: 4660 - DNA, 3995 bp, Homo sapiens; identical to SEQ ID NO: 154

SEQ ID NO: 4661 - DNA, 5423 bp, Homo sapiens; identical to SEQ ID NO: 787

SEQ ID NO: 4662 - DNA, 4109 bp, Homo sapiens; identical to SEQ ID NO: 1947

SEQ ID NO: 4663 - DNA, 1581 bp, Homo sapiens
gaggcggagacacaaggctccgttccactgggcacgccagcggtagagacagggtttcaccatgttggccaggctggtctcaaactcctgagctcaggcgatctgcccgcctcggcctcccaaagtgctgggattacgggcgtgagccactgcacccggttcaagcgattctcctgcctcagccccctgagtagctgggattacaggcacgcgccaccactcccagatcttcacttcaggtcagctccaaggaggctatccttgcccatcttcctaaaatagagctctcaaaacctggctgttttccttcagagcactggcctccaattgctccggtagattgcaaatgacctgctttctttctgttcccgggcgtttggacccctgtcttggaccgctgtcggatagtaaatcccaagtaaggtacctgccgtcggcagatttgagctttcttcttggacacctaatacccagagtcctccaggctccggtagattgcaaatgacctgctttctttctgttcccgggcggcatcggacccgtcggagagtaaatcccaagtaaggtacctgccgttggcagatttgagctttcttcttggacacctaatacccacagtcctccaggctccggtagattgcaaatgacctgctttctttctgttcccgggtggcatcgacccgtcggagagtaaatcccaagtaaggtacctgccgttggcagatttgagctttcttcttggacacctaatacccacagtcctccagtaaatcccaagcaaggtacctgccgtcagcagatttgagctttcttcttggacacctaatacccacagtcctccaggctccggtagattgcaaatgacctgctttctttctgttcccgggctgcgttcggacccctgtcggatagtaactcccaagtaaggtacctgccgtcggcagattggagctttcttcttggagacctaatacccacagtcctccagaaaaacaaacaaagacatggatttactgtgcatattagcagatccatactggaaaatgcatggaggtttcatatacaccacttacagttttcagctcctcagtagtgacaaagccatacccatcattgtcgattcgatcaacaatcttccctagcctctccttgctctcgtccggggtgagctcgtcgaagttcttggagtcctccttgcccaggaaggcctcgtggtcgtactggaagctctggttgtcctcagggggccgctcgcccagctccgagtcgggccgcaccacgcgctctttgcgcaccgtgggcttggcccgcagaacccgcggcgccagcaccagcgccagcagcagccccagggctaaccccaggcggccaccgcgcgccatcgtcccgaggagagggcggccgggagggagacgctgagcgagcgacaacagcggcagctcgggaatgggggctcggagcgcggcggccaagttttatgttatgtatattttacaagtaaaaaaattttttcacctcagcctgaaaaaaaaaaaaaaaaaaaaaaaaaaaaaaaaaaaaaaaaaaaaaaaaaaaaaaaaa

SEQ ID NO: 4664 - DNA, 1798 bp, Homo sapiens; identical to SEQ ID NO: 1494

SEQ ID NO: 4665 - DNA, 1415 bp, Homo sapiens
gaggagagcaggccaaggggctatataacccttcagctttcagcttccctgaacaccacccagtgtggagcagcccagccaagcactgtcaggaatcctgtgaagcagctccagctatgtgtgaagaagaggacagcactgccttggtgtgtgacaatggctctgggctctgtaaggccggctttgctggggacgatgctcccagggctgttttcccatccattgtgggacgtcccagacatcagggggtgatggtgggaatgggacaaaaagacagctacgtgggtgacgaagcacagagcaaaagaggaatcctgaccctgaagtacccgatagaacatggcatcatcaccaactgggacgacatggaaaagatctggcaccactctttctacaatgagcttcgtgttgcccctgaagagcatcccaccctgctcacggaggcacccctgaaccccaaggccaaccgggagaaaatgactcaaattatgtttgagactttcaatgtcccagccatgtatgtggctatccaggcggtgctgtctctctatgcctctggacgcacaactggcatcgtgctggactctggagatggtgtcacccacaatgtccccatctatgagggctatgccttgccccatgccatcatgcgtctggatctggctggccgagatctcactgactacctcatgaagatcctgactgagcgtggctattccttcgttactactgctgagcgtgagattgtccgggacatcaaggagaaactgtgttatgtagctctggactttgaaaatgagatggccactgccgcatcctcatcctcccttgagaagagttacgagttgcctgatgggcaagtgatcaccatcggaaatgaacgtttccgctgcccagagaccctgttccagccatccttcatcgggatggagtctgctggcatccatgaaaccacctacaacagcatcatgaagtgtgatattgacatcaggaaggacctctatgctaacaatgtcctatcagggggcaccactatgtaccctggcattgccgaccgaatgcagaaggagatcacggccctagcacccagcaccatgaagatcaagatcattgcccctccggagcgcaaatactctgtctggatcggtggctccatcctggcctctctgtccaccttccagcagatgtggatcagcaaacaggaatacgatgaagccgggccttccattgtccaccgcaaatgcttctaaaacactttcctgctcctctctgtctctagcacacaactgtgaatgtcctgtggaattatgccttcagttcttttccaaatcattcctagccaaagctctgactcgttacctatgtgttttttaataaatctgaaataggctactggtaaaaaaaaaaaaaaaaaa

SEQ ID NO: 4666 - DNA, 4284 bp, Homo sapiens; identical to SEQ ID NO: 577

SEQ ID NO: 4667 - DNA, 1320 bp, Homo sapiens; identical to SEQ ID NO: 1900

SEQ ID NO: 4668 - DNA, 4380 bp, Homo sapiens; identical to SEQ ID NO: 157

SEQ ID NO: 4669 - DNA, 1398 bp, Homo sapiens
atggacatggccgactacagtgctgcactggacccagcctacaccaccctggaatttgagaatgtgcaggtgttgacgatgggcaatgacacgtccccatcagaaggcaccaacctcaacgcgcccaacagcctgggtgtcagcgccctgtgtgccatctgcggggaccgggccacgggcaaacactacggtgcctcgagctgtgacggctgcaagggcttcttccggaggagcgtgcggaagaaccacatgtactcctgcagatttagccggcagtgcgtggtggacaaagacaagaggaaccagtgccgctactgcaggctcaagaaatgcttccgggctggcatgaagaaggaagccgtccagaatgggcgggaccggatcagcactcgaaggtcaagctatgaggacagcagcctgccctccatcaatgcgctcctgcaggcggaggtcctgtcccgacagatcacctcccccgtctccgggatcaacggcgacattcgggcgaagaagattgccagcatcgcagatgtgtgtgagtccatgaaggagcagctgctggttctcgttgagtgggccgagtacatcccagctttctgcgagctccccctggacgaccaggtggccctgctcagagcccatgctggcgagcacctgctgctcggagccaccaagagatccatggtgttcaaggacgtgctgctcctaggcaatgactacattgtccctcggcactgcccggagctggcggagatgagccgggtgtccatacgtatccttgacgagctggtgctgcccttccaggagctgcagatcgatgacaatgagtatgcctacctcaaagccatcatcttctttgacccagatgccaaggggctgagcgatccagggaggatcaagcggctgcgttcccaggtgcaggtgagcttggaggactacatcaacgaccgccagtatgactcgcgtggccgctttggagagctgctgctgctgctgcccaccttgcagagcatcacctggcagatgatcgagcagatccagttcatcaagctcttcggcatggccaagattgacaacctgttgcaggagatgctgctgggagggtcccccagcgatgcaccccatgcccaccaccccctgcaccctcacctgatgcaggaacatatgggaaccaacgtcatcgttgccaacacaatgcccactcacctcagcaacggacagatgtgtgagtggccccgaccctggggacaggcagccacccctgagaccccacagccctcaccgccaggtggctcagggtctgagccctataagctcctgccgggagccgtcgccacaatcgtcaagcccctctctgccatcccccagccgaccatcaccaagcaggaagttatctag

SEQ ID NO: 4670 - DNA, 3529 bp, Homo sapiens
cgacttccggcagctggacttggaaaagcaaggagtgtcgggaatggcgaccaagcggctcgcgcggcagcttggattaattaggagaaagtcaattgcgccagcaaatggaaatctcggaagaagcaaatccaagcagttgtttgactacttaattgtcattgattttgaatcgacatgctggaatgatgggaagcaccaccatagccaggaaataattgagtttccagcagtgttgctgaacacatcaactggacagattgactctgagttccaggcttatgttcaacctcaggaacatccaattctttcagaattttgcatggaattgacaggcataaagcaggctcaagttgatgaaggagtccctctgaagatttgcttatctcagttctgtaaatggattcataagattcagcaacagaagaacattatttttgctactgggatttcagagccttctgcttctgaagtaaaattatgtgcatttgttacttggtcagactgggacttgggggtttgcctggagtatgagtgtaaaagaaagcagctgttaaaacctgtgtttttaaattcttggattgatctcagagcaacttacaagcttttctataggagaaaaccaaaaggactaagtggtgccttgcaggaagtaggaatagaattctcaggacgagaacattctgggttggacgattctcggaatactgcccttcttgcttggaaaatgatcagagatggttgtgtaatgaaaattacaaggtcgttgaacaaggttcccactaagaagaatttcagcattctggccagaaatttgaatacaattcaagttgaagaaatgtctgcctgtaacattagcatccagggtcccagcatatataataaggagcctaaaaatataataaatcctcatgaaaaagttcaaatgaagtcaatttgtgcaaattctcctataaaggcacaacaggatcaattacaagtaaaaaacaatataaaagcaagtcttcacaatgtcaaaagttccttacctctttttaatactaagtcctctacttctgtggggcagttgcagtctcctaccttgaattcacctatctatatgcaaaagcaaggaaaaaatgaacatcttgcatttaataccaaatctaaggcttcaacagttggttcagaattggtacttgtttctaccaccgttccaactgttcatcatgtttctgatttggaaatgagctctactctggactgtttacctgtgttggctgattgggaggatgtggttttactgccagcatctcagcctgaggaaaacgtagactgtacagttcccattagtgactcagacttagagatttcatttaattctggagaaagattaatggttttgaaagaattggaaatgtcaagtcatgaaaactttggagacatagaggaaactcctcaaaaatctgagacttctaagtctattgtgtacaagagtcctcacactactatttataatgtaaaagaagccaaagatccaggttcagatatttctgcctttaagttacctgaacacaaatcaagtaccttcaacagagttaatgccaatatgtctcatcctttagttttggggaaacatcctcttctttcaggtggtaccaaaaggaatccatgcagtccccaagctttcccaccagcaaaaaaacaacccttcactattcatgaagaaaagcctacatcatctgattgctccccagtaagaagttcttcctggaggcgtctcccatctatattaacttctacagttaacctacaagagccatggaagagtgggaaaatgacacctccattatgcaagtgtggtcggagatctaagagacttgttgtttctaataatggaccgaaccatggaaaagtcttctattgttgccctatcgggaaataccaagaaaacagaaaatgttgtggttatttcaaatgggaacaaacacttcaaaaggaaagagccaacagcatggttccatctcattccacagggggactcacttttagttctccagaaacaagccatatttgtgacagaaatttaagtatttccaccaaaaattctttgagactcaggccttcaatgaggaattgataacctttcatgtatgaatcctaattgttccttgaatttccaaacatgagtattctgataacatcttacactattttatttttattttatatattaatgtttactgcatttaccatactttcttcaggaaccacaagtgtaatcttttgtaaacagtatttattagattacatataataagcaacaatagtatatgatccttcttttatagttagaccttgaaacaagtctaaactatttttaaattatttgcaaaaaatgtgactaataaaaatccctagtctattttcaggtagattcttgtactttgagattatcataatcttctaactgatattttatatttttctaaaaacttttataagttctttagttttatttcaggcttgaacattggttctgatttgtatatcaacatatcagaagaattagtcaactaaagtttgaaaacctatgtagcagagatctggttcagaaactgcttctatactatacatttaaaaattaatcagcaattgatggtattatttttatattaagaaatgataggaacattgacactaatgtggaggaatttgccaaatattttatttcaaaatttagcctctgatatcataaccacaagatattttaaatcaacagtttctaagcatactaccacagtttttatgacctctccatcatcttgtggtttctagagattgacagatactatgtttgttttatagatatggtaattaatgaaacaactttaaattgtcttccattctttcttcctcagttcatttctttttgtcttcccactgatagtctttggcagctcttgaataaattctacctgttggcatcaaggggaagaaaattagcctggaaatttttatctttacataaagccaattatatagcagtttgattatgaattctaggtggaagaattagaatagtctttggaatgggttttgggtaacagccaaaatagggaaaagggtattgttaggaaagttgtcttgatattaagtatttactgtgagtccagtaagccaaaggaccaaacaaaataggttcagggtttcattttaatctcaaagattctgattcttacccatatgtcatcagttcagtttgggacatgtggtgcagcatgtgtgaagaaaatattcattaaaatgtaaaaataaacacttgaaattgtccacaacactgagcaaatattcgttataattaggatgcctacctttctgggatatttgtaaggtgctgtagtttttttaacatgctcctgaatctcctttattagttgttcttgatcatgtgacttgtaatcaggatttagaacgacaaaagcctttactacctaaaataaatatttgaaacaccaggaaaaaaaaaaaaaaaaaaaaaaaaaaaaaa

SEQ ID NO: 4671 - DNA, 1578 bp, Homo sapiens; identical to SEQ ID NO: 720

SEQ ID NO: 4672 - DNA, 1443 bp, Homo sapiens
aaggtttaaagggcgcctccatggggggcgctcagctggagctaccgagcggtgccaggccaggtgtgtgcgtccgtcggtctttccgtgcccacgccggagaccagccccggaggccgcctgggcctatccctgtgccaggcaccatgaagcaggagtctgcagccccgaacaccccgcccacctcgcagtcccctacgccgtccgctcagttcccccgaaacgacggcgaccctcaagcgctgtggattttcgggtacggctccctggtgtggaggcccgacttcgcctacagcgacagccgtgtgggcttcgtgcgcggctacagccgccgtttctggcagggagacaccttccatcggggcagcgacaagatgcctggccgtgtggtgacgctccttgaagatcatgagggctgcacttggggcgtggcataccaagtgcaaggggagcagaaccctggttacctgggccctgcgcctgaagaggccattgccacgcagatcctggcctgccggggcttctccggccacaaccttgaatacttgctgcgtctggcagacttcatgcagctctgtgggcctcaggcgcaggacgagcacctggcagccatcgtggacgctgtgggcaccatgttgccctgcttctgccccaccgagcaggctctggcgctggtgtgaggggctgagcccctgcggggagtgctcatgtggacatcagggccagacacccactccagtgcacaagacagacttgcgaccgcttgagcccactgagcagatatggtgggtggctggaggcttctctttctcagtccctgcctgtctgccagcctgcagctctcctgcttgacactgacttactacttgaaactttatttattgcaccatgttggtgtggtgggcaggtggagggcctgccctggacacaggggccctgctgagcagtggccccatcctggaacttgaccagattccccccagtgctgctgctaaccccacaccacccaggcctccacctccccagggagtctccaagagcctcgatcctctgctcactcagcccagccatccatagccctgggaattccacctgccaaggatcccagcaggctggatgagggatagtagggcatgaggagaaggagccctgtaaggactgaggccccggccagcccttctcctccaccagttccccagagcagagctggagctgatgcctggacacagctgctgagcctggcctgggcctcttacccacttggttgttttcttgtccctctgtctgtctgtctatctacttgtctgtctgggccactcctgcctgtgtgttggtctattcctgggaagctcatcactacaggccctggcaaccttcccagtctgtcccatactgttacccataaaactatctctttatctgtgcaaaaaaaaaaaaaaaaaa

SEQ ID NO: 4673 - DNA, 2373 bp, Homo sapiens; identical to SEQ ID NO: 767

SEQ ID NO: 4674 - DNA, 767 bp, Homo sapiens; identical to SEQ ID NO: 1795

SEQ ID NO: 4675 - DNA, 6052 bp, Homo sapiens; identical to SEQ ID NO: 1741

SEQ ID NO: 4676 - DNA, 1305 bp, Homo sapiens
tgcttccagtcccaggagcacaaacatcacatggtgtgtgggatacaagaggctgctgagaattacaggaagttattccaggaaatattgaacacatcgagggagaaacttgaagcagctaaaagcatattgactgatgagcaagaaagaatggcgatgattcaggaagaggaacaaaattttaaaaagatgattgagtctgagtatagtatgagactccggttgttgaatgaagagtgtgagcagaatctccagagacagcaggaatgcatatctgacttgaacctgagagaaacccttctgaatcaagcgatcaagcttgccaccgagctagaggagatgttccaggaaatgctacagagactgggccgtgtggggagagagaacatggagaaactgaaggagagtgaagccagggcttctgaacaggtccgcagcctcctaaagctcatcgtggagcttgagaaaaagtgtggggaaggcaccttggcattgctcaagtgccttgatcttgaaattcggcctccagaactgcgagaaatgaatttctgctgtgcagaagctactcagtctatgaatgcaaaatactccttagaaaggagcaagtcactgctgcttgagcatctggagcccgctcatatcacagacctgagtttatgccacataagaggactcagcagcatgttcagagtactccagagacatttaacattggatcctgaaacagctcatccctgcctggcactatctgaggacctgagaactatgagattgagacatgggcagcaggatggggctggcaacccagaaagattggatttcagtgccatggtgctggctgcggagagcttcacctcagggaggcactactgggaggtggacgtggaaaaggcaaccaggtggcaagtgggcatataccacggctctgcagacgcgaagggcagcacggccagagcttccggagagaaagtcttgctcacggggtcggtgatggggaccgagtggactctctgggtcttcccccctctgaaaaggctcttcctggaaaagaagttggacacagttggggttttccttgactgcgaacacgggcagatatcattctacaatgtgaccgagatgtccctcatttacaatttctcccattgcgccttccaaggagctctcaggcctgtgttttccctctgtatcccaaatggagacacaagtccagactccctcaccatcttacaacatggtccttcttgtgatgctactgttagcccttaatcttctgtgtgtaaaatccaagaccacgagacacca

SEQ ID NO: 4677 - DNA, 7377 bp, Homo sapiens
acagggggaggagagggaaccccaggcgcgagcgggaagaggggacctgcagccacaacttctctggtcctctgcatcccttctgtccctccacccgtccccttccccaccctctggcccccaccttcttggaggcgacaacccccgggaggcattagaagggatttttcccgcaggttgcgaagggaagcaaacttggtggcaacttgcctcccggtgcgggcgtctctcccccaccgtctcaacatgcttaggggtccggggcccgggctgctgctgctggccgtccagtgcctggggacagcggtgccctccacgggagcctcgaagagcaagaggcaggctcagcaaatggttcagccccagtccccggtggctgtcagtcaaagcaagcccggttgttatgacaatggaaaacactatcagataaatcaacagtgggagcggacctacctaggcaatgcgttggtttgtacttgttatggaggaagccgaggttttaactgcgagagtaaacctgaagctgaagagacttgctttgacaagtacactgggaacacttaccgagtgggtgacacttatgagcgtcctaaagactccatgatctgggactgtacctgcatcggggctgggcgagggagaataagctgtaccatcgcaaaccgctgccatgaagggggtcagtcctacaagattggtgacacctggaggagaccacatgagactggtggttacatgttagagtgtgtgtgtcttggtaatggaaaaggagaatggacctgcaagcccatagctgagaagtgttttgatcatgctgctgggacttcctatgtggtcggagaaacgtgggagaagccctaccaaggctggatgatggtagattgtacttgcctgggagaaggcagcggacgcatcacttgcacttctagaaatagatgcaacgatcaggacacaaggacatcctatagaattggagacacctggagcaagaaggataatcgaggaaacctgctccagtgcatctgcacaggcaacggccgaggagagtggaagtgtgagaggcacacctctgtgcagaccacatcgagcggatctggccccttcaccgatgttcgtgcagctgtttaccaaccgcagcctcacccccagcctcctccctatggccactgtgtcacagacagtggtgtggtctactctgtggggatgcagtggctgaagacacaaggaaataagcaaatgctttgcacgtgcctgggcaacggagtcagctgccaagagacagctgtaacccagacttacggtggcaactcaaatggagagccatgtgtcttaccattcacctacaatggcaggacgttctactcctgcaccacagaagggcgacaggacggacatctttggtgcagcacaacttcgaattatgagcaggaccagaaatactctttctgcacagaccacactgttttggttcagactcgaggaggaaattccaatggtgccttgtgccacttccccttcctatacaacaaccacaattacactgattgcacttctgagggcagaagagacaacatgaagtggtgtgggaccacacagaactatgatgccgaccagaagtttgggttctgccccatggctgcccacgaggaaatctgcacaaccaatgaaggggtcatgtaccgcattggagatcagtgggataagcagcatgacatgggtcacatgatgaggtgcacgtgtgttgggaatggtcgtggggaatggacatgcattgcctactcgcagcttcgagatcagtgcattgttgatgacatcacttacaatgtgaacgacacattccacaagcgtcatgaagaggggcacatgctgaactgtacatgcttcggtcagggtcggggcaggtggaagtgtgatcccgtcgaccaatgccaggattcagagactgggacgttttatcaaattggagattcatgggagaagtatgtgcatggtgtcagataccagtgctactgctatggccgtggcattggggagtggcattgccaacctttacagacctatccaagctcaagtggtcctgtcgaagtatttatcactgagactccgagtcagcccaactcccaccccatccagtggaatgcaccacagccatctcacatttccaagtacattctcaggtggagacctaaaaattctgtaggccgttggaaggaagctaccataccaggccacttaaactcctacaccatcaaaggcctgaagcctggtgtggtatacgagggccagctcatcagcatccagcagtacggccaccaagaagtgactcgctttgacttcaccaccaccagcaccagcacacctgtgaccagcaacaccgtgacaggagagacgactcccttttctcctcttgtggccacttctgaatctgtgaccgaaatcacagccagtagctttgtggtctcctgggtctcagcttccgacaccgtgtcgggattccgggtggaatatgagctgagtgaggagggagatgagccacagtacctggatcttccaagcacagccacttctgtgaacatccctgacctgcttcctggccgaaaatacattgtaaatgtctatcagatatctgaggatggggagcagagtttgatcctgtctacttcacaaacaacagcgcctgatgcccctcctgacccgactgtggaccaagttgatgacacctcaattgttgttcgctggagcagaccccaggctcccatcacagggtacagaatagtctattcgccatcagtagaaggtagcagcacagaactcaaccttcctgaaactgcaaactccgtcaccctcagtgacttgcaacctggtgttcagtataacatcactatctatgctgtggaagaaaatcaagaaagtacacctgttgtcattcaacaagaaaccactggcaccccacgctcagatacagtgccctctcccagggacctgcagtttgtggaagtgacagacgtgaaggtcaccatcatgtggacaccgcctgagagtgcagtgaccggctaccgtgtggatgtgatccccgtcaacctgcctggcgagcacgggcagaggctgcccatcagcaggaacacctttgcagaagtcaccgggctgtcccctggggtcacctattacttcaaagtctttgcagtgagccatgggagggagagcaagcctctgactgctcaacagacaaccaaactggatgctcccactaacctccagtttgtcaatgaaactgattctactgtcctggtgagatggactccacctcgggcccagataacaggataccgactgaccgtgggccttacccgaagaggccagcccaggcagtacaatgtgggtccctctgtctccaagtaccccctgaggaatctgcagcctgcatctgagtacaccgtatccctcgtggccataaagggcaaccaagagagccccaaagccactggagtctttaccacactgcagcctgggagctctattccaccttacaacaccgaggtgactgagaccaccattgtgatcacatggacgcctgctccaagaattggttttaagctgggtgtacgaccaagccagggaggagaggcaccacgagaagtgacttcagactcaggaagcatcgttgtgtccggcttgactccaggagtagaatacgtctacaccatccaagtcctgagagatggacaggaaagagatgcgccaattgtaaacaaagtggtgacaccattgtctccaccaacaaacttgcatctggaggcaaaccctgacactggagtgctcacagtctcctgggagaggagcaccaccccagacattactggttatagaattaccacaacccctacaaacggccagcagggaaattctttggaagaagtggtccatgctgatcagagctcctgcacttttgataacctgagtcccggcctggagtacaatgtcagtgtttacactgtcaaggatgacaaggaaagtgtccctatctctgataccatcatcccagctgttcctcctcccactgacctgcgattcaccaacattggtccagacaccatgcgtgtcacctgggctccacccccatccattgatttaaccaacttcctggtgcgttactcacctgtgaaaaatgaggaagatgttgcagagttgtcaatttctccttcagacaatgcagtggtcttaacaaatctcctgcctggtacagaatatgtagtgagtgtctccagtgtctacgaacaacatgagagcacacctcttagaggaagacagaaaacaggtcttgattccccaactggcattgacttttctgatattactgccaactcttttactgtgcactggattgctcctcgagccaccatcactggctacaggatccgccatcatcccgagcacttcagtgggagacctcgagaagatcgggtgccccactctcggaattccatcaccctcaccaacctcactccaggcacagagtatgtggtcagcatcgttgctcttaatggcagagaggaaagtcccttattgattggccaacaatcaacagtttctgatgttccgagggacctggaagttgttgctgcgacccccaccagcctactgatcagctgggatgctcctgctgtcacagtgagatattacaggatcacttacggagaaacaggaggaaatagccctgtccaggagttcactgtgcctgggagcaagtctacagctaccatcagcggccttaaacctggagttgattataccatcactgtgtatgctgtcactggccgtggagacagccccgcaagcagcaagccaatttccattaattaccgaacagaaattgacaaaccatcccagatgcaagtgaccgatgttcaggacaacagcattagtgtcaagtggctgccttcaagttcccctgttactggttacagagtaaccaccactcccaaaaatggaccaggaccaacaaaaactaaaactgcaggtccagatcaaacagaaatgactattgaaggcttgcagcccacagtggagtatgtggttagtgtctatgctcagaatccaagcggagagagtcagcctctggttcagactgcagtaaccactattcctgcaccaactgacctgaagttcactcaggtcacacccacaagcctgagcgcccagtggacaccacccaatgttcagctcactggatatcgagtgcgggtgacccccaaggagaagaccggaccaatgaaagaaatcaaccttgctcctgacagctcatccgtggttgtatcaggacttatggtggccaccaaatatgaagtgagtgtctatgctcttaaggacactttgacaagcagaccagctcagggagttgtcaccactctggagaatgtcagcccaccaagaagggctcgtgtgacagatgctactgagaccaccatcaccattagctggagaaccaagactgagacgatcactggcttccaagttgatgccgttccagccaatggccagactccaatccagagaaccatcaagccagatgtcagaagctacaccatcacaggtttacaaccaggcactgactacaagatctacctgtacaccttgaatgacaatgctcggagctcccctgtggtcatcgacgcctccactgccattgatgcaccgtccaacctgcgtttcctggccaccacacccaattccttgctggtatcatggcagccgccacgtgccaggattaccggctacatcatcaagtatgagaagcctgggtctcctcccagagaagtggtccctcggccccgccctggtgtcacagaggctactattactggcctggaaccgggaaccgaatatacaatttatgtcattgccctgaagaataatcagaagagcgagcccctgattggaaggaaaaagacagttcaaaagacccctttcgtcacccaccctgggtatgacactggaaatggtattcagcttcctggcacttctggtcagcaacccagtgttgggcaacaaatgatctttgaggaacatggttttaggcggaccacaccgcccacaacggccacccccataaggcataggccaagaccatacccgccgaatgtaggacaagaagctctctctcagacaaccatctcatgggccccattccaggacacttctgagtacatcatttcatgtcatcctgttggcactgatgaagaacccttacagttcagggttcctggaacttctaccagtgccactctgacaggcctcaccagaggtgccacctacaacatcatagtggaggcactgaaagaccagcagaggcataaggttcgggaagaggttgttaccgtgggcaactctgtcaacgaaggcttgaaccaacctacggatgactcgtgctttgacccctacacagtttcccattatgccgttggagatgagtgggaacgaatgtctgaatcaggctttaaactgttgtgccagtgcttaggctttggaagtggtcatttcagatgtgattcatctagatggtgccatgacaatggtgtgaactacaagattggagagaagtgggaccgtcagggagaaaatggccagatgatgagctgcacatgtcttgggaacggaaaaggagaattcaagtgtgaccctcatgaggcaacgtgttatgatgatgggaagacataccacgtaggagaacagtggcagaaggaatatctcggtgccatttgctcctgcacatgctttggaggccagcggggctggcgctgtgacaactgccgcagacctgggggtgaacccagtcccgaaggcactactggccagtcctacaaccagtattctcagagataccatcagagaacaaacactaatgttaattgcccaattgagtgcttcatgcctttagatgtacaggctgacagagaagattcccgagagtaaatcatctttccaatccagaggaacaagcatgtctctctgccaagatccatctaaactggagtgatgttagcagacccagcttagagttcttctttctttcttaagccctttgctctggaggaagttctccagcttcagctcaactcacagcttctccaagcatcaccctgggagtttcctgagggttttctcataaatgagggctgcacattgcctgttctgcttcgaagtattcaataccgctcagtattttaaatgaagtgattctaagatttggtttgggatcaataggaaagcatatgcagccaaccaagatgcaaatgttttgaaatgatatgaccaaaattttaagtaggaaagtcacccaaacacttctgctttcacttaagtgtctggcccgcaatactg

SEQ ID NO: 4678 - DNA, 4670 bp, Homo sapiens
cagacactgcgcggttccctcggagcagcaagctaaagaaagcccccagtgccggcgaggaaggaggcggcggggaaagatgcgcggcgttggctggcagatgctgtccctgtcgctggggttagtgctggcgatcctgaacaaggtggcaccgcaggcgtgcccggcgcagtgctcttgctcgggcagcacagtggactgtcacgggctggcgctgcgcagcgtgcccaggaatatcccccgcaacaccgagagactggatttaaatggaaataacatcacaagaattacgaagacagattttgctggtcttagacatctaagagttcttcagcttatggagaataagattagcaccattgaaagaggagcattccaggatcttaaagaactagagagactgcgtttaaacagaaatcaccttcagctgtttcctgagttgctgtttcttgggactgcgaagctatacaggcttgatctcagtgaaaaccaaattcaggcaatcccaaggaaagctttccgtggggcagttgacataaaaaatttgcaactggattacaaccagatcagctgtattgaagatggggcattcagggctctccgggacctggaagtgctcactctcaacaataacaacattactagactttctgtggcaagtttcaaccatatgcctaaacttaggacttttcgactgcattcaaacaacctgtattgtgactgccacctggcctggctctccgactggcttcgccaaaggcctcgggttggtctgtacactcagtgtatgggcccctcccacctgagaggccataatgtagccgaggttcaaaaacgagaatttgtctgcagtggtcaccagtcatttatggctccttcttgtagtgttttgcactgccctgccgcctgtacctgtagcaacaatatcgtagactgtcgtgggaaaggtctcactgagatccccacaaatcttccagagaccatcacagaaatacgtttggaacagaacacaatcaaagtcatccctcctggagctttctcaccatataaaaagcttagacgaattgacctgagcaataatcagatctctgaacttgcaccagatgctttccaaggactacgctctctgaattcacttgtcctctatggaaataaaatcacagaactccccaaaagtttatttgaaggactgttttccttacagctcctattattgaatgccaacaagataaactgccttcgggtagatgcttttcaggatctccacaacttgaaccttctctccctatatgacaacaagcttcagaccatcgccaaggggaccttttcacctcttcgggccattcaaactatgcatttggcccagaacccctttatttgtgactgccatctcaagtggctagcggattatctccataccaacccgattgagaccagtggtgcccgttgcaccagcccccgccgcctggcaaacaaaagaattggacagatcaaaagcaagaaattccgttgttcaggtacagaagattatcgatcaaaattaagtggagactgctttgcggatctggcttgccctgaaaagtgtcgctgtgaaggaaccacagtagattgctctaatcaaaagctcaacaaaatcccggagcacattccccagtacactgcagagttgcgtctcaataataatgaatttaccgtgttggaagccacaggaatctttaagaaacttcctcaattacgtaaaataaactttagcaacaataagatcacagatattgaggagggagcatttgaaggagcatctggtgtaaatgaaatacttcttacgagtaatcgtttggaaaatgtgcagcataagatgttcaagggattggaaagcctcaaaactttgatgttgagaagcaatcgaataacctgtgtggggaatgacagtttcataggactcagttctgtgcgtttgctttctttgtatgataatcaaattactacagttgcaccaggggcatttgatactctccattctttatctactctaaacctcttggccaatccttttaactgtaactgctacctggcttggttgggagagtggctgagaaagaagagaattgtcacgggaaatcctagatgtcaaaaaccatacttcctgaaagaaatacccatccaggatgtggccattcaggacttcacttgtgatgacggaaatgatgacaatagttgctccccactttctcgctgtcctactgaatgtacttgcttggatacagtcgtccgatgtagcaacaagggtttgaaggtcttgccgaaaggtattccaagagatgtcacagagttgtatctggatggaaaccaatttacactggttcccaaggaactctccaactacaaacatttaacacttatagacttaagtaacaacagaataagcacgctttctaatcagagcttcagcaacatgacccagctcctcaccttaattcttagttacaaccgtctgagatgtattcctcctcgcacctttgatggattaaagtctcttcgattactttctctacatggaaatgacatttctgttgtgcctgaaggtgctttcaatgatctttctgcattatcacatctagcaattggagccaaccctctttactgtgattgtaacatgcagtggttatccgactgggtgaagtcggaatataaggagcctggaattgctcgttgtgctggtcctggagaaatggcagataaacttttactcacaactccctccaaaaaatttacctgtcaaggtcctgtggatgtcaatattctagctaagtgtaacccctgcctatcaaatccgtgtaaaaatgatggcacatgtaatagtgatccagttgacttttaccgatgcacctgtccatatggtttcaaggggcaggactgtgatgtcccaattcatgcctgcatcagtaacccatgtaaacatggaggaacttgccacttaaaggaaggagaagaagatggattctggtgtatttgtgctgatggatttgaaggagaaaattgtgaagtcaacgttgatgattgtgaagataatgactgtgaaaataattctacatgtgtcgatggcattaataactacacatgcctttgcccacctgagtatacaggtgagttgtgtgaggagaagctggacttctgtgcccaggacctgaacccctgccagcacgattcaaagtgcatcctaactccaaagggattcaaatgtgactgcacaccagggtacgtaggtgaacactgcgacatcgattttgacgactgccaagacaacaagtgtaaaaacggagcccactgcacagatgcagtgaacggctatacgtgcatatgccccgaaggttacagtggcttgttctgtgagttttctccacccatggtcctccctcgtaccagcccctgtgataattttgattgtcagaatggagctcagtgtatcgtcagaataaatgagccaatatgtcagtgtttgcctggctatcagggagaaaagtgtgaaaaattggttagtgtgaattttataaacaaagagtcttatcttcagattccttcagccaaggttcggcctcagacgaacataacacttcagattgccacagatgaagacagcggaatcctcctgtataagggtgacaaagaccatatcgcggtagaactctatcgggggcgtgttcgtgccagctatgacaccggctctcatccagcttctgccatttacagtgtggagacaatcaatgatggaaacttccacattgtggaactacttgccttggatcagagtctctctttgtccgtggatggtgggaaccccaaaatcatcactaacttgtcaaagcagtccactctgaattttgactctccactctatgtaggaggcatgccagggaagagtaacgtggcatctctgcgccaggcccctgggcagaacggaaccagcttccacggctgcatccggaacctttacatcaacagtgagctgcaggacttccagaaggtgccgatgcaaacaggcattttgcctggctgtgagccatgccacaagaaggtgtgtgcccatggcacatgccagcccagcagccaggcaggcttcacctgcgagtgccaggaaggatggatggggcccctctgtgaccaacggaccaatgacccttgccttggaaataaatgcgtacatggcacctgcttgcccatcaatgcgttctcctacagctgtaagtgcttggagggccatggaggtgtcctctgtgatgaagaggaggatctgtttaacccatgccaggcgatcaagtgcaagcatgggaagtgcaggctttcaggtctggggcagccctactgtgaatgcagcagtggatacacgggggacagctgtgatcgagaaatctcttgtcgaggggaaaggataagagattattaccaaaagcagcagggctatgctgcttgccaaacaaccaagaaggtgtcccgattagagtgcagaggtgggtgtgcaggagggcagtgctgtggaccgctgaggagcaagcggcggaaatactctttcgaatgcactgacggctcctcctttgtggacgaggttgagaaagtggtgaagtgcggctgtacgaggtgtgtgtcctaaacacactcccggcagctctgtcttt

SEQ ID NO: 4679 - DNA, 7185 bp, Homo sapiens
acagggggaggagagggaaccccaggcgcgagcgggaagaggggacctgcagccacaacttctctggtcctctgcatcccttctgtccctccacccgtccccttccccaccctctggcccccaccttcttggaggcgacaacccccgggaggcattagaagggatttttcccgcaggttgcgaagggaagcaaacttggtggcaacttgcctcccggtgcgggcgtctctcccccaccgtctcaacatgcttaggggtccggggcccgggctgctgctgctggccgtcctgtgcctggggacagcggtgccctccacgggagcctcgaagagcaagaggcaggctcagcaaatggttcagccccagtccccggtggctgtcagtcaaagcaagcccggttgttatgacaatggaaaacactatcagataaatcaacagtgggagcggacctacctaggcaatgcgttggtttgtacttgttatggaggaagccgaggttttaactgcgagagtaaacctgaagctgaagagacttgctttgacaagtacactgggaacacttaccgagtgggtgacacttatgagcgtcctaaagactccatgatctgggactgtacctgcatcggggctgggcgagggagaataagctgtaccatcgcaaaccgctgccatgaagggggtcagtcctacaagattggtgacacctggaggagaccacatgagactggtggttacatgttagagtgtgtgtgtcttggtaatggaaaaggagaatggacctgcaagcccatagctgagaagtgttttgatcatgctgctgggacttcctatgtggtcggagaaacgtgggagaagccctaccaaggctggatgatggtagattgtacttgcctgggagaaggcagcggacgcatcacttgcacttctagaaatagatgcaacgatcaggacacaaggacatcctatagaattggagacacctggagcaagaaggataatcgaggaaacctgctccagtgcatctgcacaggcaacggccgaggagagtggaagtgtgagaggcacacctctgtgcagaccacatcgagcggatctggccccttcaccgatgttcgtgcagctgtttaccaaccgcagcctcacccccagcctcctccctatggccactgtgtcacagacagtggtgtggtctactctgtggggatgcagtggctgaagacacaaggaaataagcaaatgctttgcacgtgcctgggcaacggagtcagctgccaagagacagctgtaacccagacttacggtggcaactcaaatggagagccatgtgtcttaccattcacctacaatggcaggacgttctactcctgcaccacagaagggcgacaggacggacatctttggtgcagcacaacttcgaattatgagcaggaccagaaatactctttctgcacagaccacactgttttggttcagactcgaggaggaaattccaatggtgccttgtgccacttccccttcctatacaacaaccacaattacactgattgcacttctgagggcagaagagacaacatgaagtggtgtgggaccacacagaactatgatgccgaccagaagtttgggttctgccccatggctgcccacgaggaaatctgcacaaccaatgaaggggtcatgtaccgcattggagatcagtgggataagcagcatgacatgggtcacatgatgaggtgcacgtgtgttgggaatggtcgtggggaatggacatgcattgcctactcgcagcttcgagatcagtgcattgttgatgacatcacttacaatgtgaacgacacattccacaagcgtcatgaagaggggcacatgctgaactgtacatgcttcggtcagggtcggggcaggtggaagtgtgatcccgtcgaccaatgccaggattcagagactgggacgttttatcaaattggagattcatgggagaagtatgtgcatggtgtcagataccagtgctactgctatggccgtggcattggggagtggcattgccaacctttacagacctatccaagctcaagtggtcctgtcgaagtatttatcactgagactccgagtcagcccaactcccaccccatccagtggaatgcaccacagccatctcacatttccaagtacattctcaggtggagacctaaaaattctgtaggccgttggaaggaagctaccataccaggccacttaaactcctacaccatcaaaggcctgaagcctggtgtggtatacgagggccagctcatcagcatccagcagtacggccaccaagaagtgactcgctttgacttcaccaccaccagcaccagcacacctgtgaccagcaacaccgtgacaggagagacgactcccttttctcctcttgtggccacttctgaatctgtgaccgaaatcacagccagtagctttgtggtctcctgggtctcagcttccgacaccgtgtcgggattccgggtggaatatgagctgagtgaggagggagatgagccacagtacctggatcttccaagcacagccacttctgtgaacatccctgacctgcttcctggccgaaaatacattgtaaatgtctatcagatatctgaggatggggagcagagtttgatcctgtctacttcacaaacaacagcgcctgatgcccctcctgacccgactgtggaccaagttgatgacacctcaattgttgttcgctggagcagaccccaggctcccatcacagggtacagaatagtctattcgccatcagtagaaggtagcagcacagaactcaaccttcctgaaactgcaaactccgtcaccctcagtgacttgcaacctggtgttcagtataacatcactatctatgctgtggaagaaaatcaagaaagtacacctgttgtcattcaacaagaaaccactggcaccccacgctcagatacagtgccctctcccagggacctgcagtttgtggaagtgacagacgtgaaggtcaccatcatgtggacaccgcctgagagtgcagtgaccggctaccgtgtggatgtgatccccgtcaacctgcctggcgagcacgggcagaggctgcccatcagcaggaacacctttgcagaagtcaccgggctgtcccctggggtcacctattacttcaaagtctttgcagtgagccatgggagggagagcaagcctctgactgctcaacagacaaccaaactggatgctcccactaacctccagtttgtcaatgaaactgattctactgtcctggtgagatggactccacctcgggcccagataacaggataccgactgaccgtgggccttacccgaagaggccagcccaggcagtacaatgtgggtccctctgtctccaagtaccccctgaggaatctgcagcctgcatctgagtacaccgtatccctcgtggccataaagggcaaccaagagagccccaaagccactggagtctttaccacactgcagcctgggagctctattccaccttacaacaccgaggtgactgagaccaccattgtgatcacatggacgcctgctccaagaattggttttaagctgggtgtacgaccaagccagggaggagaggcaccacgagaagtgacttcagactcaggaagcatcgttgtgtccggcttgactccaggagtagaatacgtctacaccatccaagtcctgagagatggacaggaaagagatgcgccaattgtaaacaaagtggtgacaccattgtctccaccaacaaacttgcatctggaggcaaaccctgacactggagtgctcacagtctcctgggagaggagcaccaccccagacattactggttatagaattaccacaacccctacaaacggccagcagggaaattctttggaagaagtggtccatgctgatcagagctcctgcacttttgataacctgagtcccggcctggagtacaatgtcagtgtttacactgtcaaggatgacaaggaaagtgtccctatctctgataccatcatcccagctgttcctcctcccactgacctgcgattcaccaacattggtccagacaccatgcgtgtcacctgggctccacccccatccattgatttaaccaacttcctggtgcgttactcacctgtgaaaaatgaggaagatgttgcagagttgtcaatttctccttcagacaatgcagtggtcttaacaaatctcctgcctggtacagaatatgtagtgagtgtctccagtgtctacgaacaacatgagagcacacctcttagaggaagacagaaaacaggtcttgattccccaactggcattgacttttctgatattactgccaactcttttactgtgcactggattgctcctcgagccaccatcactggctacaggatccgccatcatcccgagcacttcagtgggagacctcgagaagatcgggtgccccactctcggaattccatcaccctcaccaacctcactccaggcacagagtatgtggtcagcatcgttgctcttaatggcagagaggaaagtcccttattgattggccaacaatcaacagtttctgatgttccgagggacctggaagttgttgctgcgacccccaccagcctactgatcagctgggatgctcctgctgtcacagtgagatattacaggatcacttacggagaaacaggaggaaatagccctgtccaggagttcactgtgcctgggagcaagtctacagctaccatcagcggccttaaacctggagttgattataccatcactgtgtatgctgtcactggccgtggagacagccccgcaagcagcaagccaatttccattaattaccgaacagaaattgacaaaccatcccagatgcaagtgaccgatgttcaggacaacagcattagtgtcaagtggctgccttcaagttcccctgttactggttacagagtaaccaccactcccaaaaatggaccaggaccaacaaaaactaaaactgcaggtccagatcaaacagaaatgactattgaaggcttgcagcccacagtggagtatgtggttagtgtctatgctcagaatccaagcggagagagtcagcctctggttcagactgcagtaaccactattcctgcaccaactgacctgaagttcactcaggtcacacccacaagcctgagcgcccagtggacaccacccaatgttcagctcactggatatcgagtgcgggtgacccccaaggagaagaccggaccaatgaaagaaatcaaccttgctcctgacagctcatccgtggttgtatcaggacttatggtggccaccaaatatgaagtgagtgtctatgctcttaaggacactttgacaagcagaccagctcagggagttgtcaccactctggagaatgtcagcccaccaagaagggctcgtgtgacagatgctactgagaccaccatcaccattagctggagaaccaagactgagacgatcactggcttccaagttgatgccgttccagccaatggccagactccaatccagagaaccatcaagccagatgtcagaagctacaccatcacaggtttacaaccaggcactgactacaagatctacctgtacaccttgaatgacaatgctcggagctcccctgtggtcatcgacgcctccactgccattgatgcaccatccaacctgcgtttcctggccaccacacccaattccttgctggtatcatggcagccgccacgtgccaggattaccggctacatcatcaagtatgagaagcctgggtctcctcccagagaagtggtccctcggccccgccctggtgtcacagaggctactattactggcctggaaccgggaaccgaatatacaatttatgtcattgccctgaagaataatcagaagagcgagcccctgattggaaggaaaaagacaggacaagaagctctctctcagacaaccatctcatgggccccattccaggacacttctgagtacatcatttcatgtcatcctgttggcactgatgaagaacccttacagttcagggttcctggaacttctaccagtgccactctgacaggcctcaccagaggtgccacctacaacatcatagtggaggcactgaaagaccagcagaggcataaggttcgggaagaggttgttaccgtgggcaactctgtcaacgaaggcttgaaccaacctacggatgactcgtgctttgacccctacacagtttcccattatgccgttggagatgagtgggaacgaatgtctgaatcaggctttaaactgttgtgccagtgcttaggctttggaagtggtcatttcagatgtgattcatctagatggtgccatgacaatggtgtgaactacaagattggagagaagtgggaccgtcagggagaaaatggccagatgatgagctgcacatgtcttgggaacggaaaaggagaattcaagtgtgaccctcatgaggcaacgtgttatgatgatgggaagacataccacgtaggagaacagtggcagaaggaatatctcggtgccatttgctcctgcacatgctttggaggccagcggggctggcgctgtgacaactgccgcagacctgggggtgaacccagtcccgaaggcactactggccagtcctacaaccagtattctcagagataccatcagagaacaaacactaatgttaattgcccaattgagtgcttcatgcctttagatgtacaggctgacagagaagattcccgagagtaaatcatctttccaatccagaggaacaagcatgtctctctgccaagatccatctaaactggagtgatgttagcagacccagcttagagttcttctttctttcttaagccctttgctctggaggaagttctccagcttcagctcaactcacagcttctccaagcatcaccctgggagtttcctgagggttttctcataaatgagggctgcacattgcctgttctgcttcgaagtattcaataccgctcagtattttaaatgaagtgattctaagatttggtttgggatcaataggaaagcatatgcagccaaccaagatgcaaatgttttgaaatgatatgaccaaaattttaagtaggaaagtcacccaaacacttctgctttcacttaagtgtctggcccgcaatactg

SEQ ID NO: 4680 - DNA, 2773 bp, Homo sapiens
tcagggctgccagaatggcttttgctgagtgcatagcaccagcgtgtgtcatgtcttggctgcgtttctggggcccatggcccctccttacgtggcaactattgtctttactagtcaaggaggctcagcctctggtgtgggtcaaggacccgctccagctgacctctaaccccctggggccacctgagccctggtcttcccgctcctcccatctcccatgggaatctccccatgcacctgctcccccagcagccccgggggactttgattacctggggccctctgcttcttcgcagatgtcagccctgcctcaggaaccaactgaaaatttggctccattcctgaaggaattggattcagctggagagctgcccctggggccagagccgttcttggctgcacatcaggacttaaatgacaagcggactccagaagaaaggctcccagaggtggttccgcttctcaaccgggatcagaaccaggccctagttcagcttcctcgcctcaagtgggttcaaactacagatctagatcgggctgcaggtcatcaggcagatgaaatacttgttccactagacagtaaggtttcaagaccaaccaaatttgttgtttcgcccaagaacctgaagaaagatctagctgaacgttggagccttcctgagattgttgggattccacaccaattatccaaacctcagcgtcagaaacagactttgccagatgattatttgagtatggacacactgtatcccggcagcctacctccagaactccgggtgaacgcagatgagcctccagggcctcctgagcaagttggactttctcaattccatctagagcccaaaagtcaaaatccagagacccttgaagacatccagtcctcttcactccaggaagaagccccagcgcagcttctacagctccctcaggaggtagaaccttcaacccagcaggaggccccagctctgcctccagagtcctctatggagagtctagctcaaactccactgaatcatgaagtgacagttcaacctccaggtgaggatcaagctcattataatttgcccaagtttacagtcaaacctgcagatgtggaggttaccatgacttcagagcctaaaaatgagacagaatctacccaagcccagcaggaggccccaattcagcctcccgaggaggcggaaccttcttctacagccctgaggactacagatcctcctccagaacaccctgaggtgacacttccaccttcagacaagggtcaggctcagcattcacacctgactgaagccacagttcaacctctggacctggagcttagcataactacagagcctactacagaggttaaaccgtctccaaccacggaggaaacctcagctcagcctccagacccggggcttgccataactccagaacccactacagagattggacattccacagccctggagaagactagagctcctcatccagaccaggttcagactctgcatcgaagcctgactgaagtcacaggtccacctacaaagttagaatcttcgcaggattcattggtgcagtctgaaactgcaccagaggaacagaaggcctccacaagcaccaacatatgtgagctctgcacctgcggagatgagactctgtcatgtgttggtctcagcccaaagcagaggctccgccaagtgcctgtgccagagcccgacacctacaatggcatcttcaccaccttaaatttccaaggaaactatatttcataccttgatggaaatgtatggaaagcatacagttggaccgagaaactaattctcagtgaaaattatttgactgaattacctaaggattcatttgaaggcctgctatacctccagtatttaattctcaatcgcaatcctctgactactgtcgaagatccatatctctttgaactgccggcattaaaatatctagacatgggaacaacacacatcacacttacaacacttaagaacattctcacgatgactgttgaactggaaaaactgatcttacctagccatatggcctgctgcctctgccaatttaaaaatagcattgaggctgtctgcaagacagtcaagctgcattgcaacactgcatgtctgactaacagcatacattgtcctgaagaagcatctgtagggaatccagaaggagcgttcatgaagatgttacaagcccggaagcagcacatgagcactcagctgactattgagtcggaggcgccctcagacagcagtggcatcaacttgtcaggctttgggggtgatcagcttgaaattcagctaaccgagcagctacggtccctcatccccaacgaggatgtgagaaagttcatgtctcatgttatccggaccttgaaaatggaatgttcagaaacacatgtgcaagggagctgtgccaagctcatgttgcgaacaggcctcctgatgaagcttctcagcgagcagcaggaagcaaaggcattgaatgtagaatgggatacggaccaacaaaaaacaaattatattaatgagaacatggaacagaatgaacagaaagagcagaagtcaagtgagctcatgaaagaagttccaggagatgactataagaacaaactcatcttcgcaatatctgtgactgtaatactaataattttgattataattttttgtcttatagaggtgaattcacataaaagggcatcagaaaaatacaaagacaacccatcaatatcaggagcctgagcatgagttaaagcatgtggatggcctggagc

SEQ ID NO: 4681 - DNA, 3691 bp, Homo sapiens
taccgggttgtcttcttcctgaagagcaatggagccgcttttacttggaagaggactaatcgtatatctaatgttcctcctgttaaaattctcaaaagcaattgaaataccatcttcagttcaacaggttccaacaatcataaaacagtcaaaagtccaagttgcctttcccttcgatgagtattttcaaattgaatgtgaagctaaaggaaatccagaaccaacattttcgtggactaaggatggcaaccctttttatttcactgaccatcggataattccatcgaacaattcaggaacattcaggatcccaaacgaggggcacatatctcactttcaagggaaataccgctgctttgcttcaaataaactgggaatcgctatgtcagaagaaatagaatttatagttccaagtgttccaaaattcccaaaagaaaaaattgaccctcttgaagtggaggagggagatccaattgtcctcccatgcaatcctcccaaaggcctcccacctttacacatttattggatgaatattgaattagaacacatcgaacaagatgaaagagtatacatgagccaaaagggagatctatacttcgcaaacgtggaagaaaaggacagtcgcaatgactactgttgctttgctgcatttccaagattaaggactattgtacagaaaatgccaatgaaactaacagttaacagttcaaattccatcaagcaaagaaaacccaaactgctgttgcctcccactgagagtggcagtgagtcttcaattaccatcctcaaaggggaaatcttgctgcttgagtgttttgctgaaggcttgccaactccacaggttgattggaacaaaattggtggtgacttaccaaaggggagagaagcaaaagaaaattatggcaagactttgaagatagagaatgtctcctaccaggacaaaggaaattatcgctgcacagccagcaatttcttgggaacagccactcacgattttcacgttatagtagaagagcctcctcgctggacaaagaagcctcagagtgctgtgtatagcaccggaagcaatggcatcttgttatgtgaggctgaaggagaacctcaacccacaatcaagtggagagtcaatggctccccagttgacaatcatccatttgctggtgatgttgtcttccccagggaaatcagttttaccaaccttcaaccaaatcatactgctgtgtaccagtgtgaagcctcaaatgtccatggaactatccttgccaatgccaatattgatgttgtggatgtccgtccattgatacaaaccaaagatggagaaaattacgctacagtggttgggtacagtgctttcttacattgcgagttctttgcttcgcctgaggcagtcgtgtcctggcagaaggtggaagaagtgaaacccctggagggcaggcggtatcatatctatgaaaatggcacattgcagatcaacagaaccaccgaagaagatgctgggtcttactcatgttgggtagaaaatgctataggaaaaactgcagtcacagccaatttggatattagaaatgctacaaaacttagagtttctcctaagaatcctcgtatccccaaattgcatatgcttgaattacattgtgaaagcaaatgtgactcacatttgaaacacagtttgaagttgtcctggagtaaagatggagaagcctttgaaattaatggcacagaagatggcaggataattattgatggagctaatttgaccatatctaatgtaactttagaggaccaaggtatttactgctgttcagctcatactgctctagacagtgctgccgatataactcaagtaactgttcttgatgttccggatccaccagaaaaccttcacttgtctgaaagacagaacaggagtgttcggctgacctgggaagctggagctgaccacaacagcaatattagcgagtatattgttgaatttgaaggaaacaaagaagagcctggaaggtgggaggaactgaccagagtccaaggaaagaaaaccacagttatcttacctttggctccatttgtgagataccagttcagggtcatagccgtgaacgaagtagggagaagtcagcctagccagccgtcagaccatcatgaaacaccaccagcagctccagataggaatccacaaaacataagggttcaagcctctcaacccaaggaaatgattataaagtgggagcctttgaaatccatggagcagaatggaccaggcctagagtacagagtgacctggaagccacagggagccccagtggagtgggaagaagaaacagtcacaaaccacacattgcgggtgatgacgcctgctgtctatgccccttatgatgtcaaggtccaggctatcaatcaactaggatctgggcctgaccctcagtcagtgactctctattctggagaagactatcctgatacagctccagtgatccatggggtggacgttataaacagtacattagttaaagttacctggtcaacagttccaaaggacagagtacatggacgtctgaaaggctatcagataaattggtggaaaacaaaaagtctgttggatggaagaacacatcccaaagaagtgaacattctaagattttcaggacaaagaaactctggaatggttccttccttagatgcctttagtgaatttcatttaacagtcttagcctataactctaaaggagctggtcctgaaagtgagccttatatatttcaaacaccagaaggagtacctgaacagccaacttttctaaaggtcatcaaagttgataaagacactgccactttatcttggggactacctaagaaattaaatggaaacttaactggctatcttttgcaatatcagataataaatgacacctacgagattggagaattaaatgatattaacattacaactccatcaaagcccagctggcacctctcaaacctgaatgcaactaccaagtacaaattctacttgagggcttgcacttcacagggctgtggaaaaccgatcacggaggaaagctccaccttaggagaagggagtaaaggtatcgggaagatatcaggagtaaatcttactcaaaagactcacccagtagaggtatttgagccgggagctgaacatatagttcgcctaatgactaagaattggggcgataacgatagcatttttcaagatgtaattgagacaagagggagagaatatgctggtttatatgatgacatctccactcaaggctggtttattggactgatgtgtgcgattgctcttctcacactactattattaactgtttgctttgtgaagaggaatagaggtggaaagtactcagttaaagaaaaggaagatttgcatccagacccagaaattcagtcagtaaaagatgaaacctttggtgaatacagtgacagtgatgaaaagcctctcaaaggaagccttcggtcccttaatagggatatgcagcctactgaaagtgctgacagcttagtcgaatacggagagggagaccatggtctcttcagtgaagatggatcatttattggtgcctacgctggatctaaggaaaagggatctgttgaaagcaatggaagttctacagcaacttttccccttcgggcataaacacaacatatgtaagcaacgctactggttcacccc

SEQ ID NO: 4682 - DNA, 2219 bp, Homo sapiens
atgaagccaggagcgcctcaaagtccagcctgctgttgaccaacactaacagatgagcaaggagctggcagcaatggggcctggagcttcaggggacggggtcaggactgagacagctccacacatagcactggactccagagttggtctgcacgcctacgacatcagcgtggtggtcatctactttgtcttcgtcattgctgtggggatctggtcgtccatccgtgcaagtcgagggaccattggcggctatttcctggccgggaggtccatgagctggtggccaattggagcatctctgatgtccagcaatgtgggcagtggcttgttcatcggcctggctgggacaggggctgccggaggccttgccgtaggtggcttcgagtggaacatgaggaaatcaaggtctggaggagacagagggatccatccaaggtcacacgggaggactggggcaacctggctgctcctggcccttggctgggtcttcgtccctgtgtacatcgcagcaggtgtggtcacaatgccgcagtatctgaagaagcgatttgggggccagaggatccaggtgtacatgtctgtcctgtctctcatcctctacatcttcaccaagatctcgactgacatcttctctggagccctcttcatccagatggcattgggctggaacctgtacctctccacagggatcctgctggtggtgactgccgtctacaccattgcaggtggcctcatggccgtgatctacacagatgctctgcagacggtgatcatggtagggggagccctggtcctcatgtttctgggctttcaggacgtgggctggtacccaggcctggagcagcggtacaggcaggccatccctaatgtcacagtccccaacaccacctgtcacctcccacggcccgatgctttccacatgcttcgggaccctgtgagtggggacatcccttggccaggtctcattttcgggctcacagtgctggccacctggtgttggtgcacagaccaggtcattgtgcagcggtctctctcggccaagagtctgtctcatgccaagggaggctccgtgctggggggctacctgaagatcctccccatgttcttcatcgtcatgcctggcatgatcagccgggccctgttcccagacgaggtgggctgcgtggaccctgatgtctgccaaagaatctgtggggcccgagtgggatgttccaacattgcctaccctaagttggtcatggccctcatgcctgttggtctgcgggggctgatgattgccgtgatcatggccgctctcatgagctcactcacctccatcttcaacagcagcagcaccctgttcaccattgatgtgtggcagcgcttccgcaggaagtcaacagagcaggagctgatggtggtgggcagagtgtttgtggtgttcctggttgtcatcagcatcctctggatccccatcatccaaagctccaacagtgggcagctcttcgactacatccaggctgtcaccagttacctggccccacccatcaccgctctcttcctgctggccatcttctgcaagagggtcacagagcccggagctttctggggcctcgtgtttggcctgggagtggggcttctgcgtatgatcctggagttctcatacccagcgccagcctgtggggaggtggaccggaggccagcagtgctgaaggacttccactacctgtactttgcaatcctcctctgcgggctcactgccatcgtcattgtcattgtcagcctctgtacaactcccatccctgaggaacagctcacacgcctcacatggtggactcggaactgccccctctctgagctggagaaggaggcccacgagagcacaccggagatatccgagaggccagccggggagtgccctgcaggaggtggagcggcagagaactcgagcctgggccaggagcagcctgaagccccaagcaggtcctggggaaagttgctctggagctggttctgtgggctctctggaacaccggagcaggccctgagcccagcagagaaggctgcgctagaacagaagctgacaagcattgaggaggagccactctggagacatgtctgcaacatcaatgctgtccttttgctggccatcaacatcttcctctggggctattttgcgtgattccacagacctggcttcagtgtagacagattaaacaaagcccaagcctgtcagccac

SEQ ID NO: 4683 - DNA, 5341 bp, Homo sapiens; identical to SEQ ID NO: 4391

SEQ ID NO: 4684 - DNA, 1870 bp, Homo sapiens
acaggaagccacatcaaaccctggggcctttgctgggcctctccatctgcccagttactgggaggtagatagccccaggaaggaatccagtcaggcctgggcaccaggccaggagtggataaagctagaaagagacaccacagaagagaagatgtttgaacagctgaagccaatcgaacctgtacagaagacgctcccatgggtgggcgaggtagctgccaccctgcaggaagccatgaagagagattgctggagggaggcacgggtgaagaagaagccagtcacctttgaggatgtggcagtgaatttcacccaggaagagtgggactgtctagatgccagccagagggtcctttaccaggatgttatgtcggaaacctttaagaatctaacatctgtggccagaatctttctgcataagccagagctaatcaccaagcttgagcaagaagaggaacagtggagagagtttgtccatctcccaaacacagaaggcctttcagaaggcaagaagaaagagcttcgagaacaacatcccagtctgagagatgaggggactagtgatgacaaggtcttccttgcatgcagaggggccggccagtgccccctatctgccccagctgggactatggacaggacccgggtgcttcaagcatcccaggctgggccaccctttttttgctacacctgtgacaaatgtttcagcaggcgctcctacctctatagccaccagtttgttcacaatcccaagctgactaacagctgcagtcagtgtgggaagttgtttcggagccccaagtccctcagctatcacagacgcatgcatcttggggagaggcccttctgttgcacgctctgtgacaagacctactgtgatgcttctggactaagtcgtcaccgccgcgtccatctgggttaccggccccattcatgctctgtgtgtgggaagagcttccgggaccagtctgagctcaaacgccaccagaagatacaccaaaaccaggagccagtggatggaaaccaggagtgtactttgaggattccaggcacccaggctgaattccagacacccatcgccagaagccaggggtccatccaggggcttttggatgtgaaccatgcaccagtggccaggtcccaggaacccatatttagaactgagggtcctatggcccagaaccaggcatctgtacttaagaaccaagcacctgtgaccaggacccaggcacccatcactggaaccctctgtcaggatgccagatccaactctcatccagtgaagccctcaagactcaatgtcttctgttgcccccattgttctttgacttttagcaagaaatcctatctctccagacaccagaaggcccacctcacagagccgcccaactactgcttccattgcagcaagtctttcagctcattttccaggctggtcagacaccagcagacccactggaagcagaagagctacctttgccctatctgtgacctctcctttggggagaaagagggccttatggatcactggaggggctataaaggcaaggacctgtgccagagcagccaccataaatgccgggtgatcctgggccagtggcttggcttctctcatgatgtccccactatggctggggaggaatggaagcatggaggtgatcaatctccccccaggatccatacccccaggagaagaggcctaagagagaaggcctgcaaaggagacaaaacaaaggaggcagtgagcatcttgaaacataaataaatggcctttctgactgagctctttctttgtgtttagttttcctgaggactgacctctggggtaatgaggctggagtagagggagacaggtgcgtggataaggaaggaa

SEQ ID NO: 4685 - DNA, 10374 bp, Homo sapiens
gctttctccccagacccaccgagtggcggcggaggcgagatgcgcgggggcgtgctcctggtcttgctgctgtgtgtcgccgcgcagtgccggcagagaggcctgtttcctgccattctcaatcttgccagcaatgctcacatcagcaccaatgccacctgtggcgagaaggggccggagatgttctgcaaacttgtggagcatgtgccaggtcggcccgtccgaaacccacagtgccggatctgtgatggcaacagcgcaaaccccagagaacgccatccaatatcacatgccatagatggcaccaataactggtggcaaagtcccagcattcagaatgggagagaatatcactgggtcacaatcactctggacttaagacaggtctttcaagttgcatatgtcatcattaaagctgccaatgcccctcgacctggaaactggattttggagcgttctctggatggcaccacgttcagcccctggcagtattatgcagtcagcgactcagagtgtttgtctcgttacaatataactccaagacgagggccacccacctacagggctgatgatgaagtgatctgcacctcctattattccagattggtgccacttgagcatggagagattcatacatcactcatcaatggcagaccaagcgctgacgatctttcacccaagttgttggaattcacttctgcacgatatattcgccttcgcttgcaacgcattagaacgctcaatgcagatctcatgacccttagccaccgggaacctaaagaactggatcctattgttaccagacgctattattattcaataaaggacatttctgttggaggcatgtgtatctgctatggccatgctagtagctgcccatgggatgaaactacaaagaaactgcagtgtcaatgtgagcataatacttgcggggagagctgtaacaggtgctgtcctgggtaccatcagcagccctggaggccgggaaccgtgtcctccggcaatacatgtgaagcatgtaattgtcacaataaagccaaagactgttactatgatgaaagtgttgcaaagcagaagaaaagtttgaatactgctggacagttcagaggaggaggggtttgcataaattgcttgcagaacaccatgggaatcaactgtgaaacctgtattgatggatattatagaccacacaaagtaagagtatttctttgccattgctgatcttcatcatcttccccaggtggaaaagagactttgtcaagtcttaacctctgcattggagacttttgtaatatttcatttatatccttgttatgccagtagtgtttttatatatatatttcctactctatcctgcttttcttgctcaaaataagatgtcagtcattgttatttatcttgaattcaggggtccattagctatgtaatcctgggtcataatactaactacagatgtgaaaattcagctataactaaagcagctgtctcttgcctgtaggagatgttcaggcaatcttttttttttaatttttattttttgagacggagtctcgctctgtcgccaggctggagtgcagtggtgcgatctcggctcactgcaacctccacctcccgggttcaagcgattctcctgcctcagcctcccgagtagctgggattacaggcatgttccaccacacccagctaatttttgtatttttagtagagacagggtttcaccatgtcggccaggatggtctcaatcccttgaccttgtggtccgcctgccttggcctcccagagtgctgggattacagatgtgagccaccacgcctggccgtgttcagccaatctttaattgacttgatatgtagttcttacatgagtccttgtggtgtcctggttataacgtggctctgagagacagcagcgcgaggggggctggagagcagggataatagaaaaagatgacactttgctaagggtactaactactgccaccatcaaaaagatgtttgggcttcctggcttgggatcatcttatcttcctcaaacctaacccccacccccatgcacaaaatcatcgtaatagtcccatcttgagtaaaaagccaataccttcttatttatactattgccaacattgctgttatttctagtaagagaatccagggcaacctctgcctttcaggtgtctccttatgaggatgagccttgccgcccctgtaattgtgaccctgtggggtccctcagttctgtctgtattaaggatgacctccattctgacttacacaatgggaagcagccaggtcagtgcccatgtaaggaaggttatacaggagaaaaatgtgatcgctgccaacttggctataaggattacccgacctgtgtctcctgtgggtgcaacccagtgggcagtgccagtgatgagccctgcacagggccctgtgtttgtaaggaaaacgttgaggggaaggcctgtgatcgctgcaagccaggattctataacttgaaggaaaaaaacccccggggctgctccgagtgcttctgctttggcgtttctgatgtctgcagcagcctctcttggcctgttggtcaggtaaacagtatgtccgggtggctggtcaccgacttgatcagtcccaggaagatcccgtctcagcaagatgcactaggcgggcgccatcaggtcagcatcaacaacaccgcggtcatgcagagactggctcccaagtactactgggcagcccccgaggcctaccttggaaataagctgactgcgtttggcggattcctgaaatacacggtgtcctacgatattccggtagagacggtagacagtaacctcatgtcgcatgctgacgtcatcattaagggaaacggactcactttaagcacacaggctgagggtctgtcattgcagccttatgaagagtacctaaacgtggttagacttgtgcctgaaaacttccaagattttcacagcaaaaggcagattgatcgtgaccagctgatgactgtcattgccaatgtgacacatcttttgatcagagccaactacaattctgcaaaaatggctctttacaggttggagtccgtctctctggacatagccagctctaatgccatcgacctggtggtggctgctgatgtggagcactgtgaatgtccgcaaggctacacagggacctcctgtgagtcgtgcctctctggctattaccgcgtggatggaatactctttggaggaatttgtcaaccctgtgaatgccacggccatgcagctgagtgtaatgttcacggcgtttgcattgcgtgtgcgcacaacaccaccggcgtccactgtgagcagtgcttgcccggcttctacggggagccttcccgagggacacctggggactgccagccctgcgcctgccctctcaccatagcctccaacaatttcagccccacctgccacctcaatgatggagatgaagtggtctgtgactggtgtgccccgggctactcaggagcttggtgtgagagatgcgcagatggttactatggaaacccaacagtgcctggcgaatcttgtgttccctgtgactgcagcggcaacgtggacccctcggaggctggtcactgtgactcagtcaccggggagtgcctgaagtgcctggggaacacagatggcgcccactgtgaaaggtgtgctgacgggttctatggggacgctgtgacagccaagaactgccgcgcctgtgaatgccatgtgaaaggctcccattctgccgtgtgccatcttgagaccgggctctgcgactgcaaaccaaacgtgactggacagcagtgtgaccagtgcttgcatggctattatgggctggactcaggccatggctgccggccctgcaactgcagcgtggcaggctccgtgtcagatggctgcacggatgaaggccagtgtcactgtgtcccaggtgtggcagggaaaaggtgtgacaggtgtgcccatggcttctacgcctaccaggatggtagctgtacaccctgtgactgcccacacactcagaatacctgcgacccagaaactggagagtgtgtctgcccccctcacacacagggtgtgaagtgtgaagaatgtgaggatgggcactggggctacgatgcggaggtggggtgccaggcctgcaattgcagtctcgtggggtcgactcatcatcggtgcgatgtggtcaccggccattgccagtgcaagtcaaaatttggtggccgggcctgcgatcagtgttccttgggttacagagactttcccgactgtgttccctgtgactgtgacctgagggggacgtcgggggacgcctgcaacctggagcagggtctctgcggctgtgtggaggaaaccggggcctgcccttgcaaggaaaatgtctttggccctcagtgcaacgaatgtcgagagggcaccttcgctctccgcgcagacaaccccctgggctgcagcccgtgcttctgctccgggctgtcccacctctgctcagagctggaggactacgtgaggaccccagtaacgctgggctccgatcagcctcttctgcgtgtggtttctcagagtaacttgaggggcacgactgagggggtttactaccaggcccccgacttcctgctggatgccgccaccgtccggcagcacatccgtgcagagccgttttactggcggctgccgcagcagttccaaggagaccagctcatggcctatggtggcaaactgaagtacagcgtggccttctattctttggatggcgtcggcacctccaattttgagcctcaagttctcatcaaaggtggtcggatcagaaagcaagtcatttacatggatgcaccagccccagagaatggagtgagacaggaacaagaagtagcaatgagagagaatttttggaaatattttaactctgtttctgaaaaacctgtcacgcgagaggattttatgtctgtcctcagcgatattgagtacatcctcatcaaggcatcgtatggtcaaggattacagcagagcagaatctcagacatttcaatggaggttggcagaaaggctgaaaagctgcacccagaagaagaggttgcatctcttttagagaattgtgtctgtcctcctggcactgtgggattctcatgtcaggactgcgcccctgggtaccacagagggaagctcccagcagggagtgacaggggaccacgccctctggttgctccttgtgttccctgcagttgcaacaaccacagtgacacctgtgaccccaacaccgggaagtgtctgaactgtggcgataacacagcaggtgaccattgtgatgtgtgtacttctggctactacgggaaggtgactggctcagcaagtgactgtgctctgtgtgcctgtcctcacagccctcctgccagttttagtcccacttgtgtcttggaaggggaccacgatttccgttgtgacgcctgtctcctgggctatgaaggaaaacactgtgaaaggtgctcctcgagctattatgggaaccctcaaacaccaggtggcagttgccagaagtgtgactgcaacccgcacggctctgtccacggtgactgtgaccgcacatctgggcagtgcgtttgcaggctgggggcctcggggctccggtgcgatgagtgtgaaccgaggcacattctgatggaaacagattgtgtttcctgtgatgatgagtgtgtaggtgtgctgctgaatgacttggatgagattggtgatgccgttctttctctgaacctcgctggcattatccctgtcccatatggaattttgtcaaacctggaaaatacaactaaatatctccaggaatctttattaaaagaaaatatgcaaaaggacctgggaaaaattaagcttgaaggtgttgcagaagaaacggacaacctgcaaaagaagctcactaggatgttagcgagtacccaaaaggtgaatagggcaactgagagaatcttcaaggagagtcaagacctggccatagccattgagaggctgcagatgagcatcacagaaattatggaaaagacaactttaaatcagactttggatgaagatttcctactacccaattctactcttcagaacatgcaacagaatggtacatctttgctagaaatcatgcagataagagacttcacacagttgcaccaaaatgccacccttgaactcaaggctgctgaagatttattgtcacaaattcaggaaaattaccagaagccgctggaagaattggaggtattgaaagaagcagcaagccacgtcctttcaaagcacaacaatgaactaaaggcggctgaggcgctcgtgagggaagctgaggcaaagatgcaggaaagcaaccacctgctgctcatggtcaatgctaatctgagagaattcagtgataaaaagctgcatgttcaagaagaacaaaatctgacctcagagctcattgtccaaggaagaggattgatagatgctgctgctgcacaaacagatgctgtacaagatgctctagagcacttagaggatcaccaggataagctacttttatggtctgccaaaatcaggcaccacatagatgacctggtcatgcacatgtcccaaaggaacgcagtcgacctggtctacagagctgaggaccatgccgctgagttccagagactagcagatgttctgtacagtggccttgaaaacatcagaaatgtgtccctgaatgccaccagtgcagcctatgtccattacaacatccagagcctgattgaagaatcggaggaactggccagagatgctcacaggactgtgactgagacgagcctgctctcagaatcccttgtttctaacgggaaagcggccgtgcagcgcagctccagatttctaaaagaaggcaacaacctcagcaggaagcttccaggtattgcattggaactgagtgaattgagaaataagacaaacagatttcaagagaatgctgttgaaattaccaggcaaaccaatgaatcactcttgatacttagagcaattcctaaaggtataagagacaagggagccaaaaccaaagagctggccacgtctgcaagccagagcgcggtgagcacgctgagggacgtggcggggctgagccaggagctgctgaacacatctgccagcctgtccagggtcaacaccacattacgagagacacaccagcttctgcaggactccaccatggccactctgttggctggaagaaaagtcaaagacgtggaaactcaagccaaccttttgtttgatcggttgaagcctttgaagatgttagaggagaatctgagcagaaacctatcagaaattaaactgttgatcagccaggcccgcaaacaagcagcttctattaaagtcgccgtgtctgcagacagagattgcatccgggcctaccagcctcagatttcctctaccaactacaataccttaacactaaatgttaagacacaggaacccgataatcttctcttctacctcggtagcagcaccgcttctgatttccttgcagtggagatgcggcgagggagagtggccttcctgtgggacctgggctccgggtccacacgcttggagtttccagactttcccattgatgacaacagatggcacagtatccatgtagccagatttggaaacattggttcactgagtgtaaaggaaatgagctcaaatcaaaagtcaccaacaaaaacaagtaaatcccctgggacagctaatgttctggatgtaaacaattcaacactcatgtttgttggaggtcttggaggacaaatcaagaaatctcctgctgtgaaggttactcattttaaaggctgcttgggggaggccttcctgaatggaaaatccataggcctatggaactatattgaaagggaaggcaagtgccgtgggtgcttcggaagctcccagaatgaagacccttccttccattttgacgggagtgggtactctgtcgtggagaagtcacttccggctaccgtgacccagataatcatgctttttaataccttttcacctaatggacttcttctctacctgggttcatacggcacaaaagactttttatccatcgagctgtttcgtggcagagtgaaggttatgactgacctgggttcaggacccattacccttttgacagacagacgttataacaatggaacctggtacaaaattgccttccagcgaaaccggaagcaaggagtgctagcagttatcgatgcctataacaccagtaataaagaaaccaagcagggcgagactccgggagcatcttctgacctcaaccgcctagacaaggacccgatttatgtgggtggattaccaaggtcaagagttgtaaggagaggtgtcaccaccaaaagctttgtgggctgcatcaagaacctggaaatatccagatcaacctttgacttactcagaaattcctatggagtgagaaaaggctgtttactggagcccatccggagtgttagcttcctgaaaggcggctacattgaattgccacccaaatctttgtcaccagaatcagaatggctggtaacatttgccaccacgaacagcagtggcatcatcctggctgccctcggcggggatgtggagaagcggggtgatcgtgaggaagcacacgtgcccttcttttccgtcatgctgatcggaggcaacattgaggtacatgtcaatcctggggatgggacaggcctgagaaaagctctcctgcacgctcccacgggtacctgcagtgatggacaagcgcattccatctccttggtcaggaatcggagaattatcactgtccaattggatgagaacaatcctgtggaaatgaagttgggcacattagtagaaagcaggacgataaatgtgtccaatctgtacgtcgggggaattccagagggagaggggacgtcactgctcacaatgagaagatcgttccatggctgtatcaaaaacctgatcttcaatttggaacttttggatttcaacagtgcagttggccatgagcaagtcgacctggacacctgctggctgtcagaaaggcctaagctggctcccgatgcagaggacagcaagctcttgccagagccccgggcttttccagaacagtgtgtggtggatgcagctctggagtacgttcccggcgctcaccagtttggtctcacacaaaacagccatttcatcttgccttttaatcagtcggctgtcagaaagaagctctcggttgagctaagcatccgcacgttcgcctccagcggcctgatttactacatggctcatcagaaccaagcagactacgctgtgctccagctgcacgggggccgcctccacttcatgtttgaccttggcaaaggcagaacaaaggtctctcaccctgcactgctcagtgatggcaagtggcacacggtcaagacagactatgttaaaagaaaaggcttcataactgtcgacggccgagagtctcccatggtgactgtggtgggagatggaaccatgctggatgtggagggtttgttctacctaggaggcctgccctcccagtaccaggccaggaaaattggaaatatcacccacagcatccctgcctgcattggggatgtgacggttaacagcaaacagctggacaaggacagcccggtgtctgccttcacggtgaacaggtgctacgcagtggcccaggaaggaacatactttgacggaagcggatatgcagctcttgtcaaagagggctacaaagtccagtcagatgtgaacatcacactggagtttcgaacctcctcgcagaatggcgtcctcctggggatcagcactgccaaagtggatgccattggactagagcttgtggacggcaaggtcttgttccatgtcaacaatggtgctggcaggataacagctgcatatgagcccaaaaccgccactgtgctctgtgatggaaaatggcacactcttcaagctaacaaaagcaaacaccgtatcactctgattgttgacgggaacgcagttggcgctgaaagtccacacacccagtctacctcagtggacaccaacaatcccatttatgttggtggctatcctgctggtgtgaagcaaaaatgcctgcgcagccagacctcgttccgcgggtgtttgaggaagctagctctgattaagagcccgcaggtgcagtcctttgacttcagcagagcgttcgaactgcacggagttttccttcattcctgtcctgggaccgagtcctgaacttcaagcagaatcctcagttggaatcattgctaatattttgaggagaagtgtatgtgtgaattaagaatctcttcagttcatatttcatttccaactcaggttaagtgtttctggggagagatgttgtg

SEQ ID NO: 4686 - DNA, 5242 bp, Homo sapiens
gagatcgagagcgaacgaggcagccgccggcggagaggagggagcgggcgagggccgggcaggaggagcgggcgcggcgcgggcgaggctgggacccgagcgcgctcacttcgccgcaaagtgccaacttcccctggagtgccgggcgcgcaccgtccgggcgcgggggaaagaaaggcagcgggaatttgagatttttgggaagaaagtcggatttcccccgtccccttccccctgttactaatcctcattaaaaagaaaaacaacagtaactgcaaacttgctaccatcccgtacgtcccccactcctggcaccatgaaggcggccgtcgatctcaagccgactctcaccatcatcaagacggaaaaagtcgatctggagcttttcccctccccggatatggaatgtgcagatgtcccactattaactccaagcagcaaagaaatgatgtctcaagcattaaaagctactttcagtggtttcactaaagaacagcaacgactggggatcccaaaagacccccggcagtggacagaaacccatgttcgggactgggtgatgtgggctgtgaatgaattcagcctgaaaggtgtagacttccagaagttctgtatgaatggagcagccctctgcgccctgggtaaagactgctttctcgagctggccccagactttgttggggacatcttatgggaacatctagagatcctgcagaaagaggatgtgaaaccatatcaagttaatggagtcaacccagcctatccagaatcccgctatacctcggattacttcattagctatggtattgagcatgcccagtgtgttccaccatcggagttctcagagcccagcttcatcacagagtcctatcagacgctccatcccatcagctcggaagagctcctctccctcaagtatgagaatgactacccctcggtcattctccgagaccctctccagacagacaccttgcagaatgactactttgctatcaaacaagaagtcgtcaccccagacaacatgtgcatggggaggaccagtcgtggtaaactcgggggccaggactcttttgaaagcatagagagctacgatagttgtgatcgcctcacccagtcctggagcagccagtcatctttcaacagcctgcagcgtgttccctcctatgacagcttcgactcagaggactatccggctgccctgcccaaccacaagcccaagggcaccttcaaggactatgtgcgggaccgtgctgacctcaataaggacaagcctgtcattcctgctgctgccctagctggctacacaggcagtggaccaatccagctatggcagtttcttctggaattactcactgataaatcctgtcagtcttttatcagctggacaggagatggctgggaattcaaactttctgacccagatgaggtggccaggagatggggaaagaggaaaaacaaacctaagatgaattatgagaaactgagccgtggcctacgctactattacgacaaaaacatcatccacaagacagcggggaaacgctacgtgtaccgctttgtgtgtgacctgcagagcctgctggggtacacccctgaggagctgcacgccatgctggacgtcaagccagatgccgacgagtgatggcactgaaggggctggggaaaccctgctgagaccttccaaggacagccgtgttggttggactctgaattttgaattgttattctattttttattttccagaactcattttttaccttcaggggtgggagctaagtcagttgcagctgtaatcaattgtgcgcagttgggaaaggaaagccaggacttgtggggtgggtgggaccagaaattcttgagcaaattttcaggagagggagaagggccttctcagaagcttgaaggctctggcttaacagagaaagagactaatgtgtccaatcatttttaaaaatcatccatgaaaaagtgtcttgagttgtggacccattagcaagtgacattgtcacatcagaactcatgaaactgatgtaaggcaattaatttgcttctgtttttaggtctgggagggcaaaaaagaggtgggtgggatgaaacatgttttggggggggatgcactgaaaatctgagaactatttacctatcactctagttttgaagcaaagatggacttcagtggggaggggccaaaaccgttgttgtgttaaaatttattttattaaattttgtgccagtattttttttcttaaaaatcgtcttaagctctaaggtggtctcagtattgcaatatcatgtaagtttgtttttatttgccggctgaggattctgtcacaatgaaagaaaactgtttatatagaccccattggaaaagcaaaacgctctcactgagatcagggatcccaaattcatgggacttatataagaaggacaattaatgctgatttgggtacaggggaattatgtgtgtgaatgtcatctacaattaaaaaaaattagcacatccctttacttacttgttatcagtggattctcggggtttggacttaatgttgagctaagaagcattaagtctttgaactgaatgtattttgcatccctggttttggacgacagtaaacgtaggagcactgttgaagtcctggaagggagatcgaaggaggaagattgacttggttctttcttagtcctatatctgtagcatagatgacttggaataaaagctgtatgcatgggcattacccctcaggtcctaagaaataagtcctgaatgcatgtcgttccaaactaacactctgtaatttttcttttatgtcttattttccaagagtcctccattttttgcaccccctcaccgccaactctgttattcagtagagagaagtgtacggctttctgattggtgagtgaaaaagtaacttgagacacgacctaagttgaagagtttagacttgctgagttttagaagtgatggaaattaagagagcatttcaataaaatgtgacttggctgtctttggaagagaagtgcaaggctttcctttgaagaatttaaattagtccggtaggatgtcaggtgagactgtgtatgcaaaatgaatggcacaggtgatgccagggcctcttgcttgggtctgatgtcttggcacagggtaagtgaaggttaattccagaagagaggaatgacttgaaggcaaaggaaactaaggaaggaggttcagtgaggaaaataaggttgtccatgagatttgaatagatttttagttcccccaaggtttaaatacaaacatagtcaagcaaggtagtcatctttctgctggttgtgagggggaatctgaaaatggagttttagaggaaaagtcaacatctaactagtgaggaaaagtgcctaatacaattagaatctccctcactctatagttgcccagttgaaaggataaggaggaggggtggcttttatggacttccatgagagaaggaaagaaatatttcaggtaagcttctcagggctggccctttttgggatttggatgagaaattggaagtactaactactttctagcatatctttaagaaaattgattgttatttactcccagatcctcttgcagacccagaattatcaggaacatagctctgtgattcatgagtgtccccatactgatgaattggagcatccatatggaaagcaaaggcagaattatcccagctgtattattttgatcttttggatgcaggtgccttaatgaagctctcaaaatattttaggagctgctcagggagtgttgggtggaactgtttggactacattgttttctcttagattatgtgatttttgttgggcactggcaaaaggtgtgtgtgtgaatgtgtgcatgtgtgtgaatgttgtgtgtgtgtgtgtgtgtgtgtgtgtgtgtgtgtgtgtgtgtgtttgcagacatgcaaaactgcagctgaaataataccttagatttctaggtaagtctttccacatttcaataatgggtaagagtagaaccagggccgggtatcaattattgcttgctgtttgcaaccaggcataaaatcactttctcaaatcatccaccgttcctattaaatttatgccggaaactctccttctgtgagtataactcctgcagttcctatagcagataagatataagaaagtgcctcctagtgctcctccgcccgcttgtttgctaaaattccctttctctctaagtccaccattttcaagatttgtagatagtgtattagttaagacagctttgtcgatctggccagatgttttttctcctttgtccaaaggccagagaccatcccaggaagagtggtgggtggtttatacactggaaatgttgcgtttatgctttttaaaaacacacgttaacttcagaggaaggatgggcaaatctggtctagctgggtgaaacccttattttcccagagatgccttaacctttgttggttttggctttagggttcagagtcacttttgttcccttctccattctggagagggacttcccctacatagagccctgatttttgtggctgtggggattggaggtagcattcaaagatcagatgtgcttttcctcactttggagatgaacactctgggttttacagcattaacctgcctaaccttcatggtgagaaatacaccatctctcttctagtcatgctgtgcatgccgcttactctgttggggtctatataaatttgttgaactcttacctacattccaaagaagtttcaaggaaccataaatatatgtatacatatacatatataaaatatatatattaaaataaaattatcaggaatactgcctcagttattgaacttttttttttaagaatactttttttttaagctgagaagtatagggatgaaaaagatgttatattgtgtttgactattttccaacttgtattttcatataatttatattttttaaaagctgaaaatttagaagcaagatgaaaaaaaggaaaagcaggtgctttttaaaaatcagaactgaggtagcttagagatgtagcgatgtaagtgtcgatgtttttttaaaaaaaaatgcaaaaaaattcttatggcggagttttttgtttgtttattttagtagctgatgctggcacatcattttgctggagagttttttatatactgtagcctgatttcatattgtattttaaactgtgtgaaattaaaaacaaagaatttcattcataatgct

SEQ ID NO: 4687 - DNA, 5143 bp, Homo sapiens
agttggaaagagaccacagactttgagggaagctcactcaggatctgctctccggcaaagtagtaagtgaggtgctgagagcagaatgagctactttgtggattctgctgggagcagccccgtcccttactcagcgcctcgtcctgcagtggtgaggcaaggacctagcaacacttatgaagatcctcgaatgaactgtggtttccagtccaattatcaccagcaaagaccttgctaccccttttgggatgagatggcaactcaggaagttcctactggtcttgaacactgtgtctcagatatggaatgtgcagatgtcccactattaactccaagcagcaaagaaatgatgtctcaagcattaaaagctactttcagtggtttcactaaagaacagcaacgactggggatcccaaaagacccccggcagtggacagaaacccatgttcgggactgggtgatgtgggctgtgaatgaattcagcctgaaaggtgtagacttccagaagttctgtatgaatggagcagccctctgcgccctgggtaaagactgctttctcgagctggccccagactttgttggggacatcttatgggaacatctagagatcctgcagaaagaggatgtgaaaccatatcaagttaatggagtcaacccagcctatccagaatcccgctatacctcggattacttcattagctatggtattgagcatgcccagtgtgttccaccatcggagttctcagagcccagcttcatcacagagtcctatcagacgctccatcccatcagctcggaagagctcctctccctcaagtatgagaatgactacccctcggtcattctccgagaccctctccagacagacaccttgcagaatgactactttgctatcaaacaagaagtcgtcaccccagacaacatgtgcatggggaggaccagtcgtggtaaactcgggggccaggactcttttgaaagcatagagagctacgatagttgtgatcgcctcacccagtcctggagcagccagtcatctttcaacagcctgcagcgtgttccctcctatgacagcttcgactcagaggactatccggctgccctgcccaaccacaagcccaagggcaccttcaaggactatgtgcgggaccgtgctgacctcaataaggacaagcctgtcattcctgctgctgccctagctggctacacaggcagtggaccaatccagctatggcagtttcttctggaattactcactgataaatcctgtcagtcttttatcagctggacaggagatggctgggaattcaaactttctgacccagatgaggtggccaggagatggggaaagaggaaaaacaaacctaagatgaattatgagaaactgagccgtggcctacgctactattacgacaaaaacatcatccacaagacagcggggaaacgctacgtgtaccgctttgtgtgtgacctgcagagcctgctggggtacacccctgaggagctgcacgccatgctggacgtcaagccagatgccgacgagtgatggcactgaaggggctggggaaaccctgctgagaccttccaaggacagccgtgttggttggactctgaattttgaattgttattctattttttattttccagaactcattttttaccttcaggggtgggagctaagtcagttgcagctgtaatcaattgtgcgcagttgggaaaggaaagccaggacttgtggggtgggtgggaccagaaattcttgagcaaattttcaggagagggagaagggccttctcagaagcttgaaggctctggcttaacagagaaagagactaatgtgtccaatcatttttaaaaatcatccatgaaaaagtgtcttgagttgtggacccattagcaagtgacattgtcacatcagaactcatgaaactgatgtaaggcaattaatttgcttctgtttttaggtctgggagggcaaaaaagaggtgggtgggatgaaacatgttttggggggggatgcactgaaaatctgagaactatttacctatcactctagttttgaagcaaagatggacttcagtggggaggggccaaaaccgttgttgtgttaaaatttattttattaaattttgtgccagtattttttttcttaaaaatcgtcttaagctctaaggtggtctcagtattgcaatatcatgtaagtttgtttttatttgccggctgaggattctgtcacaatgaaagaaaactgtttatatagaccccattggaaaagcaaaacgctctcactgagatcagggatcccaaattcatgggacttatataagaaggacaattaatgctgatttgggtacaggggaattatgtgtgtgaatgtcatctacaattaaaaaaaattagcacatccctttacttacttgttatcagtggattctcggggtttggacttaatgttgagctaagaagcattaagtctttgaactgaatgtattttgcatccctggttttggacgacagtaaacgtaggagcactgttgaagtcctggaagggagatcgaaggaggaagattgacttggttctttcttagtcctatatctgtagcatagatgacttggaataaaagctgtatgcatgggcattacccctcaggtcctaagaaataagtcctgaatgcatgtcgttccaaactaacactctgtaatttttcttttatgtcttattttccaagagtcctccattttttgcaccccctcaccgccaactctgttattcagtagagagaagtgtacggctttctgattggtgagtgaaaaagtaacttgagacacgacctaagttgaagagtttagacttgctgagttttagaagtgatggaaattaagagagcatttcaataaaatgtgacttggctgtctttggaagagaagtgcaaggctttcctttgaagaatttaaattagtccggtaggatgtcaggtgagactgtgtatgcaaaatgaatggcacaggtgatgccagggcctcttgcttgggtctgatgtcttggcacagggtaagtgaaggttaattccagaagagaggaatgacttgaaggcaaaggaaactaaggaaggaggttcagtgaggaaaataaggttgtccatgagatttgaatagatttttagttcccccaaggtttaaatacaaacatagtcaagcaaggtagtcatctttctgctggttgtgagggggaatctgaaaatggagttttagaggaaaagtcaacatctaactagtgaggaaaagtgcctaatacaattagaatctccctcactctatagttgcccagttgaaaggataaggaggaggggtggcttttatggacttccatgagagaaggaaagaaatatttcaggtaagcttctcagggctggccctttttgggatttggatgagaaattggaagtactaactactttctagcatatctttaagaaaattgattgttatttactcccagatcctcttgcagacccagaattatcaggaacatagctctgtgattcatgagtgtccccatactgatgaattggagcatccatatggaaagcaaaggcagaattatcccagctgtattattttgatcttttggatgcaggtgccttaatgaagctctcaaaatattttaggagctgctcagggagtgttgggtggaactgtttggactacattgttttctcttagattatgtgatttttgttgggcactggcaaaaggtgtgtgtgtgaatgtgtgcatgtgtgtgaatgttgtgtgtgtgtgtgtgtgtgtgtgtgtgtgtgtgtgtgtgtgtgtttgcagacatgcaaaactgcagctgaaataataccttagatttctaggtaagtctttccacatttcaataatgggtaagagtagaaccagggccgggtatcaattattgcttgctgtttgcaaccaggcataaaatcactttctcaaatcatccaccgttcctattaaatttatgccggaaactctccttctgtgagtataactcctgcagttcctatagcagataagatataagaaagtgcctcctagtgctcctccgcccgcttgtttgctaaaattccctttctctctaagtccaccattttcaagatttgtagatagtgtattagttaagacagctttgtcgatctggccagatgttttttctcctttgtccaaaggccagagaccatcccaggaagagtggtgggtggtttatacactggaaatgttgcgtttatgctttttaaaaacacacgttaacttcagaggaaggatgggcaaatctggtctagctgggtgaaacccttattttcccagagatgccttaacctttgttggttttggctttagggttcagagtcacttttgttcccttctccattctggagagggacttcccctacatagagccctgatttttgtggctgtggggattggaggtagcattcaaagatcagatgtgcttttcctcactttggagatgaacactctgggttttacagcattaacctgcctaaccttcatggtgagaaatacaccatctctcttctagtcatgctgtgcatgccgcttactctgttggggtctatataaatttgttgaactcttacctacattccaaagaagtttcaaggaaccataaatatatgtatacatatacatatataaaatatatatattaaaataaaattatcaggaatactgcctcagttattgaacttttttttttaagaatactttttttttaagctgagaagtatagggatgaaaaagatgttatattgtgtttgactattttccaacttgtattttcatataatttatattttttaaaagctgaaaatttagaagcaagatgaaaaaaaggaaaagcaggtgctttttaaaaatcagaactgaggtagcttagagatgtagcgatgtaagtgtcgatgtttttttaaaaaaaaatgcaaaaaaattcttatggcggagttttttgtttgtttattttagtagctgatgctggcacatcattttgctggagagttttttatatactgtagcctgatttcatattgtattttaaactgtgtgaaattaaaaacaaagaatttcattcataatgct

SEQ ID NO: 4688 - DNA, 4830 bp, Homo sapiens
atacacacacgcgcgcgcgcacacacacatacgcatgtacacgcgcacccgcacccgcgcgcctgtatcccgtgctgtttccctggcagacacacaggcgctcacgagtctctccttgccagcctgcagggcggcgacccccaaaacccagctccgggtcccaacctaggcaagaagctgcttctctgccaacagctcctcttcggcctccgtcacagccacctggaccctaccctttcgcgactgctgctgctgctgcccggacgtggaagcagcaagaggcgcttggtcaagacacactgacggtacctacagaatactggacatacggattcagaatccataaggctttatcaccttgaatcaaggatttatttgatatcatcctcggtctttacttcctatcaagtaacattgttttgaaaaatagagttaacacatttgccataagggagtttttttttttttttttaaatacttcgcatactctccaatgcccaaaaatagcaaggtggtaaaaagagaattagatgatgatgttactgagtctgtcaaagaccttctttccaatgaagacgcagctgatgatgcttttaagacaagtgaactaattgttgatggccaggaagagaaagatacagatgttgaagaaggatctgaagtcgaagatgaaagaccagcttggaacagtaaactacaatacatcctggcccaagttggattttctgtaggtttaggaaatgtgtggcgatttccatacctatgtcagaagaatgggggcggtgcatatcttttaccatatttaatactacttatggtaataggtattcccctttttttcttggaactctctgtgggtcaaagaattcggcgaggcagcattggtgtatggaattacataagccctaaactgggcgggattggatttgcaagttgtgtagtgtgctattttgtagctctctactacaacgtcatcattggctggagtttgttttatttttctcagtcttttcagcaacccctgccttgggatcagtgtcctttggtgaaaaatgcttcacacacttttgtagaaccagaatgtgaacaaagttctgccaccacctattactggtacagggaagcactgaatatttcaagttccatttctgaaagtgggggcttaaactggaagatgaccatctgcttgttggctgcctgggtcatggtttgcttggctatgatcaaaggcattcagtcttctggaaaaatcatatattttagttctctgtttccatatgtggtacttatttgcttcctcatcagagcattccttttaaatggttcaattgatggcattcgccacatgtttacccctaagcttgaaataatgctggagcccaaggtctggagagaagctgctactcaagtgttctttgccttaggtctgggatttggtggtgtcattgccttttcaagctacaacaagagagacaacaactgccactttgatgctgtcctggtgtccttcatcaattttttcacttctgtcctggcaacattggtggtgtttgcagttctgggcttcaaagcaaatgtcataaatgagaaatgcattacacaaaattcagagacgatcatgaaatttttgaaaatggggaacattagtcaggatattattccccatcatatcaacctttcaactgttactgcagaagattatcatttagtttatgacatcattcaaaaagtgaaagaagaagagtttcctgctcttcatctcaattcctgtaaaattgaagaagagctaaataaagctgttcaggggaccggcttagcttttattgcctttacagaagcgatgacacattttcctgcatctcccttctggtcagtgatgtttttcctcatgctggtcaatctaggccttggcagtatgtttggaaccattgaagggattgtcacgcctattgtggacactttcaaagtgaggaaagaaattcttactgttatctgttgtcttctggcattttgtattggcctgatatttgtgcaacgctctggaaattactttgttacaatgtttgatgattattctgctacactgcctctgctaattgtagtcattttggagaatattgctgtatgctttgtttatggcatagataagtttatggaagacctaaaagatatgctgggctttgctcccagcagatattactactatatgtggaaatatatttctcctctaatgctattatcattgctaatagctagtgttgtgaatatgggattaagtcctcctggctataacgcatggattgaagataaggcatctgaagaatttctgagctatccaacatggggactggttgtttgtgtctctctggttgtctttgcaatactcccagtccctgtagttttcattgttcgtcgcttcaaccttatagatgatagttctggtaatttagcatctgtgacctataagagaggaagggtcctgaaagagcctgtgaacttagagggcgatgatacaagcctcattcacggaaaaataccgagcgagatgccatctccaaattttggtaaaaatatttatcgaaaacagagtggatccccaactctggatactgctcccaatggacggtatggaatagggtacttgatggcagatattatgccagatatgccagaatctgatttgtagctgggggaaaagtcagtgggttttatttggttcatttttaccaatgaacattggccctagtaggagaagcattaggcttcacttatcagagggcaatctcaggtgttccgtggctgtgatctttaatcctaacagtatatgtcagttcaacttgagcattcttttggattctttggtttacatttgtgcagaaaggattgcagacaaatcttaggagggctgaggtacatgtttgccaggatttttttttaagtacctttggtgtattttcaaatatttctatctcttaaaaaaatggtattacctcagtttctaataatttctgggtttagtagtgttgacaattaaaaatggtatacattaaaatttataagtttgccttcagggtaacttccagtgtcacaatgagcagttctgtaagtgggtgcctctcagcacatttctatgaatatattatgtagataggctgtattgattttggtagcattgacaccttcttaggcaattagttgaagaaaactgcaaaatattttcttatgtaatagctgtatagagcaatagcaatcaaagcatgagaaggcactaacgctgggatgaaagatgagattcagaggtgactgagaatcatgtgagtgatggctgtatattttgtgtaaaatatatgtgtgaaaatgaactaagagtgagttactcagcactctcaagaattatgcagattctgcatttttcttatgccgtgtgcctaaaaacctacttgatatttattgtggtttcaagattattcatagtatatttatacaatatacttgcaatgcatttaagtacttaaagtactaatttgaaaacttgaagcaagatggcattttaattaatatatttctgttttgcttctgttttatgcaaatataaatcatttttaagtgattgttaaaattgtaatgcattacattttaatctacaaataaacaaagtttaaaaatgatgtttgtttttcacattgattttctttgtatcacctgaactggattgtctttcatttcagtcagcacttagacatttcataataactaaacatcacattccaagtgggatgaattacattaattgaatagagttaccaccgcttcagagtctaaggaaaaatagagtattatggttcaatggtgttcttatgtagtcttatgattcttgaaaaagtacttacagcctcccaagaaaccatgtgtacaattgactgcttgctgattcaatattgtctgcaaagtataaaagactatgatttttaaataaaactgttgtatatatgaaattggatagagcagaggaacctcactgagtgtcctctagttaaaaatctttcatttatcctaccaccagatcagttacatttttaaaacaatgatggatatagcagcaaaataagtgaggtaatacacatgccatatcaattgatttatttcagccagtattctcgctctgctatagatagatgttaataaatggtatcacagcatttaaagtattaaatccactggtgcataaatttttagtcttttaaaatatattcatgaatattgtgtttgtatccctttaaaatgtttaatattttataaataggcagtatatgcacattatacaaaactaaaaaattatgacaattcagtgtgaagtaagttctcatccaacatttctcctggccatccattctccatctttaaaggcaatcaccattgccagtttcttctgtatccttctggaaatacaatatattacataaatgacagcattctatattctctcttctatatcttacctatttctgtgaataatttattttggacagcattttatgtatgaatattcacaaatgtgcttccttatttcagaggctgaactaataaaaattttgtttatttttgtgttgaggcaatatttttatatggtaccctaatctttaatacttaacctgccagactttaaccgtaacacaataatgtattgccaaatagcaccattcttcttctctcactctcttgccatgggggctcttaaaaaaaaaagtatacatctaaggtgtacaacatgctgttttgatgtatataaatatagtgaaagcaaataaagtatatatctaaggtgtacaa

SEQ ID NO: 4689 - DNA, 4260 bp, Homo sapiens
atacacacacgcgcgcgcgcacacacacatacgcatgtacacgcgcacccgcacccgcgcgcctgtatcccgtgctgtttccctggcagacacacaggcgctcacgagtctctccttgccagcctgcagggcggcgacccccaaaacccagctccgggtcccaacctaggcaagaagctgcttctctgccaacagctcctcttcggcctccgtcacagccacctggaccctaccctttcgcgactgctgctgctgctgcccggacgtggaagcagcaagaggcgcttggtcaagacacactgacggtacctacagaatactggacatacggattcagaatccataaggctttatcaccttgaatcaaggatttatttgatatcatcctcggtctttacttcctatcaagtaacattgttttgaaaaatagagttaacacatttgccataagggagtttttttttttttttttaaatacttcgcatactctccaatgcccaaaaatagcaaggtggtaaaaagagaattagatgatgatgttactgagtctgtcaaagaccttctttccaatgaagacgcagctgatgatgcttttaagacaagtgaactaattgttgatggccaggaagagaaagatacagatgttgaagaaggatctgaagtcgaagatgaaagaccagcttggaacagtaaactacaatacatcctggcccaagttggattttctgtaggtttaggaaatgtgtggcgatttccatacctatgtcagaagaatgggggcggtgcatatcttttaccatatttaatactacttatggtaataggtattcccctttttttcttggaactctctgtgggtcaaagaattcggcgaggcagcattggtgtatggaattacataagccctaaactgggcgggattggatttgcaagttgtgtagtgtgctattttgtagctctctactacaacgtcatcattggctggagtttgttttatttttctcagtcttttcagcaacccctgccttgggatcagtgtcctttggtgaaaaatgcttcacacacttttgtagaaccagaatgtgaacaaagttctgccaccacctattactggtacagggaagcactgaatatttcaagttccatttctgaaagtgggggcttaaactggaagatgaccatctgcttgttggctgcctgggtcatggtttgcttggctatgatcaaaggcattcagtcttctggaaaagttagtatgttagagcccttcctcattctgctaatcaccatttctggattcatccctctctcaaattctgttacagatttctgtgggcaaatcacacataacacttcattctaggtagttaaatattagtgaaaagtgacacttcaaaagtgtgcttacatttttaaaaagacaaataaaaacagtgttttatagtgaaatctaaggttaattataatctttccttatttcaacaagatctttaaaatttttgtgaatacttaaaagtcctttctttttgccctttattcaattagtcctaatgtttcagttctctaattaccaattagttaaattatggaaattggggaaagtggtaaaatgagtaattcattcattttgtttgtttgatatcatttgtttctctctgctgtaggtgttctaaggaatagctgcataagacattttgaaataatgtaatgtgaagtgtttcttaaagctctgaacatcattaagtagttaataataattccaacaaggaattcagagtaatgtaaaagactaaatatcattccttctaaggcaaattgaaaattagaatggttgtggtttaaaaagacattaagtgaattctaggtagcttgtttgttattatttttaaaggacgctctaggaaagtaattgctattcactattttgctttcgtattactttttttttttttttttcattatcacagccattgttctaaagctctccacatctcttggctggatcatagcaagaatttactgttggctcttctctctgccgtttaactgtccagctgtgctattttccttttcaaagtataactgatttcaggctaacttattaccactcatcatcatatactagcaggaatggcaatagtagtagtagtagcagcagcaatagtagaagtagtcataataacaataataataaatgatgataaagatgtttctgacaagaattagggtaagaacagtaattgaagccaattatttattacaaatgtattttgctttgggtactgtgataactactttttatactttatcccatttaattataaaaaccactcttgagaagtaatttttattttcagaaccattttacagatttaaaataaacaggtttgaggaattagtttaacttatccaaagtttcgtggctattaagttctagtatttggagtcaaatgcaagtctgtctaaatctagagcccatgttctttaactgcaacactataatgtctcaccccgtcctagtcccaccaattagtcaactcttttagggcagaagtctgtctaattcatctttgcttcctgttactttatatttaattaaaaattttagtgactttttaacttgtaaattgtagctgattttacatttatcttcctgaaggaaactctgtatcattttgtcttttgaatttgtgaatatacttgttaacacatctaaatatctttaagtctttggcaatgttattgtattatatgactaaataacttcgaattgttcaattgtgtatgtcttccactatgtcagagccacattcccgtcacattataaatgaaggagtggattcttaaataagacctaaccatatttatatgattcctaacataatatcatttggtagaaagaaaaccaactgtggtcatccagagaagctcaaaaactcttgtactcaggttctcttactaccacgttttgtttctgtttcttcttagtctgtgtcttagcatcacttaaagaactattcatccttttcttatcacagaatcttggggttgttcttctcatgtcatgtagtgtaaatttatatagaaaatgtaatacaatttatttagtacatacatttattattttaatgagaatgcctcaggaaaagactagtatttgggcaatatttgaagaaagaatttaacaggcactgatggggagaaagctagctgtaggtaatgtgagcaaagatgtggaagccaaaattgtcacaattcctcaatctgaaacaatgagttaaatataataacaatgactttatgaggaattaaaggttaagctttgtgtttacctactaaacagaaaatgcctccaaataaacagtgtcacaagtacagaagagagaaatattgtttaaggctagcacatggaaaaacaacttagaggatttagcagctaaaagaagaatgagtcagctggtgatgtgcttggtcaaaacacacagtcatacatgcatatacatataccccaaaatgctaagtggaaactgcatgaattaaaagaggggtatgatagggacattgtcctttgggctaggtaggcacatatcagttggaccacatctgcaatactggattttactgaaatcttgtattttcctttttattatgagaaatttcagctcagtgatcaaagtcttcaaatagttaaaccaaaagaagaatagggctgctttgtgtggccatagagagcaaaactatgatcaaatagtgggtattatggaggaggttgtgatggtggtaagccttcaaagaaagaaaggcctttcaagaatcaaacttgataataatgaaatcagttgcctcaatggtagagagctcagcatcactggaggtggtcacacagaggtagcatgtgccctagttacagaatctattaaggggatgactgtctcaaatatgtaggacagaaatgagaagccccaagcttgcttttaactctaaggtagtattttctactctgactactttcctgttgttactactactatgctaaatactatgcatacattatcttgtttattctttctatcagctagataatttgcatattttatccccattttactgcaaagttgacaagctcagggaaaataaatagttggccagaattaagcaaccaatacatgatagacagggctaaaactgggctacagaattttcaaaaagaatgatacattctgaaggtatgtttataataaacatttttcatatgtaaaa

SEQ ID NO: 4690 - DNA, 1535 bp, Homo sapiens; identical to SEQ ID NO: 140

SEQ ID NO: 4691 - DNA, 1478 bp, Homo sapiens
gcgagcgcgcgcccgcgttctcctggcgggcttggtatttggcgcctgcgcgctgagtgcgtgccgctccgccgaccgaagaggctggacatgacaccagtggcatatcacggccatggggtctcagcattccgctgctgctcgcccctcctcctgcaggcgaaagcaagaagatgacagggacggtttgctggctgaacgagagcaggaagaagccattgctcagttcccatatgtggaattcaccgggagagatagcatcacctgtctcacgtgccaggggacaggctacattccaacagagcaagtaaatgagttggtggctttgatcccacacagtgatcagagattgcgccctcagcgaactaagcaatatgtcctcctgtccatcctgctttgtctcctggcatctggtttggtggttttcttcctgtttccgcattcagtccttgtggatgatgacggcatcaaagtggtgaaagtcacatttaataagcaagactcccttgtaattctcaccatcatggccaccctgaaaatcaggaactccaacttctacacggtggcagtgaccagcctgtccagccagattcagtacatgaacacagtggtgaattttaccgggaaggccgagatgggaggaccgttttcctatgtgtacttcttctgcacggtacctgagatcctggtgcacaacatagtgatcttcatgcgaacttcagtgaagatttcatacattggcctcatgacccagagctccttggagacacatcactatgtggattgtggaggaaattccacagctatttaacaactgctattggttcttccacacagcgcctgtagaagagagcacagcatatgttcccaaggcctgagttctggacctacccccacgtggtgtaagcagaggaggaattggttcacttaactcccagcaaacatcctcctgccacttaggaggaaacacctccctatggtaccatttatgtttctcagaaccagcagaatcagtgcctagcctgtgcccagcaaatagttggcactcaataaagatttgcagaatttaatacagatcttttcagctgttcttagggcattataaatggaaatcataacgtggttctaggttatcaaaccatggagtgatgtggagctaggattgtgagtgacctgcaggccattatcagtgcctcatctgtgcagaagtggcagcagagagggaccatccaaatacctaagagaaaacagacctagtcaggatatgaatttgtttcagctgttcccaaaggcctgggagctttttgaaaagaaagaaaaaagtgtgttggctttttttttttttagaaagttagaattgtttttaccaagagtctatgtggggcttgattcacccttcatccattggctggaacatggattggggatttgatagaaaaataaaccctgcttttgattcaaaaaaaaaaaaaaaaaaa

SEQ ID NO: 4692 - DNA, 1606 bp, Homo sapiens
gcgagcgcgcgcccgcgttctcctggcgggcttggtatttggcgcctgcgcgctgagtgcgtgccgctccgccgaccgaagaggctggtaagtcctcaagctggcaggtggtcgggggagcggccggagaggagctgccgggagttcgtgccctgcaggacatgacaccagtggcatatcacggccatggggtctcagcattccgctgctgctcgcccctcctcctgcaggcgaaagcaagaagatgacagggacggtttgctggctgaacgagagcaggaagaagccattgctcagttcccatatgtggaattcaccgggagagatagcatcacctgtctcacgtgccaggggacaggctacattccaacagagcaagtaaatgagttggtggctttgatcccacacagtgatcagagattgcgccctcagcgaactaagcaatatgtcctcctgtccatcctgctttgtctcctggcatctggtttggtggttttcttcctgtttccgcattcagtccttgtggatgatgacggcatcaaagtggtgaaagtcacatttaataagcaagactcccttgtaattctcaccatcatggccaccctgaaaatcaggaactccaacttctacacggtggcagtgaccagcctgtccagccagattcagtacatgaacacagtggtcagtacatatgtgactactaacgtctcccttattccacctcggagtgagcaactggtgaattttaccgggaaggccgagatgggaggaccgttttcctatgtgtacttcttctgcacggtacctgagatcctggtgcacaacatagtgatcttcatgcgaacttcagtgaagatttcatacattggcctcatgacccagagctccttggagacacatcactatgtggattgtggaggaaattccacagctatttaacaactgctattggttcttccacacagcgcctgtagaagagagcacagcatatgttcccaaggcctgagttctggacctacccccacgtggtgtaagcagaggaggaattggttcacttaactcccagcaaacatcctcctgccacttaggaggaaacacctccctatggtaccatttatgtttctcagaaccagcagaatcagtgcctagcctgtgcccagcaaatagttggcactcaataaagatttgcagaatttaatacagatcttttcagctgttcttagggcattataaatggaaatcataacgtggttctaggttatcaaaccatggagtgatgtggagctaggattgtgagtgacctgcaggccattatcagtgcctcatctgtgcagaagtggcagcagagagggaccatccaaatacctaagagaaaacagacctagtcaggatatgaatttgtttcagctgttcccaaaggcctgggagctttttgaaaagaaagaaaaaagtgtgttggctttttttttttttagaaagttagaattgtttttaccaagagtctatgtggggcttgattcacccttcatccattggctggaacatggattggggatttgatagaaaaataaaccctgcttttgattcaaaaaaaaaaaaaaaaaaa

SEQ ID NO: 4693 - DNA, 1549 bp, Homo sapiens
gcgagcgcgcgcccgcgttctcctggcgggcttggtatttggcgcctgcgcgctgagtgcgtgccgctccgccgaccgaagaggctggtaagtcctcaagctggcaggtggtcgggggagcggccggagaggagctgccgggagttcgtgccctgcaggacatgacaccagtggcatatcacggccatggggtctcagcattccgctgctgctcgcccctcctcctgcaggcgaaagcaagaagatgacagggacggtttgctggctgaacgagagcaggaagaagccattgctcagttcccatatgtggaattcaccgggagagatagcatcacctgtctcacgtgccaggggacaggctacattccaacagagcaagtaaatgagttggtggctttgatcccacacagtgatcagagattgcgccctcagcgaactaagcaatatgtcctcctgtccatcctgctttgtctcctggcatctggtttggtggttttcttcctgtttccgcattcagtccttgtggatgatgacggcatcaaagtggtgaaagtcacatttaataagcaagactcccttgtaattctcaccatcatggccaccctgaaaatcaggaactccaacttctacacggtggcagtgaccagcctgtccagccagattcagtacatgaacacagtggtgaattttaccgggaaggccgagatgggaggaccgttttcctatgtgtacttcttctgcacggtacctgagatcctggtgcacaacatagtgatcttcatgcgaacttcagtgaagatttcatacattggcctcatgacccagagctccttggagacacatcactatgtggattgtggaggaaattccacagctatttaacaactgctattggttcttccacacagcgcctgtagaagagagcacagcatatgttcccaaggcctgagttctggacctacccccacgtggtgtaagcagaggaggaattggttcacttaactcccagcaaacatcctcctgccacttaggaggaaacacctccctatggtaccatttatgtttctcagaaccagcagaatcagtgcctagcctgtgcccagcaaatagttggcactcaataaagatttgcagaatttaatacagatcttttcagctgttcttagggcattataaatggaaatcataacgtggttctaggttatcaaaccatggagtgatgtggagctaggattgtgagtgacctgcaggccattatcagtgcctcatctgtgcagaagtggcagcagagagggaccatccaaatacctaagagaaaacagacctagtcaggatatgaatttgtttcagctgttcccaaaggcctgggagctttttgaaaagaaagaaaaaagtgtgttggctttttttttttttagaaagttagaattgtttttaccaagagtctatgtggggcttgattcacccttcatccattggctggaacatggattggggatttgatagaaaaataaaccctgcttttgattcaaaaaaaaaaaaaaaaaaa

SEQ ID NO: 4694 - DNA, 3785 bp, Homo sapiens
gtctccgcgtggcgcgcgcctctagccgcccttcccctggcggctacggccggagggagcggaggcgagcgggagtcgggctccatggagagcggcggacaactgggcagaggcggagctttcatctcggcaccctggttccagtgacccgcgctagcgtcccgtcccgcccgcgtcggagcggccgccggccccgggactgaccggcctcgccgcacctcccgcaccgactagcgctcccaggcgctcctgcgcccgactcgccctcgcccccactccccggcggggtggcggcggccggagcagcagcagcagcagcaggagcccgcctctatgatgaagttcaagcccaaccagacgcggacctacgaccgcgagggcttcaagaagcgggcggcgtgcctgtgcttccggagcgagcaggaggacgaggtgctgctggtgagtagcagccggtacccagaccagtggattgtcccaggaggaggaatggaacccgaggaggaacctggcggtgctgccgtgagggaagtttatgaggaggctggagtcaaaggaaaactaggcagacttctgggcatatttgagcagaaccaagaccgaaagcacagaacatatgtttatgttctaacagtcactgaaatattagaagattgggaagattctgttaatattggaaggaagagagagtggttcaaagtagaagatgctatcaaagttctccagtgtcataaacctgtacatgcagagtatctggaaaagctaaagctgggttgttccccagccaatggaaattctacagtcccttcccttcggataataatgccttgtttgtaaccgctgcacagacctctgggttgccatctagtgtaagatagagagaactgggtaggcctctcccaccatgtgcagtctcatggggagaggcttctttcgtttcctcgtcaaacatctgattgacgcttgcaaactgtctgaatttgccatgcaaggttttcaaacaatttgcatgtttttcagatgctttcaaatctttttttaaaaaaatagtgtaaaatattttaataagccaaagccatgtggaatttttgtttagatgccttaactgtgccacaccccacaaccccctatattattttggttgtctatttctcacagcatattttcagttttttgtccatttgacatcagtctgtggtttattttgtcatcagattacttgtgggtatacctaccccaaaattgttttctcattcacagcattagcatattcagcaaatccatctgtggtgggaattaaaaatattattggtattaaagaaatccattcaccccaaaacttgttttacaggattacaattttaattcaaaatttccagatttgggctatttctgtatgatccaataacttattttgtcacagggcttaatttgccatttttggggatttgtcgactcattttgtctgaattttcacaactggtattatgtcactagctacctgatatggctatttcccttataactcaatagtaccttaacacaaagtataactctgtagagttggtgaatattttagggaaatattagcaaaatgcatgtagtaaagacatcttatgaaaactctattcatggaatttgatttagcatgctcagttgccagttcccattatcgatactctttctatgcagaataccttagaaccgttatttccctcagtgtagattgctcttaaaatgtattcagttatttagtggcccccacaggagtggagtcttgaaatctaattctaaatgccagtcagtgatgatcgcatcacagttgagtgaaatggccttcctgttcagctgttagagactgaagattgttagggcaccttagaatgtctcatcttttctaggttgtcaacaggtactatttgtcacataactaactttcgaggcactggaacatacctgaactaagaattaaatcttttactttatactcacttaaaatcaagaatcccatctaaaacacataggtaccttatctgaaactcttgcacttccccaaccagggcagaaatgaggtgggagaagtttgactaaaatgagggatgggggaaagtaaaagatgtctttttttttttttgagactcgctttgtcacccaggctggagtgcaatggcacaatctcaactcaccgcaacctccgcctcccgggttcaagcgattctcctgcctcagcctcccgagtagttgggattacaggagcctgcctccatgcctggctaattttgtatttttagtagaggcagggtttcttcatgttggtcaggctggtctcaaactcctaacctcgtgatcctcctgcctcgacctcccaaagtgctgggattacaggcatgagccaccatgcccagccaaagatcatttttttatatagacttcagccctttgtaaatattgtaactggggagtatagagtagaaaaaaagtatagttaaaacatttgttctacaaattaacctttaaaaatataattactgctaaaaatagagtgctgttacacttaaggaaaattagtgccattttggaaatgagatcttgtgccataaatacagctgaactgaatataaatgttcacaaattaatgctgtcaaaggaatgagtaaagcagaagaacttttaaccagcaacatttcaagtacgtagtgtgatcaaacatgatcatccagaatttgtatatttttttctttgtacagaggttacatattctgggtgttcttttataaaggaaacattttaaatcccacaaattgacactttctatcttcaatggactaagatttttttggtcagtaatctctgaaatttccttaaattatatacttaacatagcagagaaactggattgtttttgtatataagactgcttccacctgaaatgctgtcataagtactgggggggtgggggagtgcccatcttgtacatgatattcttagaggtaataaggtaatgatgcatgaatttattttataaactcttggactatgtatttgacatgtaaaatatgtacagtattaacgtcaaccatctctttaaagttagcctataaatattgttgtataattttctttggtcagaaacacttggactgaatagtgacactcggtaaggattttcagtgccatttagcaaaacgtctttagtctatgcaactagcaaaaatctgcataatgcaacaacacagttttcacacttcaaattttacatgaggggttcttcacgattctcctggaacccagtctagcaaaatgagaggaaaggccctagggagatttatttctgttaaatagttaactctgctgagtatgacaaatagtgtctactatctcaaccctccaaaatttgcagagtgttgggactgtcatttgtgatttttttttttttttttttttggtggggtagttgaataaaattgggcagctaaatttttcagttccatgtgcctcccaaataaaaaacagaaaataagtagtttttgtgaattgacttgcagacaaagtagaaactgtgctgcatgatgttattttgtaaacagatgacattttctgaccaggcacatgccatccaattttctgtcaatcacactgttgtataaagcagcagaactgaaggggaaaaatgattgttgtatacactgaattgctttgcatggtctcatttgagataattgatgtaagaatcctgacttttttatatttggaaacatcaaataaaaatggaaaaaatgaaaaaa

SEQ ID NO: 4695 - DNA, 3936 bp, Homo sapiens; identical to SEQ ID NO: 717

SEQ ID NO: 4696 - DNA, 1334 bp, Homo sapiens
agtttctctgggttcatcaggacgggatgcttcaagatttaagtgcaagtgtcttctttccaccttgttcacaacacagaacgttagctcaggtacctgacaatgatgagcagtttgtaccagactatcaggctgaaagtttggcttttcatggcctgccactgaaaatcaagaaagaaccccacagtccatgttcagaaatcggctctgcctgcagtcaagaacagccctttaaattcagctatggagaaaagtgcctgtacaatgtcagatttcgccgccagctttctgaaccctgtaactcctttcctcctttgccgacgatgccaagggaaggacgtcctatgtaccaacgccagatgtctgagccaaacatccccttcccaccacaaggctttaagcaggagtaccacgacccagtgtatgaacacaacaccatggttggcagtgcggccagccaaagctttccccctcctctgatgattaaacaggaacccagagattttgcatatgactcagaagtgcctagctgccactccatttatatgaggcaagaaggcttcctggctcatcccagcagaacagaaggctgtatgtttgaaaagggccccaggcagttttatgatgacacctgtgttgtcccagaaaaattcgatggagacatcaaacaagagccaggaatgtatcgggaaggacccacataccaacggcgaggatcacttcagctctggcagtttttggtagctcttctggatgacccttcaaattctcattttattgcctggactggtcgaggcatggaatttaaactgattgagcctgaagaggtggcccgacgttggggcattcagaaaaacaggccagctatgaactatgataaacttagccgttcactccgctattactatgagaaaggaattatgcaaaaggtggctggagagagatatgtctacaagtttgtgtgtgatccagaagcccttttctccatggcctttccagataatcagcgtccactgctgaagacagacatggaacgtcacatcaacgaggaggacacagtgcctctttctcactttgatgagagcatggcctacatgccggaagggggctgctgcaacccccacccctacaacgaaggctacgtgtattaacacaagtgacagtcaagcagggcgtttttgcgcttttccttttttctgcaagatacagagaattgctgaatctttgttttatttctgttgtttgtattttatttttaaataataatacacaaaaaggggcttttcctgttgcattattctatggtctgccatggactgtgcactttatttgag

SEQ ID NO: 4697 - DNA, 1250 bp, Homo sapiens
tccgccaccgccgtcgccgccgccgctgctgctgcggtcgctagcgcggcgcgctgggcaggctgaggctggggagtggacgcgctcctgcctccctcgccggcgcttcgggcttcccctcagccgcttcccgcgggaacctctccagccgtccacctgaagggcactggcatcatggtctaacgtggcaccttcctggattcccctctatctcctgttcttcctaccttctactccttccctcctcttctcctccgaagaccctggcgcccactccactgcggacccctgaacacttaaggaataacccttggcagctgcacgactacgctctccgaaacctcatgggcagtttctcccgccggcgatgatggagaacctaataaggggaaggaatcccccgcaataccagagaagtccttgtaaagaggttcgtgcagcacttcggaagaggcctgaagaggagttgcagtgcctggagatgaccaccaaacggaaaatcatcggccgtctggtgccatgccgatgtttccgaggtgaagaagaaatcatctcagttttagattactcccactgcagtcttcagcaggtgccaaaggaggtctttaacttcgaacgaacattagaggagctttatctagatgccaatcaaattgaagaactacccaagcaattgttcaactgtcaagctctacgaaaactaagtattcctgataacgacctttcaaatctgccaaccactattgctagtttagttaatcttaaagaactcgacatcagtaaaaatggtgtacaagaatttccagaaaacataaagtgctgtaagtgtttaacaattattgaagccagtgtcaatcccatttctaaactacctgatggcttcacacagctcctaaacctgacccagctctacctgaatgacgcctttcttgaatttcttccagccaattttggaagacttgtcaaattgcggatcttggagttaagagaaaatcacttgaaaactctaccaaacatctgaagatccagagtgtgccccttgcccaatcgcctgagactatacagtgacacctacaacagaggatgtggagggagcagcttttcgggcaccagaaatggcagcatcaggagcatcagcacgaatagactttgtagaggtagttctcccaaactatattatgaaaccaaacatttttggtgcgctacctgctgatgggggctgccttcttactgcctagtatctacaaaat

SEQ ID NO: 4698 - DNA, 1772 bp, Homo sapiens
acaatcacatctgcttttggcaagaactaatgcaccaagacttcaagttctaagcctctgttcagattttaattgcaattgatcaggtttatattattgtacctccagagacctcctagagccagaacccggctggcttgctgtttcctttagagcagcgcatatcattatttggtgttctggtggaggacttttctgatggcagaaattagtttctctgggttcatcaggacgggatgcttcaagatttaagtgcaagtgtcttctttccaccttgttcacaacacagaacgttagctcaggtacctgacaatgatgagcagtttgtaccagactatcaggctgaaagtttggcttttcatggcctgccactgaaaatcaagaaagaaccccacagtccatgttcagaaatcagctctgcctgcagtcaagaacagccctttaaattcagctatggagaaaagtgcctgtacaatgtcagtgcctatgatcagaagccacaagtgggaatgaggccctccaacccccccacaccatccagcacgccagtgtccccactgcatcatgcatctccaaactcaactcatacaccgaaacctgaccgggccttcccagctcacctccctccatcgcagtccataccagatagcagctaccccatggaccgcagatttcgccgccagctttctgaaccctgtaactcctttcctcctttgccgacgatgccaagggaaggacgtcctatgtaccaacgccagatgtctgagccaaacatccccttcccaccacaaggctttaagcaggagtaccacgacccagtgtatgaacacaacaccatggttggcagtgcggccagccaaagctttccccctcctctgatgattaaacaggaacccagagattttgcatatgactcagaagtgcctagctgccactccatttatatgaggcaagaaggcttcctggctcatcccagcagaacagaaggctgtatgtttgaaaagggccccaggcggttttatgatgacacctgtgttgtcccagaaaaattcgatggagacatcaaactagagccaggaatgtatcgggaaggacccacataccaacggcgaggatcacttcagctctggcagtttttggtagctcttctggatgacccttcaaattctcattttattgcctggactggtcgaggcatggaatttaaactgattgagcctgaagaggtggcccgacgttggggcattcagaaaaacaggccagctatgaactatgataaacttagccgttcactccgctattactatgagaaaggaattatgcaaaaggtggctggagagagatatgtctacaagtttgtgtgtgatccagaagcccctttctccatggcctttccagataatcagcgtccactgctgaagacagacatggaacgtcacatcaacgaggaggacacagtgcctctttctcactttgatgagagcatggcctacatgccggaagggggctgctgcaacccccacccctacaacgaaggctacgtgtattaacacaagtgacagtcaagcagggcgtttttgcgcttttccttttttctgcaagatacagagaattgctgaatctttgttttatttctgttgtttgtattttatttttaaataataatacacaaaaaggggcttttcctgttgcattattctatggtctgccatggactgtgcactttatttgagggtgggtgggagtaatctaaacatttattctgtgtaaca

SEQ ID NO: 4699 - DNA, 1168 bp, Homo sapiens
atcatgctggtggaggtttttgagagtgaacattcacgtaggaaatacttttatctggtcggctatgggatgcctgcactcattgtggctgtgtcagctgcagtagactacaggagttatggaacagataaagtatgttggctccgacttgacacctacttcatttggagttttataggaccagcaactttgataattatgcttaatgtaatcttccttgggattgctttatataaaatgtttcatcatactgctatactgaaacctgaatcaggctgtcttgataacatcaactatgaggataacagacccttcatcaagtcatgggttataggtgcaatagctcttctctgcctattaggattgacctgggcctttggactcatgtatattaatgaaagcacagtcatcatggcctatctcttcaccattttcaattctctacagggaatgtttatatttattttccattgtgtcctacagaagaaggtacgaaaagagtatgggaaatgcctgcgaacacattgctgtagtggcaaaagtacagagagttccattggttcagggaaaacatctggttctcgaactcctggacgctactccacaggctcacagagccgaatccgtagaatgtggaatgacacggttcgaaagcagtcagagtcttcctttattactggagacataaacagttcagcgtcactcaacagagagccctacagagagacaagtatgggagtaaagctaaacattgcatatcaaataggggcttctgaacaatgccagggatacaagtgtcatggatactctaccactgaatggtaaccatggcaatagttacagcattgccagcggcgaatacctgagcaactgtgtgcaaatcatagaccgtggctataaccataacgagaccgccctagagaaaaagattctgaaggaactcacttccaactatatcccttcttacctgaacaaccatgagcgctccagtgaacagaacaggaatctgatgaacaagctggtgaataaccttggcagtggaagggaagatgatgccattgtcctggatgatgccacctcgtttaaccacgaggagagtttgggcctggaactcattcatgaggaatctgatgctcctttgctgcccccaagagtatactccaccgag

SEQ ID NO: 4700 - DNA, 2521 bp, Homo sapiens
aaacttcaatttttctgcagtggctctgggtccagccccttacttaaagatctggaaagcatgaagactgggctttttttcctatgtctcttgggaactgcagctgcaatcccggtgaaaaggagataagaagcaaaggagcaaaccaaacctaatatgaatcctgtactttggccagaagccgtggctcacatctgtaatcccagcactttgggaggccaagacaaatgcaagattattatctgatcattccaaaccaactgctgaaacggtagcacccgacaacactgcaatccccagtttaagggctgaagctgaagaaaatgaaaaagaaacagcagtatccacagaagacgattcccaccataaggctgaaaaatcatcagtactaaagtcaaaagaggaaagccatgaacagtcagcagaacagggcaagagttctagccaagagctgggattgaaggatcaagaggacagtgatggtcacttaagtgtgaatttggagtatgcaccaactgaaggtacattggacataaaagaagatatgagtgagcctcaggagaaaaaactctcagagaacactgattttttggctcctggtgttagttccttcacagattctaaccaacaagaaagtatcacaaagagagaggaaaaccaagaacaacctagaaattattcacatcatcagttgaacaggagcagtaaacatagccaaggcctaagggatcaaggaaaccaagagcaggatccaaatatttccaatggagaagaggaagaagaaaaagagccaggtgaagttggtacccacaatgataaccaagaaagaaagacagaattgcccagggagcatgctaacagcaagcaggaggaagacaatacccaatctgatgatattttggaagagtctgatcaaccaactcaagtaagcaagatgcaggaggatgaatttgatcagggtaaccaagaacaagaagataactccaatgcagaaatggaagaggaaaatgcatcgaacgtcaataagcacattcaagaaactgaatggcagagtcaagagggtaaaactggcctagaagctatcagcaaccacaaagagacagaagaaaagactgtttctgaggctctgctcatggaacctactgatgatggtaataccacgcccagaaatcatggagttgatgatgatggcgatgatgatggcgatgatggcggcactgatggccccaggcacagtgcaagtgatgactacttcatcccaagccaggcctttctggaggccgagagagctcaatccattgcctatcgcctcaaaattgaggagcaaagagaaaaagtacatgaaaatgaaaatataggtaccactgagcctggagagcaccaagaggccaagaaagcagagaactcatcaaatgaggaggaaacgtcaagtgaaggcaacatgagggtgcatgctgtggattcttgcatgagcttccagtgtaaaagaggccacatctgtaaggcagaccaacagggaaaacctcactgtgtctgccaggatccagtgacttgtcctccaacaaaaccccttgatcaagtttgtggcactgacaatcagacctatgctagttcctgtcatctattcgctactaaatgcagactggaggggaccaaaaaggggcatcaactccagctggattattttggagcctgcaaatctattcctacttgtacggactttgaagtgattcagtttcctctacggatgagagactggctcaagaatatcctcatgcagctttatgaagccaactctgaacacgctggttatctaaatgagaagcagagaaataaagtcaagaaaatttacctggatgaaaagaggcttttggctggggaccatcccaatgaccttctcttaagggactttaagaaaaactaccacatgtatgtgtatcctgtgcactggcagtttagtgaacttgaccaacaccctatggatagagtcttgacacattctgaacttgctcctctgcgagcatctctggtgcccatggaacactgcataacccgtttctttgaggagtgtgaccccaacaaggataagcacatcaccctgaaggagtggggccactgctttggaattaaagaagaggacatagatgaaaatctcttgttttgaacgaagattttaaagaactcaactttccagcatcctcctctgttctaaccacttcagaaatatatgcagctgtgatacttgtagatttatatttagcaaaatgttagcatgtatgacaagacaatgagagtaattgcttgacaacaacctatgcaccaggtatttaacattaactttggaaacaaaaatgtacaattaagtaaagtcaacatatgcaaaatactgtacattgtgaacagaagtttaattcatagtaatttcactctctgcattgacttatgagataattaatgattaaactattaatgataaaaataatgcatttgtattgttcataatatcatgtgcacttcaaga

SEQ ID NO: 4701 - DNA, 1772 bp, Homo sapiens
ctcgaaacccgagccatctcaccgctcgcccccaaccctgggctctggctgtttaaaagctggagaggaagtgaaagcgtcaagtacagttgatagaagtccagatcctgaggaaatctccagctaaatgctcaaaatataaaaactgagctgagatttgcgaagagcagcagcatggatggattttatgaccagcaagtgccttacatggtcaccaatagtcagcgtgggagaaattgtaacgagaaaccaacaaatgtcaggaaaagaaaattcattaacagagatctggctcatgattcagaagaactctttcaagatctaagtcaattacaggaaacatggcttgcagaagtggcttttcatggcctgccactgaaaatcaagaaagaaccccacagtccatgttcagaaatcagctctgcctgcagtcaagaacagccctttaaattcagctatggagaaaagtgcctgtacaatgtcagtgcctatgatcagaagccacaagtgggaatgaggccctccaacccccccacaccatccagcacgccagtgtccccactgcatcatgcatctccaaactcaactcatacaccgaaacctgaccgggccttcccagctcacctccctccatcgcagtccataccagatagcagctaccccatggaccacagatttcgccgccagctttctgaaccctgtaactcctttcctcctttgccgacgatgccaagggaaggacgtcctatgtaccaacgccagatgtctgagccaaacatccccttcccaccacaaggctttaagcaggagtaccacgacccagtgtatgaacacaacaccatggttggcagtgcggccagccaaagctttccccctcctctgatgattaaacaggaacccagagattttgcatatgactcagaagtgcctagctgccactccatttatatgaggcaagaaggcttcctggctcatcccagcagaacagaaggctgtatgtttgaaaagggccccaggcagttttatgatgacacctgtgttgtcccagaaaaattcgatggagacatcaaacaagagccaggaatgtatcgggaaggacccacataccaacggcgaggatcacttcagctctggcagtttttggtagctcttctggatgacccttcaaattctcattttattgcctggactggtcgaggcatggaatttaaactgattgagcctgaagaggtggcccgacgttggggcattcagaaaaacaggccagctatgaactatgataaacttagccgttcactccgctattactatgagaaaggaattatgcaaaaggtggctggagagagatatgtctacaagtttgtgtgtgatccagaagcccttttctccatggcctttccagataatcagcgtccactgctgaagacagacatggaacgtcacatcaacgaggaggacacagtgcctctttctcactttgatgagagcatggcctacatgccggaagggggctgctgcaacccccacccctacaacgaaggctacgtgtattaacacaagtgacagtcaagcagggcgtttttgcgcttttccttttttctgcaagatacagagaattgctgaatctttgttttatttctgttgtttgtattttatttttaaataataatacacaaaaaggggcttttcctgttgcattattctatggtctgccatggactgtgcactttatttgagggtgggtgggagtaatctaaacatttattctgtgt

SEQ ID NO: 4702 - DNA, 4061 bp, Homo sapiens
agttctaacctgctctgcaggaataacggtcctgcctcccgacactcttggcgaggtttttgtacagtttgctccgggagctgtttcttcgcttccacctttttctcccccacacttcgcggcttcttcatgctttttcttctcaccatttctggccaaaactacaaacaagacttcgcagatcgagcctgcgtgctgccgaagcagggcgccgagtccatgcgaactgccatctgatccgctcttatcaatgaagcagccgatcatggcggatggcccccggtgcaagaggcgcaaacaagccaatcccaggaggaaaaacgtggtgaactatgacaatgtagtggacacaggttctgaaacagatgaggaagacaagcttcatattgctgaggatgacggtattgccaaccctctggaccaggagacgagtccagctagtgtgcccaaccatgagtcctccccacacgtgagccaagctctgttgccaagagaggaagaggaagatgaaataagggagggtggagtggaacacccctggcacaacaacgagattctacaagcctctgtagatggtccagtgaagaatgcaaattgcacatcagattttgaggaatactttgccaaaagaaaactggaggaacgcgatggtcatgcagtcagcatcgaggagtaccttcagcgcagtgacacagccattatttacccagaagcccctgaggagctgtctcgccttggcacgccagaggccaatgggcaagaagaaaatgacctgccacctggaactccagatgcttttgcccaactgctgacctgcccctactgcgaccggggctacaagcgcttgacatcactgaaggagcacatcaagtaccgccacgagaagaatgaagagaacttttcctgccctctctgtagctacacgtttgcctaccgcacccagctcgagcggcatatggtgacacacaagccagggacagatcagcaccaaatgctaacccaaggagcaggtaatcgcaagttcaaatgcacagagtgtggcaaggccttcaaatataaacaccatctgaaagaacacctgcgaattcacagtggtgaaaaaccttacgagtgcccaaactgcaagaaacgtttctcccattctggttcctacagttcgcacatcagcagcaagaaatgtattggtttaatctctgtaaatggccgaatgagaaacaatatcaagacgggttcttcccctaattctgtttcttcttctcctactaattcagccattacccagttaagaaacaagttggagaatggaaaaccacttagtatgtctgaacagacaggcttacttaaaattaaaacagaaccactagacttcaatgactataaagttcttatggctacacacgggtttagtggcactagtccctttatgaatggtgggcttggagccaccagccctttaggagttcatccatctgctcagagtccaatgcagcacttaggtgtagggatggaagcccctttacttgggtttcccaccatgaatagtaatttaagtgaggtacaaaaggttctacagattgtggacaatactgtttccaggcaaaaaatggactgcaaggctgaagaaatttcaaagttgaaaggttatcacatgaaggatccatgctctcaacctgaggaacaaggagttacttctcctaatattccgcctgtcggtcttccggtagtgagtcataatggtgccactaaaagtattattgactatacgttggaaaaagtcaatgaagccaaagcttgcctccagagcttgactactgactcaaggagacagatcagtaatataaagaaagagaagctacgtactttaatagatttggtcactgatgacaaaatgattgagaaccacaacatatccactccattttcatgccagttctgtaaagaaagttttcctggccccatccctttgcatcagcatgaacgttacctttgtaagatgaatgaagagatcaaggcggtcctgcagcctcatgaaaacatagtccccaacaaagccggagtttttgttgataataaagccctcctcttgtcatctgtactttctgagaaaggaatgacaagccccatcaacccatacaaggaccacatgtctgtactcaaagcatactatgctatgaacatggagcccaactccgatgaactgctgaaaatttccattgctgtgggccttcctcaggaatttgtgaaggaatggtttgaacaacgaaaagtctaccagtactcaaattccaggtccccatccctggaaagaagctccaagccgttagctcccaacagtaaccctcccacaaaagactctttattacccaggtctcctgtaaaacctatggactccataacatcaccatctatagcagaactccacaacagcgttacgaattgcgatcctcctctcaggctaacaaaaccttcccattttaccaatattaaaccagttgaaaaattggaccactccaggagtaatactccttctcccttaaatctttcctccacatcttctaaaaactcccacagtagttcatacactccaaacagcttctcttctgaggagctccaggctgagcctttagacttgtcattaccaaaacaaatgaaagaacccaaaagtattatagccacaaagaacaaaacaaaagctagtagcatcagtttagatcataacagtgtttcttcctcatctgaaaactcagatgagcctctgaacttgacttttatcaagaaggaattttcaaattcaaataatctggacaacaaaagcactaacccagtgttcagcatgaacccatttagtgccaaacctttatacacagctcttccacctcaaagcgcatttccccctgctactttcatgccaccagtccagaccagtattcctgggctacgaccatacccaggactggatcagatgagcttcctaccacatatggcctacacctacccaactggagcagctacttttgctgatatgcagcaaaggagaaagtaccagcggaaacaaggatttcagggagaattgcttgatggagcacaagactacatgtcaggcctagatgatatgacagactccgactcctgtctgtctcgcaaaaagatcaagaagacagagagtggcatgtatgcatgtgacttatgtgacaagacattccagaaaagcagttcccttctgcgacataaatacgaacacacaggaaaaagaccacatcagtgtcagatttgtaagaaagcgtttaaacacaagcaccaccttatcgagcactcaaggcttcactcgggcgagaagccctatcagtgtgataaatgtggcaagcgcttctcacactcgggctcgtactcgcagcacatgaatcacaggtattcctactgcaagcgggaggcggaggagcgggaagcggcggagcgcgaggcgcgcgagaaagggcacttggaacccaccgagctgctgatgaaccgggcttacttgcagagcattacccctcaggggtactctgactcggaggagagggagagtatgccgagggatggcgagagcgagaaggagcacgagaaagaaggcgaggatggctacgggaagctgggcagacagggtggcgacgaggagttcgaggaggaagaggaagaaagtgaaaataaaagtatggatacggatcccgaaacgatacgagatgaagaagagactggagatcactccatggacgatagttcggaggatgggaaaatggaaaccaaatcagaccacgaggaagacaatatggaagatggcatgtaataaactactgcattttaagcttcctatttttttttccagtagtattgttacctgcttgaaaacactgctgtgttaagctgttcatgcacgtgcctgacgcttccaggaagctgtagagagggacagaaggggcggttcagccaagacagatgtagacggagttggagctgggtattgttaaaaactgcattatgcaaaaattttgtacagtgttaaggcctaaaaactgtgtggttca

SEQ ID NO: 4703 - DNA, 2192 bp, Homo sapiens
agtgcactctagaaacactgctgtggtggagaaactggaccccaggtctggagcgaattccagcctgcagggctgataagcgaggcattagtgagattgagagagactttaccccgccgtggtggttggagggcgcgcagtagagcagcagcacaggcgcgggtcccgggaggccggctctgctcgcgccgagatgtggaatctccttcacgaaaccgactcggctgtggccaccgcgcgccgcccgcgctggctgtgcgctggggcgctggtgctggcgggtggcttctttctcctcggcttcctcttcgggtggtttataaaatcctccaatgaagctactaacattactccaaagcataatatgaaagcattcttggatgaattgaaagctgagaacatcaagaagttcttataattttcaacacatcattatttgaaccacctcctccaggatatgaaaatgtttcggatattgtaccacctttcagtgctttctctcctcaaggaatgccagagggcgatctagtgtatgttaactatgcacgaactgaagacttctttaaattggaacgggacatgaaaatcaattgctctgggaaaattgtaattgccagatatgggaaagttttcagaggaaataagaatatgcttataggcgtggaattgcagaggctgttggtcttccaagtattcctgttcatccaattggatactatgatgcacagaagctcctagaaaaaatgggtggctcagcaccaccagatagcagctggagaggaagtctcaaagtgccctacaatgttggacctggctttactggaaacttttctacacaaaaagtcaagatgcacatccactctaccaatgaagtgacaagaatttacaatgtgataggtactctcagaggagcagtggaaccagacagatatgtcattctgggaggtcaccgggactcatgggtgtttggtggtattgaccctcagagtggagcagctgttgttcatgaaattgtgaggagctttggaacactgaaaaaggaagggtggagacctagaagaacaattttgtttgcaagctgggatgcagaagaatttggtcttcttggttctactgagtgggcagaggagaattcaagactccttcaagagcgtggcgtggcttatattaatgctgactcatctatagaaggaaactacactctgagagttgattgtacaccgctgatgtacagcttggtacacaacctaacaaaagagctgaaaagccctgatgaaggctttgaaggcaaatctctttatgaaagttggactaaaaaaagtccttccccagagttcagtggcatgcccaggataagcaaattgggatctggaaatgattttgaggtgttcttccaacgacttggaattgcttcaggcagagcacggtatactaaaaattgggaaacaaacaaattcagcggctatccactgtatcacagtgtctatgaaacatatgagttggtggaaaagttttatgatccaatgtttaaatatcacctcactgtggcccaggttcgaggagggatggtgtttgagctagccaattccatagtgctcccttttgattgtcgagattatgctgtagttttaagaaagtatgctgacaaaatctacagtatttctatgaaacatccacaggaaatgaagacatacagtgtatcatttgattcacttttttctgcagtaaagaattttacagaaattgcttccaagttcagtgagagactccaggactttgacaaaagcaacccaatagtattaagaatgatgaatgatcaactcatgtttctggaaagagcatttattgatccattagggttaccagacaggcctttttataggcatgtcatctatgctccaagcagccacaacaagtatgcaggggagtcattcccaggaatttatgatgctctgtttgatattgaaagcaaagtggacccttccaaggcctggggagaagtgaagagacagatttatgttgcagccttcacagtgcaggcagctgcagagactttgagtgaagtagcctaagaggattctttagagaatccgtattgaatttgtgtggtatgtcactcagaaagaatcgtaatgggtatattgataaattttaaaattggtatatttgaaataaagttgaatattatatat

SEQ ID NO: 4704 - DNA, 2147 bp, Homo sapiens
ggggccggccgcctgtcagagggaggtggcgatggtgcgcccggtggcggtggcggcggcggttgcggaggcttccttggtcggattgcaacgaggagaagatgactgaccaaccgactggctgaatgaatgaatggcggagccgagcgcgccatgaggagcctgccgagcctgggcggcctcgccctgttgtgctgcgccgccgccgccgccgccgccgccgtcgcctcagccgcctcggcggggaatgtcaccggtggcggcggggccgcggggcaggtggacgcgtcgccgggccccgggttgcggggcgagcccagccaccccttccctagggcgacggctcccacggcccaggccccgaggaccgggcccccgcgcgccaccgtccaccgacccctggctgcgacttctccagcccagtccccggagaccacccctctttgggcgactgctggaccctcttccaccacctttcaggcgccgctcggcccctcgccgaccacccctccggcggcggaacgcacttcgaccacctctcaggcgccgaccagacccgcgccgaccaccctttcgacgaccactggcccggcgccgaccacccctgtagcgaccaccgtaccggcgcccacgactccccggaccccgacccccgatctccccagcagcagcaacagcagcgtcctccccaccccacctgccaccgaggccccctcttcgcctcctccagagtatgtatgtaactgctctgtggttggaagcctgaatgtgaatcgctgcaaccagaccacagggcagtgtgagtgtcggccaggttatcaggggcttcactgtgaaacctgcaaagagggcttttacctaaattacacttctgggctctgtcagccatgtgactgtagtccacatggagctctcagcataccgtgcaacagttctgggaaatgccagtgcaaagtgggtgtcattggctctatatgtgaccgatgccaagatggatattatggctttagtaagaatggctgcttgccctgccaatgcaataatcggtctgccagttgcgatgccctcacaggtgcttgtttaaactgccaggaaaatagcaaaggaaatcactgtgaagaatgtaaagaaggattttatcagagtcctgatgccactaaagaatgtcttcgctgcccttgttcagcagtgacatctacaggcagctgctctataaaatcgagtgaattggaacctgaatgtgaccagtgtaaagatggttacataggcccgaactgcaataaatgtgaaaatggctattacaattttgacagcatctgtagaaagtgccaatgtcacggccatgtggacccagttaaaactccaaagatttgtaagcccgagagtggtgagtgcatcaactgcctccataacaccactgggttttggtgtgagaactgcctagaaggttatgttcacgacctcgagggaaattgcatcaagaaagaagttattcttccaacacctgaaggttctaccattttggtttccaatgcctctttgaccacatcagtgcccacccctgttataaatagtacttttacccctacaaccctgcagactatcttttcagtaagcacttctgaaaacagcacttcagctttagctgatgtatcatggacccaatttaacatcatcattttgacagtcatcatcattgttgtggtgctgctaatgggatttgtcggggctgtatatatgtaccgcgagtaccaaaaccggaaactcaatgcccccttttggaccatcgagctgaaagaagacaatatcagtttcagcagctaccatgacagcattcccaatgcagatgtttcgggattgttggaagatgatggcaatgaagtggctcccaatgggcagctgaccctgacgacgcccatacataactacaaagcctaaggagctagaactgttctgaattgttaaaccacagtgcttgctaagacagagtcagcccctgggccagacaaagcctggctagagtttgctgagaaagcaaaggcaaatagtgcatctgaaattttcaggtacaaatttgtaatgcgcttagcctatctattgctcttagttttcccatgaagatctgaagcgttcactgtcattaggac

SEQ ID NO: 4705 - DNA, 2663 bp, Homo sapiens
agtgcactctagaaacactgctgtggtggagaaactggaccccaggtctggagcgaattccagcctgcagggctgataagcgaggcattagtgagattgagagagactttaccccgccgtggtggttggagggcgcgcagtagagcagcagcacaggcgcgggtcccgggaggccggctctgctcgcgccgagatgtggaatctccttcacgaaaccgactcggctgtggccaccgcgcgccgcccgcgctggctgtgcgctggggcgctggtgctggcgggtggcttctttctcctcggcttcctcttcggttaaaagccaactgcaaggtctaatgactgcaggatctagctatccattgtttctggccgcctatgcgtgcactgggtgtctggcagagaggctggggtggtttataaaatcctccaatgaagctactaacattactccaaagcataatatgaaagcatttttggatgaattgaaagctgagaacatcaagaagttcttatataattttacacagataccacatttagcaggaacagaacaaaactttcagcttgcaaagcaaattcaatcccagtggaaagaatttggcctggattctgttgagctagcacattatgatgtactgttgtcctacccaaataagactcatcccaactacatctcaataattaatgaagatggaaatgagattttcaacacatcattatttgaaccacctcctccaggatatgaaaatgtttcggatattgtaccacctttcagtgctttctctcctcaaggaatgccagagggcgatctagtgtatgttaactatgcacgaactgaagacttctttaaattggaacgggacatgaaaatcaattgctctgggaaaattgtaattgccagatatgggaaagttttcagaggaaataaggttaaaaatgcccagctggcaggggccaaaggagtcattctctactccgaccctgctgactactttgctcctggggtgaagtcctatccagatggttggaatcttcctggaggtggtgtccagcgtggaaatatcctaaatctgaatggtgcaggagaccctctcacaccaggttacccagcaaatgaatatgcttataggcgtggaattgcagaggctgttggtcttccaagtattcctgttcatccaattggatactatgatgcacagaagctcctagaaaaaatgggtggctcagcaccaccagatagcagctggagaggaagtctcaaagtgccctacaatgttggacctggctttactggaaacttttctacacaaaaagtcaagatgcacatccactctaccaatgaagtgacaagaatttacaatgtgataggtactctcagaggagcagtggaaccagacagatatgtcattctgggaggtcaccgggactcatgggtgtttggtggtattgaccctcagagtggagcagctgttgttcatgaaattgtgaggagctttggaacactgaaaaaggaagggtggagacctagaagaacaattttgtttgcaagctgggatgcagaagaatttggtcttcttggttctactgagtgggcagaggagaattcaagactccttcaagagcgtggcgtggcttatattaatgctgactcatctatagaaggaaactacactctgagagttgattgtacaccgctgatgtacagcttggtacacaacctaacaaaagagctgaaaagccctgatgaaggctttgaaggcaaatctctttatgaaagttggactaaaaaaagtccttccccagagttcagtggcatgcccaggataagcaaattgggatctggaaatgattttgaggtgttcttccaacgacttggaattgcttcaggcagagcacggtatactaaaaattgggaaacaaacaaattcagcggctatccactgtatcacagtgtctatgaaacatatgagttggtggaaaagttttatgatccaatgtttaaatatcacctcactgtggcccaggttcgaggagggatggtgtttgagctagccaattccatagtgctcccttttgattgtcgagattatgctgtagttttaagaaagtatgctgacaaaatctacagtatttctatgaaacatccacaggaaatgaagacatacagtgtatcatttgattcacttttttctgcagtaaagaattttacagaaattgcttccaagttcagtgagagactccaggactttgacaaaagcaacccaatagtattaagaatgatgaatgatcaactcatgtttctggaaagagcatttattgatccattagggttaccagacaggcctttttataggcatgtcatctatgctccaagcagccacaacaagtatgcaggggagtcattcccaggaatttatgatgctctgtttgatattgaaagcaaagtggacccttccaaggcctggggagaagtgaagagacagatttatgttgcagccttcacagtgcaggcagctgcagagactttgagtgaagtagcctaagaggattctttagagaatccgtattgaatttgtgtggtatgtcactcagaaagaatcgtaatgggtatattgataaattttaaaattggtatatttgaaataaagttgaatattatatat

SEQ ID NO: 4706 - DNA, 1664 bp, Homo sapiens
gcagcaggaggaggcagagcacagcatcgtcgggaccagactcgtctcaggccagttgcagccttctcagccaaacgccgaccaaggaaaactcactaccatgagaattgcagtgatttgcttttgcctcctaggcatcacctgtgccataccagttaaacaggctgattctggaagttctgaggaaaagcagcactaaagatgtacctacccctccacaacagatgaaactgtgccagccaaacaacaaatgggcattgtccccagaagcttggacaaaaaggcacacagagttcaattccagttgaacagaataaaggccaaaatagagctgccttgggggtcactgcaattagactgcttgatgaagacattaaaagaactttacaacaaatacccagatgctgtggccacatggctaaaccctgacccatctcagaagcagaatctcctagccccacagaatgctgtgtcctctgaagaaaccaatgactttaaacaagagacccttccaagtaagtccaacgaaagccatgaccacatggatgatatggatgatgaagatgatgatgaccatgtggacagccaggactccattgactcgaacgactctgatgatgtagatgacactgatgattctcaccagtctgatgagtctcaccattctgatgaatctgatgaactggtcactgattttcccacggacctgccagcaaccgaagttttcactccagttgtccccacagtagacacatatgatggccgaggtgatagtgtggtttatggactgaggtcaaaatctaagaagtttcgcagacctgacatccagtaccctgatgctacagacgaggacatcacctcacacatggaaagcgaggagttgaatggtgcatacaaggccatccccgttgcccaggacctgaacgcgccttctgattgggacagccgtgggaaggacagttatgaaacgagtcagctggatgaccagagtgctgaaacccacagccacaagcagtccagattatataagcggaaagccaatgatgagagcaatgagcattccgatgtgattgatagtcaggaactttccaaagtcagccgtgaattccacagccatgaatttcacagccatgaagatatgctggttgtagaccccaaaagtaaggaagaagataaacacctgaaatttcgtatttctcatgaattagatagtgcatcttctgaggtcaattaaaaggagaaaaaatacaatttctcactttgcatttagtcaaaagaaaaaatgctttatagcaaaatgaaagagaacatgaaatgcttctttctcagtttattggttgaatgtgtatctatttgagtctggaaataactaatgtgtttgataattagtttagtttgtggcttcatggaaactccctgtaaactaaaagcttcagggttatgtctatgttcattctatagaagaaatgcaaactatcactgtattttaatatttgttattctctcatgaatagaaatttatgtagaagcaaacaaaatacttttacccacttaaaaagagaatataacattttatgtcactataatcttttgttttttaagttagtgtatattttgttgtgattatctttttgtggtgtgaataaatcttttatcttgaatgt

SEQ ID NO: 4707 - DNA, 2646 bp, Homo sapiens
atttatgtgggtttgtttgagggctgcattcctagtgaagtattccatcaaactgccattattcatcttgatgaaagcttgaggaactttagaaggagagaaacatccagaccacccggtttttggtttctaaatgacatgaagagaatacaatgttaataattcagcttagagaactatcaacacaggacaatgcaagcccatgagctgtcccggtattttcgaatgccagagctggttgacttccgacagtacgtgcgtactcttccgaccaacacgcttatgggcttcggagcttttgcagcactcaccaccttctggtacgccacgagacccaaacccctgaagccgccatgcgacctctccatgcagtcagtggaagtggcgggtagtggtggtgcacgaagatccgcactacttgacagcgacgagcccttggtgtatttctatgatgatgtcacaacattatacgaaggtttccagaggggaatacaggtgtcaagatcgctcaggcccctctgtgtccactgtaactttcccagagtcggtcccaaagctcactggaccctctagatgttccctgtggccctgggggctccatggtcaaatatgtgagtgtcacatcctgtattttatgataatggcccttgtttaggctctcggaaaccagaccaaccctatgaatggctttcatataaacaggttgcagaattgtcggagtgcataggctcagcactgatacagaagggcttcaagactgccccagatcagttcattggcatctttgctcaaaatagacctgagtgggtgattattgaacaaggatgctttgcttattcgatggtgatcgttccactttatgatacccttggaaatgaagccatcacgtacatagtcaacaaagctgaactctctctggtttttgttgacaagccagagaaggccaaactcttattagagggtgtagaaaataagttaataccaggccttaaaatcatagttgtcatggatgcctacggcagtgaactggtggaacgaggccagaggtgtggggtggaagtcaccagcatgaaggcgatggaggacctgggaagagccaacagacggaagcccaagcctccagcacctgaagatcttgcagtaatttgtttcacaagtggaactacaggcaaccccaaaggagcaatggtcactcaccgaaacatagtgagcgattgttcagcttttgtgaaagcaacagagaatacagtcaatccttgcccagatgatactttgatatctttcttgcctctcgcccatatgtttgagagagttgtagagtgtgtaatgctgtgtcatggagctaaaatcggatttttccaaggagatatcaggctgctcatggatgacctcaaggtgcttcaacccactgtcttccccgtggttccaagactgctgaaccggatgtttgaccgaattttcggacaagcaaacaccacgctgaagcgatggctcttggactttgcctccaagaggaaagaagcagagcttcgcagcggcatcatcagaaacaacagcctgtgggaccggctgatcttccacaaagtacagtcgagcctgggcggaagagtccggctgatggtgacaggagccgccccggtgtctgccactgtgctgacgttcctcagagcagccctgggctgtcagttttatgaaggatacggacagacagagtgcactgccggttgctgcctgaccatgcctggagactggaccgcaggccatgttggggccccgatgccgtgcaatttgataaaacttgttgatgtggaagaaatgaattacatggctgccgagggcgagggcgaggtgtgtgtgaaagggccaaatgtatttcagggctacttgaaggacccagcgaaaacagcagaagctttggacaaagacggctggttacacacaggggacattggaaaatggttaccaaatggcaccttgaaaattatcgaccggaaaaagcacatatttaagctggcacaaggagaatacatagcccctgaaaagattgaaaatatctacatgcgaagtgagcctgttgctcaggtgtttgtccacggagaaagcctgcaggcatttctcattgcaattgtggtaccagatgttgagacattatgttcctgggcccaaaagagaggatttgaagggtcgtttgaggaactgtgcagaaataaggatgtcaaaaaagctatcctcgaagatatggtgagacttgggaaggattctggtctgaaaccatttgaacaggtcaaaggcatcacattgcaccctgaattattttctatcgacaatggccttctgactccaacaatgaaggcgaaaaggccagagctgcggaactatttcaggtcgcagatagatgacctctattccactatcaaggtttagtgtgaagaagaaagctcagaggaaatggcacagttccacaatctcttctcctgctgatggccttcatgttgttaattttgaatacagcaagtgtagggaaggaagcgttcgtgtttgacttgtccattcggggttcttctcataggaatgctagaggaaacagaacactgccttacagtcacctcatgttgcagaccatgtttatggtaatacacactttcc

SEQ ID NO: 4708 - DNA, 1363 bp, Homo sapiens
attgtttgcttgttttgttccggagtcggggccgggagggagtgcaggaggagggatccaagcttccaagcctctgctccgctctccttctatccagttggtctttagggcactgaaggaaactcttcttcagaaataaccttttaacttttcttctgtcagctgcctgccaatcacggagccagaggctgaggggaggctttgagccggtctgcgagtccggaaggcaaagatcgcgaagcttggcgctccagaacgctcagggggcaggtagcgctggtggattggaatcttgaagcaggtgtacagtgtaaagctgccctggatgagcaatttgaacctcagaagactctgttcatccagtgcgatgtggctgaccagcaacaactgagagacacttttagaaaagttgtagaccactttggaagactggacattttggtcaataatgctggagtgaataatgagaaaaactgggaaaaaactctgcaaattaatttggtttctgttatcagtggaacctatcttggtttggattacatgagtaagcaaaatggaggtgaaggcggcatcattatcaatatgtcatctttagcaggactcatgcccgttgcacagcagccggtttattgcgcttcaaagcatggcatagttggattcacacgctcagcagcgttggctgctaatcttatgaacagtggtgtgagactgaatgccatttgtccaggctttgttaacacagccatccttgaatcaattgaaaaagaagaaaacatgggacaatatatagaatataaggatcatatcaaggatatgattaaatactatggaattttggacccaccattgattgccaatggattgataacactcattgaagatgatgctttaaatggtgctattatgaagatcacaacttctaagggaattcattttcaagactatgatacaactccatttcaagcaaaaacccaatgaacagcttatgtgttagccatagctgaaaataagcacaaatagcttatattcagatcctatcttcatttgaatatagcttttaaatgaaatgttacagtttgaagttttccttcatgcacttggtgataaacgttttctaaatttttagttaagtatatggataaaaagttatgaactattaaaaatgtgatgtggaccaaaggctaggttgtaatcttgatagtctaaaaaatgatcaaaacaaatgattttcaaggaatattcaatattctgcctttcagaaagtgtatttatatctgtgcttcataaatattaatgttcttcagaacatcattttaaaggagatacttgaattgttatttaaatcaaaccagatgtaaaacac

SEQ ID NO: 4709 - DNA, 2469 bp, Homo sapiens
gactttgctgctggctgcccattggcctatcctccaccctctgctctcctgagaagtcaagtgtggattttgtctgctagttacctttagcccagtgggcagcagcgtggggctcggcatgtgacttgtgccctgagagaccttggtaggctgggggagcgcagctgagccctgctaacccccgcccacttccaggctcattgccctcttctgtgtctgcagtggggtgtcacctagtagtcagctgttggtggcacagatgaattcagcttagagaactatcaacacaggacaatgcaagcccatgagctgttccggtattttcgaatgccagagctggttgacttccgacagtacgtgcgtactcttccgaccaacacgcttatgggcttcggagcttttgcagcactcaccaccttctggtacgccacgagacccaaacccctgaagccgccatgcgacctctccatgcagtcagtggaagtggcgggtagtggtggtgcacgaagatccgcactacttgacagcgacgagcccttggtgtatttctatgatgatgtcacaacattatacgaaggtttccagaggggaatacaggtgtcaaataatggcccttgtttaggctctcggaaaccagaccaaccctatgaatggctttcatataaacaggttgcagaattgtcggagtgcataggctcagcactgatccagaagggcttcaagactgccccagatcagttcattggcatctttgctcaaaatagacctgagtgggtgattattgaacaaggatgctttgcttattcgatggtgatcgttccactttatgatacccttggaaatgaagccatcacgtacatagtcaacaaagctgaactctctctggtttttgttgacaagccagagaaggccaaactcttattagagggtgtagaaaataagttaataccaggccttaaaatcatagttgtcatggatgcctacggcagtgaactggtggaacgaggccagaggtgtggggtggaagtcaccagcatgaaggcgatggaggacctgggaagagccaacagacggaagcccaagcctccagcacctgaagatcttgcagtaatttgtttcacaagtggaactacaggcaaccccaaaggagcaatggtcactcaccgaaacatagtgagcgattgttcagcttttgtgaaagcaacagagaaagcacttcccttgagtgccagtgacacacacatttcatatttaccacttgctcacatttatgaacagttattgaagtgtgtaatgctgtgtcatggagctaaaatcggatttttccaaggagatatcaggctgctcatggatgacctcaaggtgcttcaacccactgtcttccccgtggttccaagactgctgaaccggatgtttgaccgaattttcggacaagcaaacaccacgctgaagcggtggctcttggactttgcctccaagaggaaagaagcagagcttcgcagcggcatcatcagaaacaacagcctgtgggaccggctgatcttccacaaagtacagtcgagcctgggcggaagagtccggctgatggtgacaggagccgccccggtgtctgccactgtgctgacgttcctcagagcagccctgggctgtcagttttatgaaggatacggacagacagagtgcactgccgggtgctgcctaaccatgcctggagactggaccgcaggccatgttggggccccgatgccgtgcaatttgataaaacttgttgatgtggaagaaatgaattacatggctgccgagggcgagggcgaggtgtgtgtgaaagggccaaatgtatttcagggctacttgaaggacccagcgaaaacagcagaagctttggacaaagacggctggttacacacaggggacattggaaaatggttaccaaatggcaccttgaaaattatcgaccggaaaaagcacatatttaagctggcacaaggagaatacatagcccctgaaaagattgaaaatatctacatgcgaagtgagcctgttgctcaggtgtttgtccacggagaaagcctgcaggcatttctcattgcaattgtggtaccagatgttgagacattatgttcctgggcccaaaagagaggatttgaagggtcgtttgaggaactgtgcagaaataaggatgtcaaaaaagctatcctcgaagatatggtgagacttgggaaggattctggtctgaaaccatttgaacaggtcaaaggcatcacattgcaccctgaattattttctatcgacaatggccttctgactccaacaatgaaggcgaaaaggccagagctgcggaactatttcaggtcgcagatagatgacctctattccactatcaaggtttagtgtgaagaagaaagctcagaggaaatggcacagttccacaatctcttctcctgctgatggccttcatgttgttaattt

SEQ ID NO: 4710 - DNA, 1232 bp, Homo sapiens
cttgtgccaccagaagagctcctctctgccgggcaccgcctgcctggagcagctgctggagccgccgcctcctcccgcagagccggcgcggagtcccgcggagtctcgggccccggagacgggcgaggagcacggcagcagccagaaaataataaacactgctggaaccagtaatgcagaagtccccttggctgatcccggaatgtaccagctggacattacattaagaaggggtcaaagtttagctgctcgagatcgaggagggacgagtgatccatatgtgaagtttaaaatcggaggaaaagaagtttttagaagtaagataatacacaagaacctcaaccctgtgtgggaagaaaaagcttgtattctggttgatcatcttagggagccattgtatataaaggtgtttgactatgattttggactacaggatgactttatgggctcagcctttctggatctgacacaattggagttaaacaggcccacagatgtgacccttactctgaaagatcctcattatcctgaccatgatcttggaatcattttgctctcagtcatccttacccctaaagaaggagagtccagggatgtgacaatgctaatgaggaagagttggaaaagatcaagtaagtttcagacccaaagtttacgcctatcagacctacacagaaaatcgcatctttggagaggaatagtcagcatcaccttgattgaagggggagacctcaaggccatggattccaacgggttgagcgatccctacgtgaagttccggcttgggcatcagaagtacaagagcaagattatgccaaaaacgttgaatcctcagtggagggaacaatttgattttcacctttatgaagaaagatgtgggatttccccaggtgaaagtcatcagagcggaagggttaatggctgccgacgtcactggaaaaagtgacccattttgtgtggtagaactgaacaacgatagactgctaacacatactgtctacaaaaatctcaatcctgagtggaataaagtcttcacgttcaacattaaagatatccattcagttcttgaagtgacagtttatgatgaagatcgggatcgaagtgctgactttctgggcaaagttgctataccattgctgtctattcaaaatggtgaacagaaagcctacgtcttgaaaaacaagcagctgacagggccaacaaagggggtcatctatcttgaaatagatgtg

SEQ ID NO: 4711 - DNA, 1517 bp, Homo sapiens
tttctctctcgctctctccgctgctgtagccggaccctttgccttcgccactgctcagcgtctgcacatccctacaatggctaaaacagcaatggcctacaaggaaaaaatgaaggagctgtccatgctgtcactgatctgctcttgcttttacccggaacctcgcaacatcaacatctatacttacgatgatatggaagtgaagcaaatcaacaaacgtgcctctggccaggcttttgagctgatcttgaagccaccatctccaaagaagaaagacctgtccctggaggagatccagaagaaactggaggctgcagaggaaagaagaaagtctcaggaggcccaggtgctgaaacaattggcagagaagagggaacacgagcgagaagtccttcagaaggctttggaggagaacaacaacttcagcaagatggcggaggaaaagctgatcctgaaaatggaacaaattaaggaaaaccgtgaggctaatctagctgctattattgaacgtctgcaggaaaaggagaggcatgctgcggaggtgcgcaggaacaaggaactccaggttgaactgtctggctgaagcaagggagggtctggcacgccccaccaatagtaaatccccctgcctatattataatggatcatgcgatatcaggatggggaatgtatgacatggtttaaaaagaactcattataaaaaaaaaaaaacaaaaaaaatcaaaaattaaaaaaaatcaatgcggtctctttgcagaatgttttgcttgatgtttaaaaaataccttggatcttattttgtaaatacttacatttttgttaaaaaatacaagtattgcattatgcaagttatttcataatcttacatgtcctgtaacaggcttttgatgttgtgtctttccactcaaatgaatttgctaggtctgttctttttgaagctccccatgtctaactccattccaaaagaaaaatgaggtcagtagacagtctatggtgctagaaacccaccattgcctaatgacctagaaggctttgttgtctctgagcttgactaagaccatacctagatcacaggtattatgactccacatgaaccttcacatttgttcgctcataatctacttactgcctaaaaactacaaaaccaggctaagaaataccaccagtcatagcatttacttctgcttctcctggattatgtgctacaaatgtgctttggctttagaaagggatggatgagaagacagacctgagaccaatctgggtagaagcaaaaagttgaaccttttaaagtgctgaacacaaatccaaattcgaatggttcaagcagccgtgaaatcgctcttcataaagtgggcttaattctctagtttaagttcttttgatggaatgaattaattaatgtgtcaggtggcttatttgtggatgccatgattgatgatgttcattttaagctcttacctatagtacaagtacatgatgctactgaatatttttccacttggaaactgtgagct

SEQ ID NO: 4712 - DNA, 1970 bp, Homo sapiens
actcacacacaatgtgccatcctgacaaggcttttacttctgataagctccaatgtgtgtttaatgaatacaaagccgcggtctgggtgccgcctcggccgcggccgctctcccgcgctcctttgccagaagatcgtactgagaagcactccacaatgccagactcacctgtggatgtgaagacgcaatctaggctgactcctccaacaatgccacctcccccaactactcaaggagctccaagaaccagttcatttacaccgacaacgttaactaatggcacgagccattctcctacagccttgaatggcgccccctcaccacccaatggcttcagcaatgggccttcctcttcttcctcctcctctctggctaatcaacagctgcccccagcctgtggtgccaggcaactcagcaagctgaaaaggttccttactaccctgcagcagtttggcaatgacatttcacccgagataggagaaagagttcgcaccctcgttctgggactagtgaactccactttgacaattgaagaattccattccaaactgcaagaagctactaacttcccactgagaccttttgtcatcccatttttgaaggccaacttgcccctgctgcagcgtgagctcctccactgcgcaagactggccaaacagaaccctgcccagtacctcgcccagcatgaacagctgcttctggatgccagcaccacctcacctgttgactcctcagagctgcttctcgatgtgaacgaaaacgggaagaggcgaactccagacaggaccaaagaaaatggctttgacagagagcctttgcactcagaacatccaagcaagcgaccatgcactattagcccaggccagcgatacagtccaaataacggcttatcctaccagcccaatggcctgcctcaccctaccccacctccacctcagcattaccgtttggatgatatggccattgcccaccactacagggactcctatcgacaccccagccacagggacctcagggacagaaacagacctatggggttgcatggcacacgtcaagaagaaatgattgatcacagactaacagacagagaatgggcagaagagtggaaacatcttgaccatctgttaaactgcataatggacatggtagaaaaaacaaggcgatctctcaccgtactaaggcggtgtcaagaagcagaccgggaagaattgaattactggatccggcggtacagtgacgccgaggacttaaaaaaaggtggcggcagtagcagcagccactctaggcagcagagtcccgtcaacccagacccagttgcactagacgcgcatcgggaattccttcacaggcctgcgtctggatacgtgccagaggagatctggaagaaagctgaggaggccgtcaatggggtgaagcgccaggcgatgacggagctgcagaaggccgtgtctgaggcggagcggaaagcccacgacatgatcacaacagagagggccaagatggagcgcacggtcgccgaggccaaacggcaggcggcggaggacgcactggcagttatcagtcagcaggaggattcaagcgagagttgctggaattgtggccgtaaagcgagtgaaacctgcagtggctgtaacacagcccgatactgtggctcattttgccagcacaaagactgggagaagcaccatcacatctgtggacagaccctgcaggcccagcagcagggagacacacctgcagtcagctcctctgtcacgcccaacagcggggctgggagcccgatggacacaccaccagcagccactccgaggtcaaccaccccgggaaccccttccaccatagagacaacccctcgctagacgtgaactcagaactgtcggaggaaagacaacacaaccaacgcgaaaccaattcctcatcctcagatgctcaaagttgttttttttgtttgtttgtttattagatgaatt

SEQ ID NO: 4713 - DNA, 1852 bp, Homo sapiens
ttatatcatgctggtggaggtttttgagagtgaacattcacgtaggaaatacttttatctggtcggctatgggatgcctgcactcattgtggctgtgccagctgcagtagactacaggagttatggaacagataaagtatgttggctccgacttgacacctacttcatttggagttttataggaccagcaactttgataattatgcttaatgtaatcttccttgggattgctttatataaaatgtttcatcatactgctatactgaaacctgaatcaggctgtcttgataacatcaagtcatgggttataggtgcaatagctcttctctgcctattaggattgacctgggcctttggactcatgtatattaatgaaagcacagtcatcatggcctatctcttcaccattttcaattctctacagggaatgtttatatttattttccattgtgtcctacagaagaaggtacgaaaagagtatgggaaatgcctgcgaacacattgctgtagtggcaaaagtacagagagttccattggttcagggaaaacatctggttctcgaactcctggacgctactccacaggctcacagagccgaatccgtagaatgtggaatgacacggttcgaaagcagtcagagtcttcctttattactggagacataaacagttcagcgtcactcaacagagaggggcttctgaacaatgccagggatacaagtgtcatggatactctaccactgaatggtaaccatggcaatagttacagcattgccagcggcgaatacctgagcaactgtgtgcaaatcatagaccgtggctataaccataacgagaccgccctagagaaaaagattctgaaggaactcacttccaactatatcccttcttacctgaacaaccatgagcgctccagtgaacagaacaggaatctgatgaacaggctggtgaataaccttggcagtggaagggaagatgatgccattgtcctggatgatgccacctcgtttaaccacgaggagagtttgggcctggaactcattcatgaggaatctgatgctcctttgctgcccccaagagtatactccaccgagaaccaccagccacaccattataccagaaggcggatcccccaagaccacagtgagagctttttccctttgctaaccaacgagcacacagaagatctccagtcaccccatagagactctctctataccagcatgccgacactggctggtgtggccgccacagagagtgttaccaccagcacccagaccgaacccccaccggccaaatgtggtgatgccgaagatgtttactacaaaagcatgccaaacctaggctccagaaaccacgtccatcagctgcatacttactaccagctaggtcgcggcagcagtgatggatttatagttcctccaaacaaagatgggacccctcccgagggaagttcaaaaggaccggctcatttggtcactagtctatagaagatgacacagaaattggaaccaacaaaactgctaacaccttgttgactgttctgagttgatataagcagtggtaataatgtgtgtactcctaaatctttatgctgtcctctaaagacaaacacaaactctcagactttttttttttaatgggatttttaggtcagcccaggggagaaagataactgctaaaattcccctgtaccccatcctttcttgtcctttccccttcagatggagacttcattatgttaatgaacaagatatgaagaaaatggcactcattgtggccttgttgaattatgttgtgtatgttttaacatctctgatgctgtgttactaaaattacaaggacctgctttt

SEQ ID NO: 4714 - DNA, 1372 bp, Homo sapiens
cttttgcatcttggaagggactgtaatctactgtagtgaagaacagagcctctcaatcagacgggtgtaaataagagacggaggggagtccagaagaaaaggaagaggaggaaaaacaagtgtgtgttggggggaacagggggaaaagcatttttggtggatggtatgaagccagccatggaaactgcagccgaggaaaatactgaacaaagccaagagagaaaagaacatttaaatgtggaaaagatctcaacgagccatttgtgaacagcagagctgaaatggaaattggcaggtaccactggatgtacccaggctcaaagaaccaccagtaccatcccgtgccaaccctgggggacagggctagccccttgagcagtccaggctgctttgaatgctgcatcaagtgtctgggaggagtcccctacgcctccctggtggccaccatcctctgcttctccggggtggccttattctgcggctgtgggcatgtggctctcgcaggcaccgtggcgattcttgagcaacacttctccaccaacgccagtgaccatgccttgctgagcgaggtgatacaactgatgcagtatgtcatctatggaattgcgtcctttttcttcttgtatgggatcattctgttggcagaaggcttttacaccacaagtgcagtgaaagaactgcacggtgagtttaaaacaaccgcttgtggccgatgcatcagtggaatgttcgttttcctcacctatgtgcttggagtggcctggctgggtgtgtttggtttctcagcggtgcccgtgtttatgttctacaacatatggtcaacttgtgaagtcatcaagtcaccgcagaccaacgggaccacgggtgtggagcagatctgtgtggatatccgacaatacggtatcattccttggaatgctttccccggaaaaatatgtggctctgccctggagaacatctgcaacacaaacgagttctacatgtcctatcacctgttcattgtggcctgtgcaggagctggtgccaccgtcattgccctgatccacttcctcatgatactgtcttctaactgggcttacttaaaggatgcgagcaaaatgcaggcttaccaggatatcaaagcaaaggaagaacaggaactgcaagatatccagtctcggtcaaaagaacaactcaattcttacacataaatgtttgccagagtgtttcggccgacgtatttacagctctgacaaatcatcagacagctgctctgcagtacagatgtgtatcccaccaaactaatgtagatgtacaaacacttcactgtctgtctcaagctgctgggatgtatctctaggaaaaccttccagtgggtaaatctttttcttta

SEQ ID NO: 4715 - DNA, 1936 bp, Homo sapiens
agtgtcatcacaaattaccaggagaaattgcttccagctcacaatcacatctgcttttggcaagaactaatgcaccaagacttcaagttctaagcctctgttcagattttaattgcaattgatcaggtttatattattgtacctccagagacctcctagagccagaacccggctggcttgctgtttcctttagagcagcgcatatcattatttggtgttctggtggaggacttttctgatggcagaaattagtttctctgggttcatcaggacgggatgcttcaagatttaagtgcaagtgtcttctttccaccttgttcacaacacagaacgttagtggcttttcatggcctgccactgaaaatcaagaaagaaccccacagtccatgttcagaaatcagctctgcctgcagtcaagaacagccctttaaattcagctatggagaaaagtgcctgtacaatgtcagtgcctatgatcagaagccacaagtgggaatgaggccctccaacccccccacaccatccagcacgccagtgtccccactgcatcatgcatctccaaactcaactcatacaccgaaacctgaccgggccttcccagctcacctccctccatcgcagtccataccagatagcagctaccccatggaccacagatttcgccgccagctttctgaaccctgtaactcctttcctcctttgccgacgatgccaagggaaggacgtcctatgtaccaacgccagatgtctgagccaaacatccccttcccaccacaaggctttaagcaggagtaccacgacccagtgtatgaacacaacaccatggttggcagtgcggccagccaaagctttccccctcctctgatgattaaacaggaacccagagattttgcatatgactcagaagtgcctagctgccactccatttatatgaggcaagaaggcttcctggctcatcccagcagaacagaaggctgtatgtttgaaaagggccccaggcagttttatgatgacacctgtgttgtcccagaaaaattcgatggagacatcaaacaagagccaggaatgtatcgggaaggacccacataccaacggcgaggatcacttcagctctggcagtttttggtagctcttctggatgacccttcaaattctcattttattgcctggactggtcgaggcatggaatttaaactgattgagcctgaagaggtggcccgacgttggggcattcagaaaaacaggccagctatgaactatgataaacttagccgttcactccgctattactatgagaaaggaattatgcaaaaggtggctggagagagatatgtctacaagtttgtgtgtgatccagaagcccttttctccatggcctttccagataatcagcgtccactgctgaagacagacatggaacgtcacatcaacgaggaggacacagtgcctctttctcactttgatgagagcatggcctacatgccggaagggggctgctgcaacccccacccctgcaacgaaggctacgtgtattaacacaagtgacagtcaagcagggcgtttttgcgcttttccttttttctgcaagatacagagaattgctgaatctttgttttatgtctgttgtttgtattttatttttaaataataatacacaaaaaggggcttttcctgttgcattattctatggtctgccatggactgtgcactttatttgagagtgggtgggagtaatctaaacatttattctgtgtaacaggaagctaatgggtgaatgggcagagggatttggggattactttttacttaggcttgggatggggtcctacaagttttgagtatgatgaaactatatcatgtctgtttgatttcataacaacataagataatgttattttatcggggtatctatggtacagttaatttcacgttgtgt

SEQ ID NO: 4716 - DNA, 3566 bp, Homo sapiens
gacgatgcagccagctcagtgagtggctggtcatttgaaagtagcacattgtgtctcattttagtattctgaatcagtgcatcatataaatgcattttgaataatgcatgtctgctactttaattacttgtttaattatctttagtttgtttcaaagcctagaacaactgctgttgcttggatgattagaaaattgcttccagttgcagaaatctatttcctgttgtttcttctggcagtgattgcagatcggcctcccccagttattcgacaaggtcctgtgaatcagactgtagccgtggatggcactttcgtcctcagctgtgtggccacaggcagtccagtgcccaccattctgtggagaaaggatggagtcctcgtttcaacccaagactctcgaatcaaacagttggagaatggagtactgcagatccgatatgctaagctgggtgatactggtcggtacacctgcattgcatcaacccccagtggtgaagcaacatggagtgcttacattgaagttcaagaatttggagttccagttcagcctccaagacctactgacccaaatttaatccctagtgccccatcaaaacctgaagtgacagatgtcagcagaaatacagtcacattatcgtggcaaccaaatttgaattcaggagcaactccaacatcttatattatagaagccttcagccatgcatctggtagcagctggcagaccgtagcagagaatgtgaaaacagaaacatctgccattaaaggactcaaacctaatgcaatttaccttttccttgtgagggcagctaatgcatatggaattagtgatccaagccaaatatcagatccagtgaaaacacaagatgtcctaccaacaagtcagggggtggaccacaagcaggtccagagagagctgggaaatgctgttctgcacctccacaaccccaccgtcctttcttcctcttccatcgaagtgcactggacagtagatcaacagtctcagtatatacaaggatataaaattctctatcggccatctggagccaaccacggagaatcagactggttagtttttgaagtgaggacgccagccaaaaacagtgtggtaatccctgatctcagaaagggagtcaactatgaaattaaggctcgccctttttttaatgaatttcaaggagcagatagtgaaatcaagtttgccaaaaccctggaagaagcacccagtgccccaccccaaggtgtaactgtatccaagaatgatggaaacggaactgcaattctagttagttggcagccacctccagaagacactcaaaatggaatggtccaagagtataaggtttggtgtctgggcaatgaaactcgataccacatcaacaaaacagtggatggttccaccttttccgtggtcattccctttcttgttcctggaatccgatacagtgtggaagtggcagccagcactggggctgggtctggggtaaagagtgagcctcagttcatccagctggatgcccatggaaaccctgtgtcacctgaggaccaagtcagcctcgctcagcagatttcagatgtggtgaagcagccggccttcatagcaggtattggagcagcctgttggatcatcctcatggtcttcagcatctggctttatcgacaccgcaagaagagaaacggacttactagtacctacgcgggtatcagaaaagtcccgtcttttaccttcacaccaacagtaacttaccagagaggaggcgaagctgtcagcagtggagggaggcctggacttctcaacatcagtgaacctgccgcgcagccatggctggcagacacgtggcctaatactggcaacaaccacaatgactgctccatcagctgctgcacggcaggcaatggaaacagcgacagcaacctcactacctacagtcgcccagctgattgtatagcaaattataacaaccaactggataacaaacaaacaaatctgatgctccctgagtcaactgtttatggtgatgtggaccttagtaacaaaatcaatgagatgaaaaccttcaatagcccaaatctgaaggatgggcgttttgtcaatccatcagggcagcctactccttacgccaccactcagctcatccagtcaaacctcagcaacaacatgaacaatggcagcggggactctggcgagaagcactggaaaccactgggacagcagaaacaagaagtggcaccagttcagtacaacatcgtggagcaaaacaagctgaacaaagattatcgagcaaatgacacagttcctccaactatcccatacaaccaatcatacgaccagaacacaggaggatcctacaacagctcagaccggggcagtagtacatctgggagtcaggggcacaagaaaggggcaagaacacccaaggtaccaaaacagggtggcatgaactgggcagacctgcttcctcctcccccagcacatcctcctccacacagcaatagcgaagagtacaacatttctgtagatgaaagctatgaccaagaaatgccatgtcccgtgccaccagcaaggatgtatttgcaacaagatgaattagaagaggaggaagatgaacgaggccccactccccctgttcggggagcagcttcttctccagctgccgtgtcctatagccatcagtccactgccactctgactccctccccacaggaagaactccagcccatgttacaggattgtccagaggagactggccacatgcagcaccagcccgacaggagacggcagcctgtgagtcctcctccaccaccacggccgatctcccctccacatacctatggctacatttcaggacccctggtctcagatatggatacggatgcgccagaagaggaagaagacgaagccgacatggaggtagccaagatgcaaaccagaaggcttttgttacgtgggcttgagcagacacctgcctccagtgttggggacctggagagctctgtcacggggtccatgatcaacggctggggctcagcctcagaggaggacaacatttccagcggacgctccagtgttagttcttcggacggctcctttttcactgatgctgactttgcccaggcagtcgcagcagcggcagagtatgctggtctgaaagtagcacgacggcaaatgcaggatgctgctggccgtcgacattttcatgcgtctcagtgccctaggcccacaagtcccgtgtctacagacagcaacatgagtgccgccgtaatgcagaaaaccagaccagccaagaaactgaaacaccagccaggacatctgcgcagagaaacctacacagatgatcttccaccacctcctgtgccgccacctgctataaagtcacctactgcccaatccaagacacagctggaagtacgacctgtagtggtgccaaaactcccttctatggatgcaagaacagacagatcatcagacagaaaaggaagcagttacaaggggagagaagtgttggatggaagacaggttgttgacatgcgaacaaatccaggtgatcccagagaagcacaggaacagc

SEQ ID NO: 4717 - DNA, 1618 bp, Homo sapiens
aacaccacccagtgtggagcagcccagccaagcactgtcaggaatcctgtgaagcagctccagctatgtgtgaagaagaggacagcactgccttggtgtgtgacaatggctctgggctctgtaaggccggctttgctggggacgatgctcccagggctgttttcccatccattgtgggacgtcccagacatcagggggtgatggtgggaatgggacaaaaagacagctacgtgggtgacgaagcacagagcaaaagaggaatcctgaccctgaagtacccgatagaacatggcatcatcaccaactgggacgacatggaaaagatctggcaccactctttctacaatgagcttcgtgttgcccctgaagagcatcccaccctgctcacggaggcacccctgaaccccaaggccaaccgggagaaaatgactcaagtaagtatgctaccccagcacacaacactgtggggtctggggaaacttctgttagaaggaggctatgcagcacagcagagagaaggccggagctaggagtccaccaacagactaacagccttcagtgaactcagggatcccaaaggacaggaacagcttgaaagtacttgcatccttcctgcagggaccagccctttgcctccaaaagcaataggaaatttaaaagatttcactgagaaggggccacgtttaagttataatgtctaaggagaagtcacttcaaaatgcagcatcacatacaataggaatttgggttccagagtcagacatatctaggtttgaaaactggatctgccacttatcagttatgtgaccttaaagaactccgttaatttctcagagcctcagtttccttgtctataagttgggagtaatattaatactatcatttttccaaggattgatgtgaacattaatgaggtgaaatgacagatgtgtatcatggttcctaataaacatccaaaatatagtacttactattgtcattattattacttgtttgaagctaaagacctcacaatagaatcccatccagcccaccagacagagctctgagttttctagtttggaagagctattaaataacaacgtctagtgtcaattctatacttgttatggtcaagtactgggctcagcattttacattcattgtctctttaagttctagcaatgtgaagcaggaactatgattatattgactacataaatgaagaaattgaggctcagatacattaagtaattctcccagggtcacacagctagaactggcaaagcctgggattgatccatgatcttccagcattgaagaatcataaatgtaaataactgcaaggccttttcctcagaagagctcctggtgcttgcaccaacccactagcacttgttctctacaggggaacatctgtgggcctgggaatcactgcacgtcgcaagagatgttgcttctgatgaattattgttcctgtcagtggtgtgaaggcaaaaaaaaaaaaaatggttggaaattatggcttgctagcaaatgatgtcagacattctggttaatagagtaggaagggtcttacagatggagaaatgaagacccacggacatctcctgatgcacaaacttctcacaagtgacct

SEQ ID NO: 4718 - DNA, 1275 bp, Homo sapiens
aaatacccaggattgctacaaagaaacaggcagctgccagaaatttgttggatttgaggagtccagagcgccaacccgctctgtctgcgtggacttacttccttggatcttcgtggactctgaagttgccaagtgtgtgtgcctgctccagaaaacaaaggaagccaccattttttctcattcacagtgcagggagatacctcagtagaagcatacagtccagtcttcaactagggacccctaccaggatgtccaaaaggctcagccctcagttacagcacaacatcacagaagatgcctattgtgaaacacacctggaaccaacacggctgttctgtgatgttgaccaaatcacactctgcagcaaatgcttccagtcccaggagcacaaacatcacatggtgtgtgggatacaagaggctgctgagaattacaggaagttattccaggaaatattgaacacatcgagggagaaacttgaagcagctaaaagcatattgactgatgagcaagaaagaatggcgatgattcaggaagaggaacaaaattttaaaaagatgattgagtctgagtatagtatgagactccggttgttgaatgaagagtgtgagcaaaatctccagagacagcaggaatgcatatctgacttgaacctgagagaaacccttctgaatcaagcgatcaagcttgccaccgagctagaggagatgttccaggaaatgctacagagactgggccgtgtggggagagagaacatggagaaactgaaggagagtgaagccagggcttctgaacaggtccgcagcctcctaaagctcatcgtggagcttgagaaaaagtgtggggaaggcaccttggcattgctcaaggtaagatgctgggaaaaagaaaataaaattcattccagtatttgagaaatgagaagtggacagtactcattaggggttgctgtcagaacacaatatccaatgatcttcaaccacaaaagaaggctacatgactttctttcagctgccaaaagctttaggaatggtcatagctttgtgggatagtgtggagctgcttcatgagatgaattctcaccttaaaattatcagcagtaagttagggttgagatgtgacacaatgtggttaatacctccatgcaatgaaatattctgtaatcataaagaataaaacagctctataggcactaacagtatttcaagcactcattaagtgaaaaagaaagatgcagactgctttttgtttgatctttggataataagtgtatat

SEQ ID NO: 4719 - DNA, 1386 bp, Homo sapiens
accgcagcggacagcgccaagtgaagcctcgcttcccctccgcggcgaccagggcccgagccgagagtagcagttgtagctacccgcccagaaactagacacaatgtgcgacgaagacgagaccaccgccctcgtgtgcgacaatggctccggcctggtgaaagccggcttcgccggggatgacgcccctagggccgtgttcccgtccatcgtgggccgcccccgacaccagggcgtcatggtcggtatgggtcagaaagattcctacgtgggcgacgaggctcagagcaagagaggtatcctgaccctgaagtaccctatcgagcacggcatcatcaccaactgggatgacatggagaagatctggcaccacaccttctacaacgagcttcgcgtggctcccgaggagcaccccaccctgctcaccgaggcccccctcactcccaaggccaaccgcgagaagatgacccagatcatgtttgagaccttcaacgtgcccatttatgagggctacgcgctgccgcacgccatcatgcgcctggacctggcgggccgcgatctcaccgactacctgatgaagatcctcactgagcgtggctactccttcgtgaccacagctgagcgcgagatcgtgcgcgacatcaaggagaagctgtgctacgtggccctggacttcgagaacgagatggcgacggccgcctcctcctcctccctggaaaagagctacgagctgccagacgggcaggtcatcaccatcggcaacgagcgcttccgctgcccggagacgctcttccagccctccttcatcggtatggagtcggcgggcattcacgagaccacctacaacagcatcatgaagtgtgacatcgacatcaggaaggacctgtatgccaacaacgtcatgtcggggggcaccacgatgtaccctgggatcgctgaccgcatgcagaaagagatcaccgcgctggcacccagcaccatgaagatcaagatcatcgccccgccggagcgcaaatactcggtgtggatcggcggctctatcctggcctcgctgtccaccttccagcagatgtggatcaccaagcaggagtacgacgaggccggcccttccatcgtccaccgcaaatgcttctagacacactccacctccagcacgcgacttctcaggacgacgaatcttctcaatgggggggcggctgagctccagccaccccgcagtcactttctttgtaacaacttccgttgctgccatcgtaaactgacacagtgtttataacgtgtacatacattaacttattacctcattttgttatttttcgaaacaaagccctgtggaagaaaatggaaaacttgaagaagcattaaagtcattctgttaagctgcgt

SEQ ID NO: 4720 - DNA, 1335 bp, Homo sapiens
atctctgggtgctgggcggtcatggcgctactagatgtatgcggagccccccgagggcagcggccggaatcggctctcccggttgcgggaagcgggcgtcgctcggacccaggacactacagtttctctatgcgatctccagagctcgctttaccccggggaatgcagcccacagaattcttccagtccctgggtggggacggagaaaggaacgttcagattgagatggcccatggcaccaccacgctcgccttcaagttccagcatggagtgattgcagcagtggattctcgggcctcagctgggtcctacattagtgagtgtatacgctccagcaggcagaatctggggagctgggctctcctttccacaggaggccaactctgcaacaaagtggaagtggatattgatttaggacacactgggggatctatggggtcatcccttctctcccaaagctccatcttcttccaggtgccttacgggtgaacaaggtgattgagattaacccttacctgcttggcaccatgtctggctgtgcagcagactgtcagtactgggagcgcctgctggccaaggaatgcaggtaagcgaggcctctcatcttcctttcttagcctagtggttaatccctggatctctcagatcattgctccttactcttgtcctatgtggtccatcttagtgctaatagtatatttcacaaaacagctttttggtgataagacccttctcccaaatctcagcctgtgctccactcataagccagatagtacgtcaggtatttagcactgacacatccaccctggcgggacagtatcatttactaggctgcctttgtatgtttcagatactttaaattccaaatctttctctgatctttagatcctacaaaataattcctttccaatgcttatctctttaatcatttcctgccccatcaagttggaaagagctaacctctctttcctcactccaccttgtcctcacccaggctgtactatctgcgaaatggagaacgtatttcagtgtcggcagcctccaagctgctgtccaacatgatgtgccagtaccggggcatgggcctctctatgggcagtatgatctgtggctgggataagaaggtgggtgctctccattcttcatgttcccccaccatgttccctatggatgacagatctgtttcccatcatatactcctactccctccctgacaagatgcatggcatatagagtgcttggttatagaactgtttcagtatatccatggactatttattggcccagatatgaatcattgcatgtgttttgtaagcttgtcccttttgttaaaca

SEQ ID NO: 4721 - DNA, 937 bp, Homo sapiens
attcttgtctgttctgcctcactcccgagctctactgactcccaacagagcgcccaagaagaaaatggccataagtggagtccctgtgctaggatttttcatcatagctgtgctgatgagcgctcaggaatcatgggctatcaaagaagaacatgtgatcatccaggccgagttctatctgaatcctgaccaatcaggcgagtttatgtttgactttgatggtgatgagattttccatgtggatatggcaaagaaggagacggtctggcggcttgaagaatttggacgatttgccagctttgaggctccaactatactccgatcaccaatggtacctccctctctgctgcactcctggacatgggaatccatagtttgaaagtagttgcttcagctctttgtgttagattattgtaactgattttccctccaagggtctaaccttgccattaacaagccccaaattctcatgccagaggtctgagaactttatgggtttgatcctatcttgttgtgctcaagtcttgtctctgtcatccatggtctcctacgaagtcattgccctaagttcatgctgggggagccagaagggaagtccttggatatcttatacctcaatattggctcaatttcttggggagggggtgctgtcagagattgttatctgaggatgtgacatagatttctcagggcacaatttcaactactttttcagctttagggtttttagatacgtttgtaccacaattgagcatgggagggagaggggtgagcctaagcagtgatggctgatttctgtcatgtctgtcatgtgtcccccagtacctccagaggtaactgtgctcacaaacagccctgtggaactgagagagcccaacgtcctcatctgtttcatagacaagttcaccccaccagtggtcaatgtcacgtggcttcg

SEQ ID NO: 4722 - DNA, 1678 bp, Homo sapiens
aattgaagggaggaggacccttaggaaggaaagaaaaagagaatgtacttttcaggccaaggtttctgggttttaaaaccatcacttcagaaatcaaaatattttagcagaaaaacccccatgagaaagcttcaaggtctcggctgtgacaaagacaacatttcagtagaagtttaaggttgcgtgttgtgggcttgggaaggggtagagatctttatttcctttcattctaattctgtgccactgatacctgccagtaaaatacatgaaacatattccagaaagagttgatttagtagatgaaaaatgcgtctcccgagaccagagaaggagtgattcgggaaagttacctcaaaggccacgaccagctggttcccgtcaccctcttggccattgcagtcatcctggctttcgtcatgggggccgtcttctcgggcatcaccgtctactgcgtctgtgatcatcggcgcaaagacgtggctgtggtgcagcgcaaggagaaggagctcacccactcgcgccggggctccatgagcagcgtcaccaagctcagcggcctctttggggacactcaatccaaagacccaaagccggaggccatcctcacgccactcatgcacaacggcaagctcgccactcccggcaacacggccaagatgctcattaaagcagaccagcaccacctggacctgacggccctccccaccccagagtcaaccccaacgctgcagcagaagcggaagcccagccgcggcagccgcgagtgggagaggaaccagaacctcatcaatgcctgcacaaaggacatgccccccatgggctcccctgtgattcccacggacctgcccctgcgggcctcccccagccacatccccagcgtggtggtcctgcccatcacgcagcagggctaccagcatgagtacgtggaccagcccaaaatgagcgaggtggcccagatggcgctggaggaccaggccgccacactggagtataagaccatcaaggaacatctcagcagcaagagtcccaaccatggggtgaaccttgtggagaacctggacagcctgccccccaaagttccacagcgggaggcctccctgggtcccccgggagcctccctgtctcagaccggtctaagcaagcggctggaaatgcaccactcctcttcctacggggttgactataagaggagctaccccacgaactcgctcacgagaagccaccaggccaccactctcaaaagaaacaacactaactcctccaattcctctcacctctccagaaaccagagctttggcaggggagacaacccgccgcccgccccgcagagggtggactccatccaggtgcacagctcccagccatctggccaggccgtgactgtctcgaggcggcccagcctcaacgcctacaactcactgacaaggtcggggctgaagcgtacgccctcgctaaagccggacgtaccccccaaaccatcctttgctcccctttccacatccatgaagcccaatgatgcgtgtacataatcccagggggagggggtcaggtgtcgaaccagcaggcagggcgaggtgcccgctcagctcagcaaggttctcaactgcctcgagtacccaccagaccaagaaggcctgcggcagagccgaggacgctgggtcctcctctctgggacaca

SEQ ID NO: 4723 - DNA, 1603 bp, Homo sapiens
agcgatcgcccagcaccaagtccgcttccaggctttcggtttctttgcctccatcttgggtgcgccttcccggcgtctaggggagcgaaggctgaggtggcagcggcaggagagtccggccgcgacaggacgagtgctgatggcagagattggtgaggatttggataaatctgatgtgtcctcattaattttcctcatgaaggattacatgggccgaggcaagataagcaaggagaagagtttcttggaccttgtggttgagttggagaaactaaatctggttgccccagatcaactggatttattagaaaaatgcctaaagaacatccacagaatagacctgaagacaaaaatccagaagtacaagcagtctgttcaaggagcagggacaagttacaggaatgttctccaagcagcaatccaaaagagtctcaaggatccttcaaataacttcaggctccataatgggagaagtaaagaacaaagacttaaggaacagcttggcgctcaacaagaaccagtgaagaaatccattcaggaatcagaagcttttttgcctcagagcatacctgaagagagatacaagatgaagagcaagcccctaggaatctgcctgataatcgattgcattggcaatgagacagagcttcttcgagacaccttcacttccctgggctatgaagtccagaaattcttgcatctcagtatgcatggtatatcccagattcttggccaatttgcctgtatgcccgagcaccgagactacgacagctttgtgtgtgtcctggtgagccgaggaggctcccagagtgtgtatggtgtggatcagactcactcagggctccccctgcatcacatcaggaggatgttcatgggagattcatgcccttatctagcagggaagccaaagatgttttttattcagaactatgtggtgtcagagggccagctggaggacagcagcctcttggaggtggatgggccagcgatgaagaatgtggaattcaaggctcagaagcgagggctgtgcacagttcaccgagaagctgacttcttctggagcctgtgtactgcggacatgtccctgctggagcagtctcacagctcaccgtccctgtacctgcagtgcctctcccagaaactgagacaagaaagggggacaattcccggaagtggaattacagagtcaaaggacatgcatttttcaagcctcggatgcatcttactagatgtcctataggatggtcatatcagctttataggagagtagctgtgtccctgaattctccctgacactgcatgctcttatatttcctcaagttttgacaatttgataggtgaaaagtggtatctgactgttcagatctggaaggctttgttatataaacatttttttaatgtttattggcaagaatacttttctaagagaaacatcagtgagctggtttccatttaagctgaatgaagccacaatgtacctcaagtataagattaactggcctttttcagttgcactctaattacaatttagaatgatgtttctgagccacctgtcaaatgcattctgggctgtacctctgcgtaccccaggaataaatctcat

SEQ ID NO: 4724 - DNA, 1488 bp, Homo sapiens
aaattaccaggagaaattgcttccagctcacaatcacatctgcttttggcaagaactaatgcaccaagacttcaagttctaagcctctgttcagattttaattgcaattgatcaggtttatattattgtacctccagagacctcctagagccagaacccggctggcttgctgtttcctttagagcagcgcatatcattatttggtgttctggtggaggacttttctgatggcagaaattagtttctctgggttcatcaggacgggatgcttcaagatttaagtgcaagtgtcttctttcctccttgttcacaacacagaacgttagctcaggtacctgacaatgatgagcagtttgtaccagactatcaggctgaaagtttggcttttcatggcctgccactgaaaatcaagaaagaaccccacagtccatgttcagaaatcagctctgcctgcagtcaagaacagccctttaaattcagctatggagaaaagtgcctgtacaatgtcagatttcgccgccagctttctgaaccctgtaactcctttcctcctttgccgacgatgccaagggaaggacgtcctatgtaccaacgccagatgtctgagccaaacatccccttcccaccacaaggctttaagcaggagtaccacgacccagtgtatgaacacaacaccatggttggcagtgcggccagccaaagctttccccctcctctgatgattaaacaggaacccagagattttgcatatgactcagaagtgcctagctgccactccatttatatgaggcaagaaggcttcctggctcatcccagcagaacagaaggctgtatgtttgaaaagggccccaggcagttttatgatgacacctgtgttgtcccagaaaaattcgatggagacatcaaacaagagccaggaatgtatcgggaaggacccacataccaacggcgaggatcacttcagctctggcagtttttggtagctcttctggatgacccttcaaattctcattttattgcctggactggtcgaggcatggaatttaaactgattgagcctgaagaggtggcccgacgttggggcattcagaaaaacaggccagctatgaactatgataaacttagccgttcactccgctattactatgagaaaggaattatgcaaaaggtggctggagagagatatgtctacaagtttgtgtgtgatccagaagcccttttctccatggcctttccagataatcagcgtccactgctgaagacagacatggaacgtcacatcaacgaggaggacacagtgcctctttctcactttgatgagagcatggcctacatgccggaagggggctgctgcaacccccacccctacaacgaaggctacgtgtattaacacaagtgacagtcaagcagggcgtttttgcgcttttccttttttctgcaagatacagagaattgctgaatctttgttttatttctgttgtttgtatt

SEQ ID NO: 4725 - DNA, 1826 bp, Homo sapiens
actacggagagagaagccaagggagaggaggaggaggaaactaacgattccctgcccacccccacacccagcaccaccaacaggtgggcaagcttgccgagaaaacgcagagggcatcctgtgagcagcaaacacatctgagcctggaaaagacgcagagaagtaaaagatcaaagtctgattggcaccggctcccattccggctccagcctccaatccgacccccatttcggctgcagcctcggacctagctccggccctcggtctatccggttgcatcctccctccctgttccggatcttatcttgcgccagcgcctactccaggatcccgtagccagacctcaagccatggctggtcccttctcccgtctgctgtccgcccgcccgggactcaggctcctggctttggccggagcggggtctctagccgctgggtttctgctccgaccggaacctgtacgagctgccagtgaacgacggaggctgtatcccccgagccagacatggccaactggacagctcccaggtaactgcactaggtctaggcgtctgtgccctccctccatggttactgggtaccccctccccagcgctgagtacccagacctccgaaagcacaacaactgcatggccagtcacctgaccccagcagtctatgcacggctctgcgacaagaccacacccactggttggacgctagatcagtgtatccagactggcgtggacaaccctggccaccccttcatcaagactgtgggcatggtggctggagatgaggagacctatgaggtatttgctgacctgtttgaccctgtgatccaagagcgacacaatggatatgacccccggacaatgaagcacaccacggatctagatgccagtaaaatccgttctggctactttgatgagaggtatgtattgtcctctagagtcagaactggccgaagcatccgaggactcagtctgcctccagcttgcactcgagcagagcgacgagaggtggaacgtgttgtggtggatgcactgagtggcctgaagggtgacctggctggacgttactataggctcagtgagatgacagaggctgaacagcagcagcttattgatgaccactttctgtttgataagcctgtgtccccgttgctgactgcagcaggaatggctcgagactggccagatgctcgtggaatttggcacaacaatgagaagagcttcctgatctgggtgaatgaggaggatcatacacgggtgatctccatggagaagggtggtaacatgaagagagtgtttgaaagattctgccgaggcctcaaagaggtggagagacttatccaagaacgtggctgggagttcatgtggaatgagcgtttgggatacatcttgacctgtccatctaacctgggcactggacttcgggcaggagtgcacatcaaactgcccctgctaagcaaagatagccgcttcccaaagatcctggagaacctaagactccaaaagcgtggtactggaggagtggacactgctgccacaggcggtgtctttgatatttctaatttggaccgactaggcaaatcagaggtggagctggtgcaactggtcatcgatggagtaaactatttgattgattgtgaacggcgtctggagagaggccaggatatccgcatccccacacctgtcatccacaccaagcattaactccccatcgccagctgatgactcaagattccaaggagttctgctcattctaatgatggcccattctacttgctctggacctgccctcgcatcccctgcctccatcctagtaaagactccttgctatgc

SEQ ID NO: 4726 - DNA, 1829 bp, Homo sapiens
gggcccgctgctggtgtgcagggctggtgccttgggtgcagatggcaagcagaaaggggtggataaagaattctttcttctcttcactgtgttggatgagaacaagagctggtacagcaatgccaatcaagcagctgctatgttggatttccgactgctttcagaggatattgagggcttccaagactccaatcggatgcatgccattaatgggtttctgttctctaacctgcccaggctggacatgtgcaagggtgacacagtggcctggcacctgctcggcctgggcacagagactgatgtgcatggagtcatgttccagggcaacactgtgcagcttcagggcatgaggaagggtgcagctatgctctttcctcatacctttgtcatggccatcatgcagcctgacaaccttgggacatttgagatttattgccaggcaggcagccatcgagaagcagggatgagggcaatctataatgtctcccagtgtcctggccaccaagccacccctcgccaacgctaccaagctgcaagaatctactatatcatggcagaagaagtagagtgggactattgccctgaccggagctgggaacgggaatggcacaaccagtctgagaaggacagttatggttacattttcctgagcaacaaggatgggctcctgggttccagatacaagaaagctgtattcagggaatacactgatggtacattcaggatccctcggccaaggactggaccagaagaacacttgggaatcttgggtccacttatcaaaggtgaagttggtgatatcctgactgtggtattcaagaataatgccagccgcccctactctgtgcatgctcatggagtgctagaatctactactgtctggccactggctgctgagcctggtgaggtggtcacttatcagtggaacatcccagagaggtctggccctgggcccaatgactctgcttgtgtttcctggatctattattctgcagtggatcccatcaaggacatgtatagtggcctggtggggcccttggctatctgccaaaagggcatcctggagccccatggaggacggagtgacatggatcgggaatttgcattgttgttcttgatttttgatgaaaataagtcttggtatttggaggaaaacgtggcaacccatgggtcccaggatccaggcagtattaacctacaggatgaaactttcttggagagcaataaaatgcatgcaatcaatgggaaactctatgccaaccttaggggtcttaccatgtaccaaggagaacgagtggcctggtacatgctggccatgggccaagatgtggatctacacaccatccactttcatgcagagagcttcctctatcggaatggcgagaactaccgggcagatgtggtggatctgttcccagggacttttgaggttgtggagatggtggccagcaaccctgggacatggctgatgcactgccatgtgactgaccatgtccatgctggcatggagaccctcttcactgttttttctcgaacagaacacttaagccctctcaccgtcatcaccaaagagactgaaaaagcagtgccccccagagacattgaagaaggcaatgtgaagatgctgggcatgcagatccccataaagaatgttgagatgctggcctctgttttggttgccattagtgtcacccttctgctcgttgttctggctcttggtggagtggtttggtaccaacatcgacagagaaagctacgacgcaataggaggtccatcctggatgacagcttcaagcttctgtctttcaaacagtaacatctggagcctg

SEQ ID NO: 4727 - DNA, 1273 bp, Homo sapiens
ctattactggcctggaaccgggaaccgaatatacaatttatgtcattgccctgaagaataatcagaagagcgagcccctgattggaaggaaaaagacagttcaaaagacccctttcgtcacccaccctgggtatgacactggaaatggtattcagcttcctggcacttctggtcagcaacccagtgttgggcaacaaatgatctttgaggaacatggttttaggcggaccacaccgcccacaacggccacccccataaggcataggccaagaccatacccgccgaatgtaggacaagaagctctctctcagacaaccatctcatgggccccattccaggacacttctgagtacatcatttcatgtcatcctgttggcactgatgaagaacccttacagttcagggttcctggaacttctaccagtgccactctgacaggcctcaccagaggtgccacctacaacatcatagtggaggcactgaaagaccagcagaggcataaggttcgggaagaggttgttaccgtgggcaactctgtcaacgaaggcttgaaccaacctacggatgactcgtgctttgacccctacacagtttcccattatgccgttggagatgagtgggaacgaatgtctgaatcaggctttaaactgttgtgccagtgcttaggctttggaagtggtcatttcagatgtgattcatctagatggtgccatgacaatggtgtgaactacaagattggagagaagtgggaccgtcagggagaaaatggccagatgatgagctgcacatgtcttgggaacggaaaaggagaattcaagtgtgaccctcatgaggcaacgtgttatgatgatgggaagacataccacgtaggagaacagtggcagaaggaatatctcggtgccatttgctcctgcacatgctttggaggccagcggggctggcgctgtgacaactgccgcagacctgggggtgaacccagtcccgaaggcactactggccagtcctacaaccagtattctcagagataccatcagagaacaaacactaatgttaattgcccaattgagtgcttcatgcctttagatgtacaggctgacagagaagattcccgagagtaaatcatctttccaatccagaggaacaagcatgtctctctgccaagatccatctaaactggagtgatgttagcagacccagcttagagttcttctttctttcttaagccctttgctctggaggaagttctccagcttcagctcaactcacagcttct

SEQ ID NO: 4728 - DNA, 1757 bp, Homo sapiens
tctacatgggctgggcagccccaaactgaaatgtgagtgccagagtgcatcctttaagcgaggtctgccccacggacacccgctccctctgcgtccctgctttgacagatctatccatctggccatccatccgtgggggtctgcaatggccacctttagccgccaggaatttttccagcagctactgcaaggctgtctcctgcctactgcccagcagggccttgaccagatctggctgctccttgccatctgcctcgcctgccgcctcctctggaggctcgctgcacatggtttgggtcgtgctgctcagcctcctgtgctacctcgtgctgttcctctgccgacattcctcccatcgaggcgtcttcctatccgtcaccatcctcatctacctactcatgggtgagatgcacatggtagacaccgtgacatggcacaagatgcgaggggcacagatgattgtggccatgaaggcagtgtctctgggcttcgacctggaccggggcgaggtgggtacggtgccctcgccagtggagttcatgggctacctctacttcgtgggcaccatcgtcttcgggccctggatatccttccacagctacctacaagctgtccaaggccgcccactgagctgccggtggctgcagaaggtggcccggagcctggcactggccctgctgtgccttgtgctgtccacttgcgtgggcccctacctcttcccgtacttcatccccctcaacggtgaccgcctccttcgcaagtggctgcgagcctacgagagtgctgtctccttccacttcagcaactattttgtgggctttctttccgaggccacggccacgttggcgggggctggctttaccgaggagaaggatcacctggaatgggacctgacggtgtccaagccactgaatgtggagctgcctcggtcaatggtggaagttgtcacaagctggaacctgcccatgtcttattggctaaataactatgttttcaagaatgctctccgcctggggaccttctcggctgtgctggtcacctatgcagccagcgccctcctacatggcttcagtttccacctggctgcggtcctgctgtccctggcttttatcacttacgtggagcatgtcctccggaagcgcctggctcggatcctcagtgcctgtgtcttgtcaaagcggtgcccgccagactgttcgcaccagcatcgcttgggcctgggggtgcgagccttaaacttgctctttggagctctggccatcttccacctggcctacctgggctccctgtttgatgtcgatgtggatgacaccacagaggagcagggctacggcatggcatacactgtccacaagtggtcagagctcagctgggccagtcactgggtcacttttggatgctggatcttctaccgtctcataggctgaggcacatctgtggaccctcataaccctcttaagacccctctcagggtgccactgatgggggatgagggaaggccctctctctactccttgaccccctccatccttgacccccaacacctcaacacacacacacacacacacacacaaaatcacaccattttcatgcctgtcaatccccaccccaccacaaggcaggaagggggtggtgcctgctggggcctagagggggatgcttggggaaacagagaaggggagatccagggcctccccgccttccttcttcctttttatatacaatttgttattgtcaaataaaagtaggaaatattc

SEQ ID NO: 4729 - DNA, 2413 bp, Homo sapiens; identical to SEQ ID NO: 221

SEQ ID NO: 4730 - DNA, 938 bp, Homo sapiens; identical to SEQ ID NO: 584

SEQ ID NO: 4731 - DNA, 1241 bp, Homo sapiens
gcggagctaagatgcggaggagggtgacgcactagctctccagttcgcccgttcctggcctgacccccaccaaggcccataccgcagtaggctcctcgggctgcccctcggttgacaatggtctccaggatggtctctaccatgctatctggcctactgttttggctggcatctggatggactccagcatttgcttacagcccccggacccctgaccgggtctcagaagcagatatccagaggctgcttcatggtgttatggagcaattgggcattgccaggccccgagtggaatatccagctcaccaggccatgaatcttgtgggcccccagagcattgaaggtggagctcatgaaggacttcagcatttgggtccttttggcaacatccccaacatcgtggcagagttgactggagacaacattcctaaggactttagtgaggatcaggggtacccagaccctccaaatccctgtcctgttggaaaaacagatgatggatgtctagaaaacacccctgacactgcagagttcagtcgagagttccagttgcaccagcatctctttgatccggaacatgactatccaggcttgggcaagtggaacaagaaactcctttacgagaagatgaagggaggagagagacgaaagcggaggagtgtcaatccatatctacaaggacagagactggataatgttgttgcaaagaagtctgtcccccatttttcagatgaggataaggatccagagtaaagagaagatgctagacgaaaacccacattacctgttaggcctcagcatggcttatgtgcacgtgtaaatggagtccctgtgaatgacagcatgtttcttacatagataattatggatacaaagcagctgtatgtagatagtgtattgtcttcacaccgatgattctgctttttgctaaattagaataagagcttttttgtttcttgggtttttaaaatgtgaatctgcaatgatcataaaaattaaaatgtgaatgtcaacaataaaaagcaagactatgaaaggctcagatttcttgcagtttaaaatggtgtctgaggttgtactattttggccaagtctgtagaaagctgtcatttgattttgattatgtagttcatccagcccttgggcattgttatacaccagtaaagaaggctgtactcaagaggaggagctgacacatttcacttggctgcgtcttaataaacatgaatgcaagcattggc

SEQ ID NO: 4732 - DNA, 1244 bp, Homo sapiens; identical to SEQ ID NO: 2542

SEQ ID NO: 4733 - DNA, 2399 bp, Homo sapiens; identical to SEQ ID NO: 582

SEQ ID NO: 4734 - DNA, 2467 bp, Homo sapiens
gaagatgcacacgacccagaaggacacgacgtacaccaagatcttcgtcggggggctgccctaccacaccaccgacgccagcctgcgcaagtacttcgaggtcttcggcgagatcgaggaggcggtggtcatcaccgaccggcagacgggcaagtcccggggctatggatttgtcaccatggctgaccgggctgctgccgaaagggcctgcaaggatcccaatcccatcattgatggcagaaaggccaacgtgaacctggcatacttaggagcaaaaccaaggatcatgcaaccaggttttgcctttggtgttcaacaacttcatccagcccttatacaaagacctttcgggatacctgcccactatgtctatccgcaggcttttgtgcagccgggagtggtcattccacacgtccagccgacagcagctgccgcctccaccaccccttacattgattacactggagctgcatacgcacaatactcagcagctgctgctgctgccgccgccgctgctgcctatgaccagtacccctatgcagcctctccagctgctgcaggatatgttactgctgggggctatggctacgcagtccagcagccaatcaccgcagcggcacctgggacagctgccgccgccgctgcagcagctgctgccgctgcagcatttggccagtaccagcctcagcagctgcagacagaccgaatgcaatagaccagccatctgatcaaagttgaattgttttctctttccctcccaattttccaatttttagtagctaataagagagttaacattgacttaacagctttaaaaaaaaaaacagccatgctattgtgaagcagagttattattttttttatactccaggtagtgttctagatgagaaagaggtaagaatgaggggaatgggcacaattttggaaatcaatcccaaagagcctgagtaaatgaaaggccactacgaaatgacgccaggagtaacaacggaacttcacttttgtaacgggatttttatttttgctctttttatagtatcagggaagcaaactgccttttacaagttagaaaatgctgtttgaatctagttgaaccagggaatacagagcgagcaatatgtagcttgaattacatttaaaagcagattttttacaaacaaaatggcgaaagcactgattgtcatttttagcagtcacttaaggcctatagaacttttttcaagtcggaaggtcctgttcttactatctcaaaaatgggcatcgaacaatcaatctaggagcgtggcagtgggtaaaatggtggacaggcaccaaagctattttctcatctgtcctgtggatgagtggaactgtggaacaagtgatgtggaattaatgggtgcaacagctgtacagacaatcaataacacacacagttctggaaagaacacatcacttgtgcttgtttgatgagcttgtcacattctaatccctctccccatcctgtttcaattttgggaaacttgtatctgctggtgtcagcaattctgattctgaaataggatcaggcttttactacaacagccttctctttctatttattgtgtcgactcgtggcttatgaataaaggcaggcaaagtttgcagaactgtcttaaggacatttattttttttccctttttaagtaattttacactttagtatctatttcagagtcatatttaaaactatttattagtgactacagtacatgagacaacaaggttactgagattacaattcttcaaaggttaatgataatgtggtttatactgtgccttaatagtaatgctatttaagatatttatttttaagttttactatgctgcactctaaagaaaggaactttagatgtgacactgtaaaattatgtattcatctcatggcataaattatttagtaagtctagatgtagcgtattaaatattaacctattcaactaaagatgttgacttggatttatttaaattcatatgtgcactgtataagagagtactcttacattaacacattttagtttagtttttagatttttttttaaacgatatattgctagtttcatgcttcctcctctgattttgcctgtgtagatttcatttattggtaattcattagtttaacactattatgtagtttttaaatgctgctttacatttttcttctgaaactgcaatacttgcaatttttattcttaaactaaattgaatactattttacactgtattggatttttatacttgaacaatttcatacaagggaagacaggttagcatttttatggactttctccattatcactggatttactttaagtattcccatactagacagtgttatgtaatgtagacatgactctcctgtgcaaattatttattcgttgtgtatattgctttataacatttcagatcttctaatctattcacttgtattaaatataatttttaaaaa

SEQ ID NO: 4735 - DNA, 2451 bp, Homo sapiens
acaattgcattcccgggctggatgccggttgttaagcgcgctgttgctttgtaaaaatgcgtgtgttctggtgttttggctggggcagggaggggacaccccacgaggtctggggctgttgcccttgtgtcatccccccgccttttaactgcaaaggtcaccatggctgaccgggctgctgccgaaagggcctgcaaggatcccaatcccatcattgatggcagaaaggccaacgtgaacctggcatacttaggagcaaaaccaaggatcatgcaaccaggttttgcctttggtgttcaacaacttcatccagcccttatacaaagacctttcgggatacctgcccactatgtctatccgcaggcttttgtgcagccgggagtggtcattccacacgtccagccgacagcagctgccgcctccaccaccccttacattgattacactggagctgcatacgcacaatactcagcagctgctgctgctgccgccgccgctgctgcctatgaccagtacccctatgcagcctctccagctgctgcaggatatgttactgctgggggctatggctacgcagtccagcagccaatcaccgcagcggcacctgggacagctgccgccgccgctgcagcagctgctgccgctgcagcatttggccagtaccagcctcagcagctgcagacagaccgaatgcaatagaccagccatctgatcaaagttgaattgttttctctttccctcccaattttccaatttttagtagctaataagagagttaacattgacttaacagctttaaaaaaaaaaacagccatgctattgtgaagcagagttattattttttttatactccaggtagtgttctagatgagaaagaggtaagaatgaggggaatgggcacaattttggaaatcaatcccaaagagcctgagtaaatgaaaggccactacgaaatgacgccaggagtaacaacggaacttcacttttgtaacgggatttttatttttgctctttttatagtatcagggaagcaaactgccttttacaagttagaaaatgctgtttgaatctagttgaaccagggaatacagagcgagcaatatgtagcttgaattacatttaaaagcagattttttacaaacaaaatggcgaaagcactgattgtcatttttagcagtcacttaaggcctatagaacttttttcaagtcggaaggtcctgttcttactatctcaaaaatgggcatcgaacaatcaatctaggagcgtggcagtgggtaaaatggtggacaggcaccaaagctattttctcatctgtcctgtggatgagtggaactgtggaacaagtgatgtggaattaatgggtgcaacagctgtacagacaatcaataacacacacagttctggaaagaacacatcacttgtgcttgtttgatgagcttgtcacattctaatccctctccccatcctgtttcaattttgggaaacttgtatctgctggtgtcagcaattctgattctgaaataggatcaggcttttactacaacagccttctctttctatttattgtgtcgactcgtggcttatgaataaaggcaggcaaagtttgcagaactgtcttaaggacatttattttttttccctttttaagtaattttacactttagtatctatttcagagtcatatttaaaactatttattagtgactacagtacatgagacaacaaggttactgagattacaattcttcaaaggttaatgataatgtggtttatactgtgccttaatagtaatgctatttaagatatttatttttaagttttactatgctgcactctaaagaaaggaactttagatgtgacactgtaaaattatgtattcatctcatggcataaattatttagtaagtctagatgtagcgtattaaatattaacctattcaactaaagatgttgacttggatttatttaaattcatatgtgcactgtataagagagtactcttacattaacacattttagtttagtttttagatttttttttaaacgatatattgctagtttcatgcttcctcctctgattttgcctgtgtagatttcatttattggtaattcattagtttaacactattatgtagtttttaaatgctgctttacatttttcttctgaaactgcaatacttgcaatttttattcttaaactaaattgaatactattttacactgtattggatttttatacttgaacaatttcatacaagggaagacaggttagcatttttatggactttctccattatcactggatttactttaagtattcccatactagacagtgttatgtaatgtagacatgactctcctgtgcaaattatttattcgttgtgtatattgctttataacatttcagatcttctaatctattcacttgtattaaatataatttttaaaaa

SEQ ID NO: 4736 - DNA, 2006 bp, Homo sapiens
attaacgagtgacagtcttaatgactaacacacctctaacatttcacctctagctcagatgagagagagaatgggacttcttggtactgattgtttttcccatgcctcaattggtttcttttagggagctacaaatttacgtgttcactggtgattgatcttttcatccagcacaatggacagaagtctaaggaacgtccttgtggtttcctttgggttcctgcttctctttacagcctatggaggtctgcagagcctgcagagcagcctgtacagcgaggagggcctgggtgtcacagcgctcagcaccctctatggaggcatgctcctgtcctccatgttcctcccaccgctcctcatcgagaggctgggctgcaaggggaccatcatcctctccatgtgtggctacgtggccttctccgtgggcaacttcttcgccagctggtacactttgatccccacctccatactgctgggactcggggccgccccgctgtggtctgcacagtgcacatacctcacgatcacgggaaacacacatgcagagaaggcgggaaagcgtggcaaagacatggtgaaccagtattttggcatcttcttcctcatattccagtcatccggtgtgtggggcaacttgatctcatcgctggtatttggccagactcccagccaagggagtggtgtcctggctgtcctgatgatagctgcgttcctccaacccatacgagatgttcagcgggaaagtgaaggagagaagaaatcagtacctttctggtccactttactgtcgactttcaagctatatagagataaacgtctgtgcctcttaattctgctgccgctgtacagtggattgcagcaaggattcctctccagcgaatacacaaggtcctatgtcacctgcaccctgggcatccagttcgtcggctacgtgatgatctgcttctcggccactgacgcgctgtgctccgtgttgtatggaaaggtctcgcagtacacgggcagggctgtgctgtacgtgctgggcgcggtgacccacgtgtcctgcatgattgccctactgctgtggagacctcgtgctgaccatctggcagtgttcttcgtattctctggcctgtggggcgtggcagatgccgtctggcagacacaaaacaatgctctctacggcgttctgtttgagaagagcaaggaagctgccttcgccaattaccgcctgtgggaggccctgggcttcgtcattgccttcgggtacagcatgtttttgtgcgtgcacgtcaagctctacattctgctgggggtcctgagcctgaccatggtggcgtatgggcttgtggagtgcgtggagtccaagaacccgatcagaccccacgctccaggacaggtcaaccaggcagaggatgaagaaatacaaacaaaaatgtgagagcagtgaggtccgaggaggatgaactcagaaagcaccagccagagaattttcttagaagatgcctcaggacatagagcggctcctcatcaccatctcagcacaatttggccattctgaagagatcatgttatttcactcttcatgtattttttttctattctaacaaatttttcgtccaccatcttaacagagatcaagtgtatacatgaaggtatcagttcatttaattttagatgcaaaagaaaaaggtctaacgtacaatcagccaattagaatttgcctgaaatcatagactcaccctagttttattgctgtagttgtttttaagaattggaagcctgcttaaaaaatgtagttgagccccataattttacaaatgggcgaacttttaaacttctaactctacttggatcaaaacctcatacattttacaaaggggtcctgacaagtcagctgactcaacctcacagagtcagggggtgacaaagccagactggggctcaggattcctgaaacgtgtggggtctgcgtttctaaataaagacggttatttaatggaaaaaaaaaaaaaaaaaaaaaa

SEQ ID NO: 4737 - DNA, 5140 bp, Homo sapiens; identical to SEQ ID NO: 699

SEQ ID NO: 4738 - DNA, 2132 bp, Homo sapiens; identical to SEQ ID NO: 1898

SEQ ID NO: 4739 - DNA, 1756 bp, Homo sapiens; identical to SEQ ID NO: 791

SEQ ID NO: 4740 - DNA, 2632 bp, Homo sapiens; identical to SEQ ID NO: 663

SEQ ID NO: 4741 - DNA, 2014 bp, Homo sapiens
aaaaaccaggaagttaaaagtggatgcagaagcgagcacagacggggctaggggtttcagagaaagtaattgagagtgctggcaacagcagctgaaatatagagaagttgtaggattaactttttcgcccaaagcagcttcagcccacgttttattcccatcgagggagggagaatgggtgccgctgagtgggcgggggagtggtccctgaaaggaggtggagtgctacagcccctccccgttggctctcgctgtttgtccgttgttggtttatactaatttgacaacagccgcctgttgagtctcctccagatcgcagctgaaggatctgttgagcgcttcaggaaaggcggtgagatccggacaggcgacactaacaggtgaagatctcgggagaccatgactaagaaaagaattgctgtgattgggggaggagtgagcgggctctcttccatcaagtgctgcgtagaagaaggcttggaacctgtctgctttgaaaggactgatgacatcggagggctctggaggttccaggaaaatcctgaagaaggaagggccagtatttacaaatcagtgatcatcaatacttctaaagagatgatgtgcttcagtgactatccaatcccagatcattatcccaacttcatgcataatgcccaggtcctggagtatttcaggatgtatgccaaagaatttgaccttctaaagtatattcgatttaagaccactgtgtgcagtgtgaagaagcagcctgattttgccacttcaggccaatgggaagtggtcactgaatctgaagggaaaaaggagatgaatgtctttgatggagtcatggtttgcactggccatcacaccaatgctcatctacctctggaaagcttccctggaattgagaagttcaaagggcagtacttccacagtcgagactataagaacccagagggattcactggaaagagagtcattataattggcattgggaattctggaggggatctggctgtagagattagccaaacagccaagcaggttttcctcagcaccaggagaggggcttggatcctgaatcgtgtaggggactacggatatcctgctgatgtgttgttctcttctcgacttacacattttatatggaagatctgtggccaatcattagcaaacaaatatttggaaaaaaagataaaccaaaggtttgaccatgaaatgtttggcctgaagcctaaacacagagctctgagtcagcatccaaccttaaatgatgacctgccaaatcgtatcatttctggcttggtgaaagtgaaaggaaatgtgaaggaattcacggagacagctgccatatttgaggatggctccagggaggatgacattgatgctgttatctttgccacaggctatagctttgactttccgtttctggaagattccgtcaaagtggtcaaaaacaagatatccctgtataaaaaggtcttccctcctaacctggaaaggccaactcttgcaatcataggcttgattcagcccttaggagccattatgcccatttcagagctccaaggacgctgggccactcaggtatttaaaggtctaaagacattgccctcacagagtgaaatgatggcagaaatatctaaagctcaagaggaaattgacaaaagtctaaccatgagaaaaacatcagacaaacccaagttgaagaatattctacaaatacctgactacctcaaaactgtcaagatcatcaacaaagaaagtctgagaaattgtcccggaataaaggggcctaaggagacataacatctaaatgtaatgtagtatcctggatggactcctgcaacagaaaaagaactttaagtaaaaattaagggaatattaataaagtatgcattttggttaataatgtatcaatattggtttattagttgtgacaaatgtaccagaggaatgtaaaatgtcaacaataaaggaaattggatgtggggtaaaaaaaaaaaaaaaaaaaaaaaaaaaaaaaaaa

SEQ ID NO: 4742 - DNA, 2499 bp, Homo sapiens
aaaaaccaggaagttaaaagtggatgcagaagcgagcacagacggggctaggggtttcagagaaagtaattgagagtgctggcaacagcagctgaaatatagagaagttgtaggattaactttttcgcccaaagcagcttcagcccacgttttattcccatcgagggagggagaatgggtgccgctgagtgggcgggggagtggtccctgaaaggaggtggagtgctacagcccctccccgttggctctcgctgtttgtccgttgttggtttatactaatttgacaacagccgcctgttgagtctcctccagatcgcagctgaaggatctgttgagcgcttcaggaaaggcggtgagatccggtaccgcagcagagcactctcagctctgggtcttgcaggcgcagggctcccccatgccagcagaaagatttcctctggtgaagaggaccgtcgaatctgtcctcctcaagacacctcttgtacagaatttattcgaatgccacggccaaggtcttccttgaaaaatgttaaccgatgtgtgctttttgtcttttgtcatcctttctttaggacaggcgacactaacaggtgaagatctcgggagaccatgactaagaaaagaattgctgtgattgggggaggagtgagcgggctctcttccatcaagtgctgcgtagaagaaggcttggaacctgtctgctttgaaaggactgatgacatcggagggctctggaggttccaggaaaatcctgaagaaggaagggccagtatttacaaatcagtgatcatcaatacttctaaagagatgatgtgcttcagtgactatccaatcccagatcattatcccaacttcatgcataatgcccaggtcctggagtatttcaggatgtatgccaaagaatttgaccttctaaagtatattcgatttaagaccactgtgtgcagtgtgaagaagcagcctgattttgccacttcaggccaatgggaagtggtcactgaatctgaagggaaaaaggagatgaatgtctttgatggagtcatggtttgcactggccatcacaccaatgctcatctacctctggaaagcttccctggaattgagaagttcaaagggcagtacttccacagtcgagactataagaacccagagggattcactggaaagagagtcattataattggcattgggaattctggaggggatctggctgtagagattagccaaacagccaagcaggttttcctcagcaccaggagaggggcttggatcctgaatcgtgtaggggactacggatatcctgctgatgtgttgttctcttctcgacttacacattttatatggaagatctgtggccaatcattagcaaacaaatatttggaaaaaaagataaaccaaaggtttgaccatgaaatgtttggcctgaagcctaaacacaggtctaaagacattgccctcacagagtgaaatgatggcagaaatatctaaagctcaagaggaaattgacaaaaggtatgtggagagccaacgccataccattcagggagactacatagataccatggaagagcttgctgatttggtgggggtcaggcccaatctgctgtctctggccttcactgaccccaagctggcattacacttattactgggaccctgcactccaatccactatcgtgtacagggccctggaaagtgggatggggctcgaaaagctatcctcaccacagatgatcgcatcaggaagcctctgatgacaagagtagttgaaaggagtagttctatgacttcaacaatgacaataggcaagtttatgctagctcttgccttctttgctataattatagcttacttctagttgtcctattgtcactgccctgtttttcattgggaagcttatctacagatgccttcagaatctgacgagattgactctcagtttcatattgcccagaaatctactttaatgtctctttcgaaagcattaattcactttcctttttcctacaatgaaacctgttttccatttgtattaactcatctcccttccactcatgatccgtcactcttccttgtggtaatccctagactgggagctcaggtactcttttagtcatctttgtatgtctttagcagagttcttgacatgtggtaggtgcttaataaatgtttgttgtttatcaaattttatggtagggagagtaagtcagcatcggtataaaatcgcttactccacgtaactcttcttctgatagggtttgattttctattagaagctcaattttagttttttttcatattataactaaatatgtttcctgagagataagagaaataatgttcctacaatagttgtatgtatctaagataagacatatagatgcttaagacattttgtttcacttgctattcactagtgtacttgaaacatggtcatttttagcccttttccttaggaaccatgtctttattttctcaataaagaaattactttcaact

SEQ ID NO: 4743 - DNA, 2993 bp, Homo sapiens; identical to SEQ ID NO: 818

SEQ ID NO: 4744 - DNA, 955 bp, Homo sapiens; identical to SEQ ID NO: 1996

SEQ ID NO: 4745 - DNA, 2529 bp, Homo sapiens; identical to SEQ ID NO: 1469

SEQ ID NO: 4746 - DNA, 4915 bp, Homo sapiens; identical to SEQ ID NO: 1467

SEQ ID NO: 4747 - DNA, 2086 bp, Homo sapiens; identical to SEQ ID NO: 1473

SEQ ID NO: 4748 - DNA, 10796 bp, Homo sapiens; identical to SEQ ID NO: 812

SEQ ID NO: 4749 - DNA, 2707 bp, Homo sapiens; identical to SEQ ID NO: 1438

SEQ ID NO: 4750 - DNA, 2492 bp, Homo sapiens; identical to SEQ ID NO: 679

SEQ ID NO: 4751 - DNA, 540 bp, Homo sapiens
atggtcagcgtgaacgcgcccctcggggctccagtggagagttcttacggtctgcagtttccatggagaccgcctcccaccatccctgaaatctcattgtgaccagtattaagggattaactctgcccagcggccctcgcagggtctggggtgctgagaggggccagcaggagctccctcaaggatgaagaggttgtgcactgtgcgggaccccatagcagcaggaggaggatgtcggactggggccagggcttcccccaggacccaccagacacgtccccatcagaaggcaccaacctcaacgcgcccaacagcctgggtgtcagcgccctgtgtgccatctgcggggaccgggccacgggcaaacactacggtgcctcgagctgtgacggctgcaagggcttcttccggaggagcgtgcggaagaaccacatgtactcctgcagatttagccggcagtgcgtggtggacaaagacaagaggaaccagtgccgctactgcaggctcaagaaatgcttccgggctggcatgaagaaggaa

SEQ ID NO: 4752 - DNA, 2395 bp, Homo sapiens; identical to SEQ ID NO: 1744

SEQ ID NO: 4753 - DNA, 2680 bp, Homo sapiens
atatagagcaggcgccgcgggtcgcagcacagtgcggagaccgcagccccggagcccgggccagggtccacctgtccccgcagcgccggctcgcgccctcctgccgcagccaccgagccgccgtctagcgccccgacctcgccaccatgagagccctgctggcgcgcctgcttctctgcgtcctggtcgtgagcgactccaaagtgagtgcgctcttgctttgactgatgctgcccaaggacctctgatcagcaccaggggagaggaggggctgctcagggagctggggtcctccggattccatccacagcagggccagactctccccaggaaatgggacagggtggcagcggaggcttgagaaccacgggggttggcactggctggcaagggaggaagaggccgccgggactgccccagcctgcgggcatctggtagatgaagcttgcttgggtcaatccatttctcctggctggaaacccatggtcttccatttgagaactagatacgaacaggcgaactgtgactgtctaaatggaggaacatgtgtgtccaacaagtacttctccaacattcactggtgcaactgcccaaagaaattcggagggcagcactgtgaaatagataagtcaaaaacctgctatgaggggaatggtcacttttaccgaggaaaggccagcactgacaccatgggccggccctgcctgccctggaactctgccactgtccttcagcaaacgtaccatgcccacagatctgatgctcttcagctgggcctggggaaacataattactgcaggaacccagacaaccggaggcgaccctggtgctatgtgcaggtgggcctaaagccgcttgtccaagagtgcatggtgcatgactgcgcagatggaaaaaagccctcctctcctccagaagaattaaaatttcagtgtggccaaaagactctgaggccccgctttaagattattgggggagaattcaccaccatcgagaaccagccctggtttgcggccatctacaggaggcaccgggggggctctgtcacctacgtgtgtggaggcagcctcatcagcccttgctgggtgatcagcgccacacactgcttcattgattacccaaagaaggaggactacatcgtctacctgggtcgctcaaggcttaactccaacacgcaaggggagatgaagtttgaggtggaaaacctcatcctacacaaggactacagcgctgacacgcttgctcaccacaacgacattgccttgctgaagatccgttccaaggagggcaggtgtgcgcagccatcccggactatacagaccatctgcctgccctcgatgtataacgatccccagtttggcacaagctgtgagatcactggctttggaaaagagaattctaccgactatctctatccggagcagctgaaaatgactgttgtgaagctgatttcccaccgggagtgtcagcagccccactactacggctctgaagtcaccaccaaaatgctgtgtgctgctgacccacagtggaaaacagattcctgccagggagactcagggggacccctcgtctgttccctccaaggccgcatgactttgactggaattgtgagctggggccgtggatgtgccctgaaggacaagccaggcgtctacacgagagtctcacacttcttaccctggatccgcagtcacaccaaggaagagaatggcctggccctctgagggtccccagggaggaaacgggcaccacccgctttcttgctggttgtcatttttgcagtagagtcatctccatcagctgtaagaagagactgggaagataggctctgcacagatggatttgcctgtgccacccaccagggcgaacgacaatagctttaccctcaggcataggcctgggtgctggctgcccagacccctctggccaggatggaggggtggtcctgactcaacatgttactgaccagcaacttgtctttttctggactgaagcctgcaggagttaaaaagggcagggcatctcctgtgcatgggtgaagggagagccagctcccccgacggtgggcatttgtgaggcccatggttgagaaatgaataatttcccaattaggaagtgtaacagctgaggtctcttgagggagcttagccaatgtgggagcagcggtttggggagcagagacactaacgacttcagggcagggctctgatattccatgaatgtatcaggaaatatatatgtgtgtgtatgtttgcacacttgtgtgtgggctgtgagtgtaagtgtgagtaagagctggtgtctgattgttaagtctaaatatttccttaaactgtgtggactgtgatgccacacagagtggtctttctggagaggttataggtcactcctggggcctcttgggtcccccacgtgacagtgcctgggaatgtattattctgcagcatgacctgtgaccagcactgtctcagtttcactttcacatagatgtccctttcttggccagttatcccttccttttagcctagttcatccaatcctcactgggtggggtgaggaccactcctgtacactgaatatttatatttcactatttttatttatatttttgtaattttaaataaaagtgatcaataaaatgtgatttttctgatgacaaaaaaaaaaaaaaaaaaaa

SEQ ID NO: 4754 - DNA, 2714 bp, Homo sapiens; identical to SEQ ID NO: 664

SEQ ID NO: 4755 - DNA, 4105 bp, Homo sapiens; identical to SEQ ID NO: 690

SEQ ID NO: 4756 - DNA, 2627 bp, Homo sapiens; identical to SEQ ID NO: 2443

SEQ ID NO: 4757 - DNA, 1342 bp, Homo sapiens
atcagcccaccaggagacctcgcccgccgctcccccgggctccccggccatgtctcccgcccggctccggccccgactgcacttctgcctggtcctgttgctgctgctggtggtgccggcggcatggggctgcgggccgggtcgggtggtgggcagccgccggcgaccgccacgcaaactcgtgccgctcgcctacaagcagttcagccccaatgtgcccgagaagaccctgggcgccagcggacgctatgaaggcaagatcgctcgcagctccgagcgcttcaaggagctcacccccaattacaatccagacatcatcttcaaggacgaggagaacacaggcgccgaccgcctcatgacccagcgctgcaaggaccgcctgaactcgctggctatctcggtgatgaaccagtggcccggtgtgaagctgcgggtgaccgagggctgggacgaggacggccaccactcagaggagtccctgcattatgagggccgcgcggtggacatcaccacatcagaccgcgaccgcaataagtatggactgctggcgcgcttggcagtggaggccggctttgactgggtgtattacgagtcaaaggcccacgtgcattgctccgtcaagtccgagcactcggccgcagccaagacgggcggctgcttccctgccggagcccaggtacgcctggagagtggggcgcgtgtggccttgtcagccgtgaggccgggagaccgtgtgctggccatgggggaggatgggagccccaccttcagcgatgtgctcattttcctggaccgcgagccccacaggctgagagccttccaggtcatcgagactcaggaccccccacgccgcctggcactcacacccgctcacctgctctttacggctgacaatcacacggagccggcagcccgcttccgggccacatttgccagccacgtgcagcctggccagtacgtgctggtggctggggtgccaggcctgcagcctgcccgcgtggcagctgtctctacacacgtggccctcggggcctacgccccgctcacaaagcatgggacactggtggtggaggatgtggtggcatcctgcttcgcggccgtggctgaccaccacctggctcagttggccttctggcccctgagactctttcacagcttggcatggggcagctggaccccgggggagggtgtgcattggtacccccagctgctctaccgcctggggcgtctcctgctagaagagggcagcttccacccactgggcatgtccggggcagggagctgaaaggactccaccgctgccctcctggaactgctgtactgggtccagaagcctctcagc

SEQ ID NO: 4758 - DNA, 1583 bp, Homo sapiens
gaggaggaggaggaggaggctactggtggtgatggtgcccgtccccctctccgcaggtctgtgacaagcagggaacaaggcaacggacggcgcagcccagccccggctgacggacgctggcgactcagacatggacagtagctgccacaacgcgactaccaaaatgttagcgactgctccagctcggggcaacatgatgagcacgtccaaacccttggctttctccattgaacgaatcatggcgcgcaccccagagcccaaggccctgccagtcccccacttcctgcagggagccttacccaagggggaacccaagcactctctgcatctcaactcgtcgatcccctgcatgatccccttcgtgcctgtggcctacgacacgagccccaaggcaggagtgacgggctccgagccgcggaaggccagtctggaggccccggcggcgcccgcggcggtgccctcggctcccgcattcagctgcagcgacctgctcaactgcgcactgagtctcaagggcgacctggcccgcgacgcgctgccgctgcagcagtacaagctggtaaggccgcgtgtggtcaaccactcttcattccacgccatgggcgccttgtgctacctgaaccgaggtgacggcccatgccacccggcagccggcgtgaacatccacccggtggcctcctacttcctcagttcccctttgcacccgcagccaaaaacgtatttagccgaaaggaataaactggtggtcccggcggtggagaaatacccttctggagtagctttcaaagacctgtcccaggctcagctgcagcattacatgaaagaaagcgcccagcttctgtcggaaaaaatcgcgttcaaaacctcggatttcagccgaggctctcctaatgccaagcccaaagttttcacttgcgaagtgtgtggaaaggtctttaatgcgcactataacttaacccgtcacatgccagtgcacacaggagccagacccttcgtttgcaaagtgtgcggaaaaggtttcaggcaagcaagcaccctgtgcaggcacaagatcattcacacgcaggaaaaacctcacaaatgtaaccagtgtggcaaagcatttaatagaagttccactttaaacactcatacccgaatacacgcgggctacaaaccgtttgtgtgtgaattctgtggcaaagggtttcatcaaaaagggaattacaaaaaccacaagttgacccacagcggggagaagcagttcaagtgcaatatctgcaacaaggctttccaccaggtttacaacctcaccttccacatgcacacccacaacgacaagaagcctttcacctgccccacgtgcggcaagggtttctgcaggaactttgacctcaagaagcatgtccgcaagctgcacgacagcagcctggggctggcccgcacgccagctggcgaaccaggcactgaaccgccgcccccgctaccgcagcagccgccgatgacgctgcctcctctgcagccgccgctgccaaccccggggcccctgcagcccgggctccaccagggccaccagtgatcgaggctaagggtcctcccagcct

SEQ ID NO: 4759 - DNA, 4952 bp, Homo sapiens
agttcagggctcctgtcgctctccaggagcaacctctactccggacgcacaggcattccccgcgcccctccagccctcgccgccctcgccaccgctcccggccgccgcgctccggtacacacaggatccctgctgggcaccaacagctccaccatggggctggcctggggactaggcgtcctgttcctgatgcatgtgtgtggcaccaaccgcattccagagtctggcggagacaacagcgtgtttgacatctttgaactcaccggggccgcccgcaaggggtctgggcgccgactggtgaagggccccgacccttccagcccagctttccgcatcgaggatgccaacctgatcccccctgtgcctgatgacaagttccaagacctggtggatgctgtgcgggcagaaaagggtttcctccttctggcatccctgaggcagatgaagaagacccggggcacgctgctggccctggagcggaaagaccactctggccaggtcttcagcgtggtgtccaatggcaaggcgggcaccctggacctcagcctgaccgtccaaggaaagcagcacgtggtgtctgtggaagaagctctcctggcaaccggccagtggaagagcatcaccctgtttgtgcaggaagacagggcccagctgtacatcgactgtgaaaagatggagaatgctgagttggacgtccccatccaaagcgtcttcaccagagacctggccagcatcgccagactccgcatcgcaaaggggggcgtcaatgacaatttccagggggtgctgcagaatgtgaggtttgtctttggaaccacaccagaagacatcctcaggaacaaaggctgctccagctctaccagtgtcctcctcacccttgacaacaacgtggtgaatggttccagccctgccatccgcactaactacattggccacaagacaaaggacttgcaagccatctgcggcatctcctgtgatgagctgtccagcatggtcctggaactcaggggcctgcgcaccattgtgaccacgctgcaggacagcatccgcaaagtgactgaagagaacaaagagttggccaatgagctgaggcggcctcccctatgctatcacaacggagttcagtacagaaataacgaggaatggactgttgatagctgcactgagtgtcactgtcagaactcagttaccatctgcaaaaaggtgtcctgccccatcatgccctgctccaatgccacagttcctgatggagaatgctgtcctcgctgttggcccagcgactctgcggacgatggctggtctccatggtccgagtggacctcctgttctacgagctgtggcaatggaattcagcagcgcggccgctcctgcgatagcctcaacaaccgatgtgagggctcctcggtccagacacggacctgccacattcaggagtgtgacaagagatttaaacaggatggtggctggagccactggtccccgtggtcatcttgttctgtgacatgtggtgatggtgtgatcacaaggatccggctctgcaactctcccagcccccagatgaacgggaaaccctgtgaaggcgaagcgcgggagaccaaagcctgcaagaaagacgcctgccccatcaatggaggctggggtccttggtcaccatgggacatctgttctgtcacctgtggaggaggggtacagaaacgtagtcgtctctgcaacaaccccacaccccagtttggaggcaaggactgcgttggtgatgtaacagaaaaccagatctgcaacaagcaggactgtccaattgatggatgcctgtccaatccctgctttgccggcgtgaagtgtactagctaccctgatggcagctggaaatgtggtgcttgtccccctggttacagtggaaatggcatccagtgcacagatgttgatgagtgcaaagaagtgcctgatgcctgcttcaaccacaatggagagcaccggtgtgagaacacggaccccggctacaactgcctgccctgccccccacgcttcaccggctcacagcccttcggccagggtgtcgaacatgccacggccaacaaacaggtgtgcaagccccgtaacccctgcacggatgggacccacgactgcaacaagaacgccaagtgcaactacctgggccactatagcgaccccatgtaccgctgcgagtgcaagcctggctacgctggcaatggcatcatctgcggggaggacacagacctggatggctggcccaatgagaacctggtgtgcgtggccaatgcgacttaccactgcaaaaaggataattgccccaaccttcccaactcagggcaggaagactatgacaaggatggaattggtgatgcctgtgatgatgacgatgacaatgataaaattccagatgacagggacaactgtccattccattacaacccagctcagtatgactatgacagagatgatgtgggagaccgctgtgacaactgtccctacaaccacaacccagatcaggcagacacagacaacaatggggaaggagacgcctgtgctgcagacattgatggagacggtatcctcaatgaacgggacaactgccagtacgtctacaatgtggaccagagagacactgatatggatggggttggagatcagtgtgacaattgccccttggaacacaatccggatcagctggactctgactcagaccgcattggagatacctgtgacaacaatcaggatattgatgaagatggccaccagaacaatctggacaactgtccctatgtgcccaatgccaaccaggctgaccatgacaaagatggcaagggagatgcctgtgaccacgatgatgacaacgatggcattcctgatgacaaggacaactgcagactcgtgcccaatcccgaccagaaggactctgacggcgatggtcgaggtgatgcctgcaaagatgattttgaccatgacagtgtgccagacatcgatgacatctgtcctgagaatgttgacatcagtgagaccgatttccgccgattccagatgattcctctggaccccaaagggacatcccaaaatgaccctaactgggttgtacgccatcagggtaaagaactcgtccagactgtcaactgtgatcctggactcgctgtaggttatgatgagtttaatgctgtggacttcagtggcaccttcttcatcaacaccgaaagggacgatgactatgctggatttgtctttggctaccagtccagcagccgcttttatgttgtgatgtggaagcaagtcacccagtcctactgggacaccaaccccacgagggctcagggatactcgggcctttctgtgaaagttgtaaactccaccacagggcctggcgagcacctgcggaacgccctgtggcacacaggaaacacccctggccaggtgcgcaccctgtggcatgaccctcgtcacataggctggaaagatttcaccgcctacagatggcgtctcagccacaggccaaagacgggtttcattagagtggtgatgtatgaagggaagaaaatcatggctgactcaggacccatctatgataaaacctatgctggtggtagactagggttgtttgtcttctctcaagaaatggtgttcttctctgacctgaaatacgaatgtagagatccctaatcatcaaattgttgattgaaagactgatcataaaccaatgctggtattgcaccttctggaactatgggcttgagaaaacccccaggatcacttctccttggcttccttcttttctgtgcttgcatcagtgtggactcctagaacgtgcgacctgcctcaagaaaatgcagttttcaaaaacagactcagcattcagcctccaatgaataagacatcttccaagcatataaacaattgctttggtttccttttgaaaaagcatctacttgcttcagttgggaaggtgcccattccactctgcctttgtcacagagcagggtgctattgtgaggccatctctgagcagtggactcaaaagcattttcaggcatgtcagagaagggaggactcactagaattagcaaacaaaaccaccctgacatcctccttcaggaacacggggagcagaggccaaagcactaaggggagggcgcatacccgagacgattgtatgaagaaaatatggaggaactgttacatgttcggtactaagtcattttcaggggattgaaagactattgctggatttcatgatgctgactggcgttagctgattaacccatgtaaataggcacttaaatagaagcaggaaagggagacaaagactggcttctggacttcctccctgatccccacccttactcatcacctgcagtggccagaattagggaatcagaatcaaaccagtgtaaggcagtgctggctgccattgcctggtcacattgaaattggtggcttcattctagatgtagcttgtgcagatgtagcaggaaaataggaaaacctaccatctcagtgagcaccagctgcctcccaaaggaggggcagccgtgcttatatttttatggttacaatggcacaaaattattatcaacctaactaaaacattccttttctcttttttcctgaattatcatggagttttctaattctctcttttggaatgtagattttttttaaatgctttacgatgtaaaatatttattttttacttattctggaagatctggctgaaggattattcatggaacaggaagaagcgtaaagactatccatgtcatctttgttgagagtcttcgtgactgtaagattgtaaatacagattatttattaactctgttctgcctggaaatttaggcttcatacggaaagtgtttgagagcaagtagttgacatttatcagcaaatctcttgcaagaacagcacaaggaaaatcagtctaataagctgctctgccccttgtgctc

SEQ ID NO: 4760 - DNA, 2332 bp, Homo sapiens
ctgcatccccatcctcgtcgtcgcccggcacagcgcgagcgggcgagcggcgcgggcggccggagcgccgaggcccggccatggccaccaccagcaccacgggctccaccctgctgcagcccctcagcaacgccgtgcagctgcccatcgaccaggtcaactttgtagtgtgccaactctttgccttgctagcagccatttggtttcgaacttatctacattcaagcaaaactagctcttttataagacatgtagttgctacccttttgggcctttatcttgcacttttttgctttggatggtatgccttacactttcttgtacaaagtggaatttcctactgtatcatgatcatcataggagtggagaacatgcacaattactgctttgtgtttgctctgggatacctcacagtgtgccaagttactcgagtctatatctttgactatggacaatattctgctgatttttcaggcccaatgatgatcattactcagaagatcactagtttggcttgcgaaattcatgatgggatgtttcggaaggatgaagaactgacttcctcacagagggatttagctgtaaggcgcatgccaagcttactggagtatttgagttacaactgtaacttcatggggatcctggcaggcccactttgctcttacaaagactacattactttcattgaaggcagatcataccatatcacacaatctggtgaaaatggaaaagaagagacacagtatgaaagaacagagccatctccaaatactgcggttgttcagaagctcttagtttgtgggctgtccttgttatttcacttgaccatctgtacaacattacctgtggagtacaacattgatgagcattttcaagctacagcttcgtggccaacaaagattatctatctgtatatctctcttttggctgccagacccaaatactattttgcatggacgctagctgatgccattaataatgctgcaggctttggtttcagagggtatgacgaaaatggagcagctcgctgggacttaatttccaatttgagaattcaacaaatagagatgtcaacaagtttcaagatgtttcttgataattggaatattcagacagctctttggctcaaaagggtgtgttatgaacgaacctccttcagtccaactatccagacgttcattctctctgccatttggcacggggtatacccaggatattatctaacgtttctaacaggggtgttaatgacattagcagcaagagctatgagaaataactttagacattatttcattgaaccttcccaactgaaattattttatgatgttataacatggatagtaactcaagtagcaataagttacacagttgtgccatttgtgcttctttctataaaaccatcactcacgttttacagctcctggtattattgcctgcacattcttggtatcttagtattattgttgttgccagtgaaaaaaactcaaagaagaaagaatacacatgaaaacattcagctctcacaatccaaaaagtttgatgaaggagaaaattctttgggacagaacagtttttctacaacaaacaatgtttgcaatcagaatcaagaaatagcctcgagacattcatcactaaagcagtgatcgggaaggctctgagggctgtttttttttttttgatgttaacagaaaccaatcttagcaccttttcaaggggtttgagtttgttggaaaagcagttaactggggggaaatggacagttatagataaggaatttcctgtacaccagattggaaatggagtgaaacaagccctcccatgccatgtccccgtgggccacgccttatgtaagaatatttccatatttcagtgggcactcccaacctcagcacttgtccgtagggtcacacgcgtgccctgttgctgaatgtatgttgcgtatcccaaggcactgaagaggtggaaaaataatcgtgtcaatctggatgatagagagaaattaacttttccaaatgaatgtcttgccttaaaccctctatttcctaaaatattgttcctaaatggtattttcaagtgtaatattgtgagaacgctactgcagtagttgatgttgtgtgctgtaaaggattttaggaggaatttgaaacaggatatttaagagtgtggatatttttaaaatgcaataaacatctcagtatttgaagggttttcttaaagtatgtcaaatgactacaatccatagtgaaactgtaaacagtaatggacgccaaattataggtagctgattttgctggagagtttaattaccttgtgcagtcaaagagcgcttcca
